United States Patent Application Publication US 2005/0208558 A1 - sequence listing, part 15

SEQ ID NO: 14320 - DNA, 25997 bp, DROSOPHILA
gtaattgccaccgaaaatggcgcaatgtcacgcttcgcaagcgctaaaactaaacgcgccggcaattgattagaccaaaactccgactacagactttgcacataaaagtgagtagtcaagtagtagagctgtgcacttggccccgctttcggcagtgattgcgtaatgaatgattcatgagtggcccgaaaagttgtcagactcggaatcgatgacgttttaattcagaaaagagctttcccaagtgcatttaatttggagtggaactgggctggggttcaactacctgcgcagacctgttgatcacaccaaatagagcgatggcttggccaaagaaatcgcagccggaactaaatgctctggcaatattgacagttggcttgtctggttgcaaatttgtttgttcttcgaactgggtcagcagatgcacgaggtatcgcacaaagccagatactcaggtacacacacacacacacacacagtggtatacaaaggtgctcaaatagacactggggcacctcctccgtcgcccttttcagcgtgaaagaaaaacccagcagcgaacgacggacagcaccgaatggcatttataattgtaacaattgtgagcaaacacaggccttttcgcctttttgccatttcgctggccagggggatttccagtcgttcccgcgacttgtgtaaacatcagtgaacatcaaaaggcgctcgttgccgcctttaatgccattttccctgctcgatttttgccagattacgtaaacgcctagttcgctgtgagctcagaaaactgaaatggatatgcattttcaataaatagggagaagttccccttatttgctaaataacattaaagcagaaaatacaaatttgcgacaataaatacatgtttactttaatcggtatcattttatttgaaataatattccattattctttagaccttcaatttttccctttacaaatatttatactactgttacggaatctcataaaagtctcactcaccaatcattaacagggcggccgtgaggtgggagttgggcggtccggcgagtcctgtggcgcccaaggccgctccgcccagggcgcaggccacgccccccagggcgacgacggcaataagggcgcgcagcggcggtccggcaaaccactggccacagcagcctttgcccgatctctccgagggggatctggaattgagcagaatggaaaacagatttttagtaaggcagctggaaaatataaaggggcataatggtgggcgacaaaatggtggcatggaaaattcgtacagcgcaggtgggatggcgaggacaacagatgctttgctgcgcagcaaattggcaaacggcatcgtctcgcgccaggtccttttccttttatccttgggtttctcttcacaaaagcgcagcgagtgcgcaattgttgtaatttgatgatttatgaggcaaaagaccaaaaatttgcgcactgcccgccaacacgaaacaagctgaaaggatccctccgaatatccttgggcatccttggtggcgaggcagcccaggcagccaggcaggcagacaagcagacgacgtaaaatatttttgcggagaaaggacaatttatgcgacacagacggcgacaaaggcaaaaaggacgtgtgtgcgtaaattcattaggatacggccaggcgttttctacacccggcaagacgaagcaaccaaaccaaacccttgccaaacaattagaggggaaaatatatttatagtccttgccgatgttgttagagggatggaaaagcgtctggcgcttttgttgcttgtgtcatcgaagccgcttcacaaaaagatgataaattgttggaaaattacgtgcacaaacatacatccgtaaacaagttgggcaaccggaaatttatgtttaataatttgctgccgttctcgctggcaaaggatttgccgtatttcgtgtattcgggatttacacttttatgacgggccattaaagaagaggtttgccctttccccgccaaaaaaagagcctgagtccatggccccgaggtcgctgactccggtaatgcggcggcatgaatgtttcatcagttgtcgtgtcatgataaatttgatcttttcagctcatcatcgctcaggccctcggaaatgagctcgcagaaatgccaaaaggtgagttcagtccgaacaataactatgtattctttgccctattcaaaagtttctaacgacacgcatccccagatcgttctttattccagcaaaacaccccaaagttcccacatagatctcacagatctcagcactttgcggcatttcaatcacgaccacatgcggtgacaaagttcaactacatcgatgtatcttccccagctgcagatagccccccatcgtgattgaatgttgctaagcatcagatgattgattaaacactaattaggggcggtccaaatcggagaactggaacccattcccattagcatttgcattcccatctggggtcttattaaaatccattgcatgtgagtaaacacagcaattgcgcacttgctatatgatgaatagagaatatggaatctctacaacacggagcaaaagttcaggtaattgtactgaggaatattaagttcacttttatgaacagcgaagtaacagcaatgtggtccaaatgaaccctagtaaagcacacgtgttgaaagtttctgcacatttggtatagaaatgttacatttgttttcctcagtgcatctaaatccacacatatgtgcgatgtgtatccgaagtagttcagggtcagttttcgctttataagtctagcgaaggcttagaagctagcaagctagcaactgacggacagtaagccagctgagcgctaattcagtcagttcggcagtcagtcagtgtggcaatcattcaatcgggcggttgcatttaattttcatttattaattgcaatttgtaattgccaacattgacacagttccatcggctgagcgtatttattcattttcgcgctcgacgcgcacttatcgctgaactttcatttctgcggagtttccatttaaatggcgtttccgtttcctttccctctgctttccggcatctgtcagtttgacatttgcatgcgagtgaacagtttccaattgattaagcaattttcagtgcgtcaaaaacaaaggcggcttcattacgataagactcagtggggattttatatatatgtatttatttatcagtccaacatccgccaacaactagctacatggaacaactccaaacaacaagaacagcgttgattcatgtttttatgtaagctcgttaaactgagacattaattccgctcgcacccgcacgtcaattagaagaagaaaaagaaggaggcctaatcaaagtttaatggaaacttaattttatttatcaggcaattccccgagcagcggcttttccgctcgctcgtgagaaatcaaacgaaagcagtggaaaactaattaaaggcgaagcggcggacaatgaaagcgaaaatcgcgttgaattcaatttacatgtatatttgataatttatttaattcattggtgcttttctttaacttttattttcgctctcgcttagtttcagtttcagttattgtttcagctttagttttcctttcttttcacctcgacttatgtaattaaatgtggaaaatgaggcaatcaccgcgggcgcagcaaatgaaaataattagctggaaaagcatattagcattggcacattggcacacacacacacacacacacacacacactgacagccaaacttagccatagcttttctcattttggcccactgacaaagcaaattttttggctgcagctgccggctgaaggacggattaggccacaaaacccattttcaactttcaatcacagcgtttccccttctccccgattttccattccgaatagggccataattacagcgcgcttttcaactttgccgcagttctgatttgtaatactaacttttttctgttccctcattgttttgcgggcttttgtgtttttttttttggcaagaagggttttcggggcctgaactacgagctgtgttaatttggccagacatttgggattctctggcttgttcttcgggctaaagtcgggtgatttgagttcacaagatctgggctgcacagagagaaatctgcgaaatatttctctaagattctattcctttaataaatcgtttaaataaagttgacgggacattgatggattgtcttctacaaaatgttaaaaacaaattgtaatgtcttttggttcttctgaatgggaaacttctataaatctctcctccctcctcgatctaaaaaatatgtgcgaggtgttctattaaattccatgacacttagaagttttagaatccgaagagaaaaggcaactgaataaatgcccaaacatgattctatttttacgaaaagtgtgtgtgtgggttaaatggaaataaaatgaaaaccagtagcaatagagactgcgactcagaacatgacattcacccggcattaaaatcgcagttgttgttcctttgccgcgatgtatataaaaatgaaagcaaacagcgagactcgcagacggcaataaaatatccaagcaaaagagacaaagtcacgttgggtgtatagtacttgtgctatataattgtgtacatatatataaatatgtgtatctagatatatacacacgtatggcggagtaacgatttcacacacagccgcagaaacttctgacctactaactgctgaagacggagagcgagtctctaaacttgggcaacgtttttccagttaactgcaaacgctttgacgcttgactgatgccggagctccgaaacaggcaaacttaggccagctctagctttaacccagggcccaagctgccaccttaaagagcccagctgggtggcggtgtctgggtatctcagtatcttttggggggcgtaactcgagcacacgacttcgaaagcgtccctcaccccccttaccccatcaactaaaatggagtatctgcaagttgagttgtcagaggagctctcctctgccggctgacaggctccacttcccccattctgtcgggccaagtgagctcttaatgcgggtgtaaaagattatatggcaaacttggcgctgcccattggctgcggaaatagctgcactcgcagaaaatgtcaggtttcaataataataatagtctgctattcggaaaacatactattacaaacattactatcatgtttatccgaacaaatcatttttgttgcaaaagaaaatatttcttgtagaacagcatgtttacagaacgtttacaatttctttcacagtaggtacagataaatgcaataccatttttattgacagcattttttatgatcatctacgtttttataggtgtcttttattaaaatcacttggtttccttaggaattctggtgacatttacatttaaaattctatcgcgatttgatggaaagtatgtccagagacataaaaaatgtaaaataaagtggcatgtgacttctgcaacatctgcgaggtaattgctgaaacttttgtttcgagtgcagcaatgcagacaaagttttggccaacgtttattgccaatttttgaatgcataaaacgcaagagttgccagcaattgacgcccacgcatggctcccattggatcctccttctgctcctccgtccagaagcaaatctggaatatagggcagcatgccaagtgtgcggccaactgcagcagacaggcgtacgtgtatacaaaaagaaaaaggcattagccacccacatatgtatgtacatatgtgcatatgtggactcgtgggtgggtgggaaataaatgggttgttggcagggaacaagtgccaaacatcgtgacgacaacgacagcgacaactggagtcgcactggcattgcgtctcaggcatttctaatttgagatccgtttctaatttctggctttcatgtggcacagccaggcagccaggcggccaggcagccatggccatggagcagcagcatccgggttggcaattacttttacatgttgccgacgcgacgccgcagttgtagcaagcaacattgctgcaagaaccgcagccaatgtggcgcgctctctcgaaaaacacaaacacacacacacacacaggaaccgcttaagtggctgcgtcattaggctgcgagatctctgctgttgctgttgcttttggtgttgcacgttgcatgttgctgttggtgttgctcctgctgcagtgccagcatttctcgaactgggattgggtctgccatgtatctgtgtcgctatatgtacgtacataaattaaattcttaaattgctcgttagcccatcatgaggtttgctcattcattcatgcagtcgtcgatgttgttgttactgctgctgcttctgttgcaacgtggctgctgtcgctggtctatgatgggctgcaataacaataatcacgctgccaacagcaaaaacaacttctcaatgttggccacaatgtaggtcacatcgcatcccagtcccctggccactcactatttcacttttccgctgcccagcgatttccctcgaattctatgcgcttttaatatcgcgcagtggcatcttcaagtgatttaatttagcacccaatggattctctttggcggtcgcttttgtctcaacgaaatgcaaggggtctttgctggaaagttgtggacaaaattatgtgcgccagtggggagctattatatttatatttttattacccaccgagatgcgggctcttcaactagctcagtttcatcacccatgagatgttatcgggggatcgtcattaattagaatacattaatgccccggcgagcagatgacagcactagtgcccaagatagtcagctttgttctttgtcggctgaaatactgaatcagttgtgagacaaatttaacgatacaaaagtatctgcaagatacttaagcgaacctctgtggaatatctgatttacgttgcacaaaagctgagagactttatatttatcgcgagcacaccataattggttaggtaaaaggctttaaatgggagaataggtgtcttatttataacacactttaagagacttttgggaatattaaattccaaagagtctgtatcacagattaaacaagcattttaatttgtcgcggcaattagctggttgagaataatttccaatcaatcgaagagccagctactgaaccatttcgaactctgattattacgcgaatcgtttccttggtaagtgaatatgtgtgtgtgtgtgtgtgtgtttacccctggcaaacaaaagaatttcgcaacattcgccgtcgattctcggcatgaggtcaacaactcattacggtgttgtttaataaacatttctgggccgctggcctccagatctcccagccctttcctcccattttggctttaccccgtacaaacgcctaattactttgccgtttgaagtggaagtttatttgattatgacacctgatgacctcgggcgttactcaaatgttgtagggtgtgaaaaattgaattatcgcgctcagggtaggagaactttccaagcaaatggtcgaaatctataacattgcattgggcaaatttaatttcgatttcaaaaatgcaagaaatgcgcggagaaagccaataacagccatagtctcgagttatgcaaaaccataatcaaatactttggccggcaagcgtgagcaatttatggaggaatttgcccgccaggaattccaactcgccgccccctcaacacgaaggtcaaccgaaatggccaatgaaatgaaattccaaatccacagacagagccaataaaaatgcaagcgattccaaatcgttgacaaatcgaagcgcccagtgtcttggatctcggttttgtggattcgaaccgaggcattacggcggaaagttttgcagtttagggatggattttcaactgctcaaacggaaattcgctgcgtggggcagcagcaggaaaacagtaacaccgtaactggcttttcccacctcttccctaccgtcctcttccgtaattttttttttttgagtgctgctcacagtagcttccaattgagtttttcctttgtttttctcggccattgccaatttgatgcggcggatttctggagtttgtttttacgacgagccactctgccatgtaaaggcggcattttcgttttggctcctttttgttttttcgggtcgctccggaaattgctgccatcgataacttagccatagccaccccatccccgatccgctgtccacccactcgaatcggatcctttggcctttgcagacgacactttggcaatttatttccattccttggctgcgatttgcataagcgccagtcagactcatgctcctgcttacacgcgaagaaattttgcatttacattttaaaatgtaaaataaattcaaattgaattgaatgcaaatccaaccccccaaaattaataaatatagatagaataatccaaagaatatcggagagatgtctttgtttcagtttgtcaggtaaagattttcgttgtttttctatttatagaagtttttcccctgtctatccgtcgattttccatccagaatccagccatgaaaatgacacggcaatggggagccaaaaataagtcacgaaggcagaaacgaaaaggagcagattaagacaaatacaaatcagtgcataatttttctattaaacaatttggagtgggcggttctggacggccccttttcccccgccccggaacatggaggtggacccagaggtggacgtggaccacctggatctaaattctcagcttgcaaatggtggcatgctgatgttgctgccgggtcacgtgcctgccatctataagcacggacttttgtcagagttttgcggatgcggcgaacacccgaacagcaggacatcgggacatcaggacatcgggacaccagaacactaggacattcccggaaaatccggacacgtaccgttagaacagctcgacttttcaattttaacacagtttatattcaatttcgggccgctttaattcgatgcccattcagatgacgcttagatcaaatggcgttgtcatagtttcccggtctatagtacagtactatccgtctctttcgccaaccatatttcggcctctttctgcggcatatgcaaattggtgcttggtgcgcgaaagtcgcgccaaatgaaaagcaacagccgattgaaatgaaatacacggcagaaattaaatgaatacgtgggacaaatgtgctcacattgttgctgttggtgtttctgttacttttgcttttgttgcagccatgtctgctttttatatgtcatacatattcaataacagacaaaatgcaaatttgcaaatgtcgaaaatggaaagtgatggcagaaacggaaaacaaaaagcagccaaacaatcgagacgaatgggttccaggggggcgaagtcataacccttcgtttccagaatcatcagcattcatatgcggatgcatagatatatctacatacatatgtcctactagacaccgaacatggccagcatacgaagtcaatcgcagggaaatagatttaaatgtctgtcatggatacaaaaaacaagtgtgaatgatttatcagagaaagtgtattgcatgaatatagcatgaaattcagtattaaaagtctcattctctaacaaatcttaatttattattgaatttcaagtgtttattaaaacgttagtttgcagatagatagatatcacctaaagcttttagcgactgaagccaataagaaatggctttaaaacactgttcatgaaaaatctgtacagtttatatctagctgataaaacgttaatgatggctattaaagaaaacgaaaccagggaaataaaaaaacgaaatgtgtgtagataagttagctgccagctgctccagcgaaatgcaactgatcataaaaaagcacttggttcgtactcaaagtcaagcgtatgtttacctttttcttcaaccatggccaaacacaatttgtgattcaaacggaaaacctgaacaaacacacaggtatcgcatgattttgtgtaagaaaagattaggccacatgaactctccacctgagaacgatcgttcagctcaatatcacatcaatttcgagtcagtcagacagccatgcatattcataactggacacgaaacaataaaaaacccgaagaccaaaatccaaattgtggccaggccactggcgatgatatcaaatatcaagtgctggccataaacaacttgaccttgtgcacgtaccgcagcattttcccccgagctctggatggaagtggtagttgcctcaaatagcatagaaatagccagaccaaaagcaaagtcggagccatgcccactgctcatcgattaccaattcacgttcacacgttcagtgcgcttcgttcgttcaatttgaaaaaaaaaaaactgaagaaaaatcggtggtactatggctataagtatagagccattggtagtgtgcggattgtggcgactgtgaactgtggaaatccgacttggtcatgctcataaatgtggctaatttgcagcgaagctctggctatggacgcgattggcgatgcttctaagacaccttgcccccggcacgttgccggattgttagctgttggcagttagctgattgaaatgctgctggcccggctcgctttcggtttgctttcgtttcgttgcggccacaaaagtgtaccaaagtcgtgattcagctaaagtttccttcaactctttttgctggccggcgataacctgccgaattctgctggcacctttaagtattttcggcacgcaactggcccattacccttgccattaaccgctcttttggcaattagtttttgattatttgtgggctggaaattgggctgcatcgatgatgggtcgtttggtgttaaggactggtataaccgtcaatggttttccataacgattgtataccaacgagactggttttaaacggcaaatgagaggtcgtaagatttttaatagaatttccataacgataatgtgcattaatgagccatttggcagagtggaaatgcaatacgtaccggatttaccattatcgtcaccggatcaaaatgccagcgttcactaatttacgtgaattgaatcaaaccgatagcctgtcaggcaattgaatcaagcgaaattggatcatttgggcggcgggcagcgcgtttggcaatccgtaaaaacacatggctctcgccaattactctggccataattctagcctgtcgccattcaaaactcgggctgttgtttctgttgctaatgtgcaaacgaactcaattacgtagataaaatactgtgccgggcagcaacaagcgcacaataagacaacaacaccccatcatccagttgagccgggcaaaagccataaaaatgcgcataaagcgcaaaactgattgagagttatatgaagacacacggcacacagtgcggcacattcgcatgtatccgccagatacatatgaacacgcagatacagatacgagggctgagtatctcggaccgaacgagccaagggacatcacgccacagcgcattaaaggaaattgacgcggaaacgaagcgaataaaaactacccgagctggccgcagaaagcaatctgcactcagaaaaacgcgacagtttcgaaaggatctacatgttttccatgcaacaaataatgctttgacttcatctacaatcacaaccttgagaaattatcccttttgaatgattaataactaaataatcagtaaaaggtacgtttataacattctaaaacttaaaggaatcattcagataatttggaatacaatagattctctaaggaaattacatatgtgtgtttcacccaccctccccttcatatttgctatattatcaatgaaagttaatttgagcgggcggtattttgcactgtgtacaagggggaggatggcaaaggggacgtccgagttgtctgtccaacaagcaatttccagctatcaacacaaggcccttaccataccataccataccataccattccatgccatacacacaccacactctcccccctgataaccgaaatcccctttccgcagaaagtgcttacttcattacgcataatttcctgagcctgcgttcagcaacattttcattttcatgtccatttccatgactctttttttcgccacccgaatgacacagagaactgcgaagtggtcagttttctggacccagttttagcttcggactgtgactcagaatgagacccctaggggttggttggttggttggttggttggtctgtgatggccatccgccttatcgagggtctgccaaatgaactatggggccatggccatgagatacgatgagggtgttcatgtccagccggccacatgttgtttccttcgtttcgattcgtttttatgtgcggctgggcaaaaattatatgctgattgcagtttgccgataagcggaacgaaacccaaacgaaattatgaccatgcgggtagtatctctatctccccaccgctcagaaaagaacgaaagaccccttgaaagtggaatggtggggatgtcgcggagcccaatgtaaatggagactaaccgcagctgtgcgagatttgcaaaacttgctttgtaaaatgcaaaaattgcatccacttggccaagggatttgtcggtggaaaagcgaggggaaaactgcggcgtgtctgcgtgtgaaaagtcgtcgcaagtgtgcgtttaatagctatgcggcttggggagcagggtttccaaggcaagatactcccgatcccgaaaggggtaagacccatcttgggctcctcaacttgtaaagtacacaaacatacacacacacacacacacacagagcgacagcaactcatgcagatgaagcgtttagccgaggagaaagttttctctacgtcttggcttttgtggctaagagatgagagtttgctttgtttcacttccacttgcctatctctctaccaatttcttcgtattattttagtttttttctctgctttttttgcccatcgccctcttcttcttttgttttcagctgtttggctacgctcttagttattatagcaaattatttgttttgacttttagttgggccgtcaactcgcagcggccttgtttgagtgtgcgtgtgtctatatagatgtggctgcaacagttgctgctgctgccgctgccgctgctgctgctgctgctgctgtttcccagctgcgtcaaattaccgcctttgtctcgtgcggttgcccgggccaacgtttcccatttctcatgtttaccatgcggctgaggcggtgatttttcagcatcttctccattagtttggcttatgaaagtgctcgtgctcggtgctctctaattatgacccctggatcccattccataccgcccatctccaatccttccctttcgaacttcaagacatttatagttgtcactggcaacgtgtttgcaacccttccacttgcaaatatcacgcatacgccgcgtgggaggccaagacaaattgtaagtctctgtttgcccttgtcctccatccgtaaatgctgtgtgtatgtctaagtaattatgagaaacgcacacgcaaaggggtttttgggggaaaacacgaaggagtaacataaattatgcattttatttgctcaagtgctcaggaggacacacaaaaaggatactggaactggaatacccggcagccacacgcgcatttgttaaatgttttaattaatttgcgaaacgcgcttgtttcgttgcctttttgttgctacaaataaaaaccaaaaaaaaaaaaagaagaaacaccaacagcaatgagcattacattacaagcaaactgtgcaaatgtttctgtccgtgtgtttttgtatgtggcaagcagatttgcagacaacgaacaaataagctttggcaacaactttgacggcaacaacacaaccgaaactacagccacgaaactgcaaaactcattgcactttaaattgaaatcagtgcgagatacagaggtcaccccatctgactcaactctcgaactcttccgaaattcgtggcatcctgttggaagctcctattttttttgcggttgtcctttttttagcgcgcgcattttgcggttgacagttgacacagtgctgtgtggcagagtggcaatggcaggacctcagtatctgcagtcggggaaaaggaaaagtagattcagacatcggatggagcatcctgctactcgcctgcctggcaattggtttttgggtaagcgccacactgtttaagctaaaatgctgccattaaaatgcgctttccccactcaacttcctgtacgtcctcattacacttgcgcatttggtatatattggttttaaatatttaagcactggcatttgttgtaaacggtaattgaagccaaacagggcgagcgtcagagggaatcgtaaatggatcgttggcgagtgggagtttctccgctcgataggcaaatgtgcccacctactgaccatcgatcaagagatccacagagatctacgcaacaaacaagctgagaaatcgttaactttcacccgaaaaacggtcggccaaacaaaactggttcgccaaatcaaatattacctcatgccatccatagccaaaaggttgaaaagccaaaatgaggggctaattatcgagctggcagctgtgagccttaggtttaattgcagcatgtgccaataccgcgattatccaaccaaatttgtacaaacgacggggaaatgcgcccacatatccggccataatgcgggtcaagtggtctgctccctgagtcagctttaatgccaattttagtgcatttccagcgaatgtgctatcgcacaactgaacttagctgaacccccgcttataaggtttatagcataaccccttcccaaatcaatgccacacacacgcccagttgccaatcccatcgaactcagttcgttgcacaaaagcctggccgcagaaacaaaataaaattataaaaaaaacagagagagagagaggagcttagccataacataaattatggacttttgtttaaaaccacagcagccgcaaaaataaacaaaaaaaaataatacagtaaacccaagcggacgactcgaacgggcgataccccaggtgaggaatcgaaagaggaaaccactgggaggggtttcaatccgagacattctccatcctgtcacagaaaccctcgtcacatagaatagcctcagaagacacgtgtttaccagttagtgtattaaactctggatgcgctggttttcaactcaaatgattatagtttatttatgcgcttgctttaaaatgatgcccatcatgggaataattgtattgtgctcggcactccgaatttgcatcaaacgccgccatttgtttgggcttttgtgcgaagttctgaatctgaatttacaatgagctggccgggctttgttttcggcgttgcccaaggcattgaactgtaatggccagaacgtacaagtcaacaaaaggcaaaccaagaccatctgaaaatttaaagaaaaaaaaaaaagagaaagagctgacagtttcccactgctcaaggccgggctcatttatggctgttaaaaagttattaaaacaatttgaccacagttagcaagacttaattgcagtggcacaattacggccgagaccccattagatttggcattttgcggtttctgggccacagtcagcccaaatcaaagcgaatcgaatcgaatgcactcgggtgacaatttaataagccagaagattgggccgtctcttctcggccctttggccatagtccgacaactctctctcaatctactttgttggcaacttgcttgcgacttggcccgtctattttgtgatgtggctgctgctggtggtgctgctggtggtgctgctacctcatccgatgttgctgctgcattttgccggctcatttcaacttggcccgaatgcattttctatacaaacacagacagacccagaagctgaggcacaaacagacggagctgaagcagacaactgcaattcggttgggcatgggtatggccagaacaccgagagaaaaatcaaggaaaattgtaaccacttcgtaaactagtaagcctaacaatcaagaatattcatatggtttgatcgtatcaaaagtatttttttaatatataaagcttggtacataaaatagtaaaattgaaatgttttaaaaatatgttttttccattactagcatacgtactattactaaaatatttcccctgtgtacccagccctctctttacccatatcatttcgactggagaatggcaactttttggtttattggctttattgacttttggtaagttctcttcccggttgacttcgtttcgtttcgattcgttttgtggccagagcttcttgaacgggcgaaacgtttgttcgatgggtggaggagggacatcctttaaagggtatgccagcagtcggttagtgttagtaaactcctctgattgctggctgtgtttattcgcttataaaaataaataaacccaacgccgccaaatcagtgagagagtaggacagcaggagtccagggcagagcaggacagaagttggcagttgcaagaccgtaaaactggaaagttgtttggtcagttctactgacaacagccaccaccaacggcagcagcaagcggcagcagcatttagtgtcgagtgctggctcttgggctctgattttcccggtgccgagatgcgaacgaacatttatgaaaaatcactcaattttccagctgcggaaaagtgtgtcatcccccgaaatgttgcagaatccccagacaagatcatcgagtctctttccttagactctcgcgacacggagttgcaactcgatcttggctggtttttacctggttgttttcggctgaaatctggtttttgtctcgatcccgctatctctttcgctcccggtgcatctgtcccgctcactgttttgcttcttattctgtttctgtttcgtttccatttgcatgggtgaagttgaatcatcgatgttgatatcgagctggcgtatctggcagatacttttgcacttctccgcaaaacgccaatgcgaatgcaaatgcctgtagtgtattttatccagtttcggggtatttggactctgtatttggcactcgccagcaaactggtttccctcctccttcgtcatgagcaggaccgatttcagtgtcagctcagcaaaatcaccatcagtccatccattcaatttgcaattagccgcagcgccataattaataaaggaaacacgcgtccaaatgatgttaactaaattgtttttgatttatgcctcaagttcgagttcatttcgcttatgagtgagtgcctggataactttaagccaaatttatgataagctgttggccatttggcctgcgttaacctcaggccagagattcagattcagatgtagatacagatacaacaaaaataaaaaactaagaaaaccgaatgcgaaagtgaaagtggtcgaagaaaaaagacagcactcctcgatctctctctctctttcgccttcccatcccgcatcgtttgtctcgagtgattttattaccgcctttcttgtctctgtccctctctccgtgttaacttggctcttgtttttggctctgtcagagtttcaaaataaaattaaacgctaagaaaaacaaaacaacaaagaaatgattacaccgatttatacgtgagttcggcatcacgtttcctttttattgctctctgaatttgttatttttgctgttgtcatttttcattttgggttcagttggctggctgtgtttttctccctcggttatttaatgatttcaagattatacacggtccaccaggcgacccttctactcctggtccggtcgacacagagtgctcctgctcctccttatcccccaaaaagctgaggctgaaaaactttcgcttttttttacaccttttggggcaggtagggtaaagtaacacaaaaaaacaaaaaaaaaaaaaacgttgtgtaagagcatgttaatttgggacgaaggcagaaggtgttaaaattgcagataatgtctgcggtttgttgtttgggctctctcttcgctttaggtttatatgtatgtacgtacataaaccctttcattgagggatgctgttcacacttcactgccaggaatctccattaagcgacccaattatctgtgaatcttttgatgggaaaggtaagcggcttagagcgaaatatccaatttaaaggctggttgtaggactaaaaccgtttgatatgtgataaatcgcagtagaatttttataatcacctaaccttcatgtaatgccacccctgcagggccctgcctcgaaaaaacaattaatttaatgggccaactttgaactcgtactcgttcttcataaatatgctaatcagccggtgaacacgcctccaatttatacaaagaatagctaattctggcgctcagttcgcgctgacacagttttgcaattattcaatgggcaaacataattaaaattgtgaaacacgatttgctcttgactggagcaacgtctgtctgtcgcaaaatgtcaaacgttcaaacggtggaagtttgaagtggttgttgtttcatttcgagacgtttagggagcgcattagacagatagcgcatccgtcagatacggcaacagctacatttgccgactcagaaactgaaacagcaagatacacagatacaaatggcgaaacggagatacaagttcgagtacacgcggcatcgattatttgtgtggcgggctcaaatgaaaactggttctgccagtgcccaactatagataagtgtttcactgttccaggcaataaatgcgtgggaaagcgactaggccagtccgatctgccagtatcgcagaattatggccagtcagcctagcacaaagccaggctgcggcgctagatgtgcaattacagataagaccgaactcattataataaaaatgagttattaaagccccaaactgaagacccaaaacttttcgccgaaaactagccgagagtaatggccaaatgtaccgaccgctggcgcgttttttttttcgcatcaactttaaattaaagccactcgtttgctctattctctgtcgttcattcatttttctacatttttcttaatttcttggaagctgtcaacgttgagaattaatttttacgccaccgaaccgacctggaccggcctggacctgaacccggtttcctggtctggggtttgttcctcgccgaggtggagaatcaaatcatgcaagaaatttgttactgacataaaaattaccatcattataatgtctggccccgtctaacacgaacacgaacactcgaaagcaggaagagcggcgaaacagccagtatgtggtaatagaaaatgtcgaaatggacactgggaaaaataccaggaatcgcaggtgagcatgggattaaagtaattaaaagtagtgcgaaatttgatttataaaactactcaaaagagatgtatcttatatcttttatgtagggtccttactttaccattttagtcatatctttttttactttacataattatttataaaggaatattttctttcgagtgttttcaagtgtactgtacttaaagacgccttcgaaatgaagtcaaaaactatttcagcaaaacatatggaaacatgtgtatgtataacgtgaacggattttcggtataacaactctgtaagcagattcatgttaagcaataacagaggtccttaaaacggattttttctgttatcttcacaacttccccacattttcctcagtgcacttttcaccgggctaggaaaacgaaattcgaaactgtccaaagacgacaaaggagtgcctggtcgaacgtaacgggtcggatgagtgatcgatgctgtccgggaagagagttgctcttggggattgggggacagctagtgggctagtgggaactcacctgcgcatgatgggcagcggcagcgtgaagcgtccgtcgttcatgagaggcgctggcagcggacccggcagtggcaccgtcgatatcacggacgtcagcgctggcggaggagccggacttgcatgtgctggctgctgtgccgccgccgcaacagcagatgccgcaacggcagtcgacgggggcggcggtggcggagcggcggacatggccacgggcacgggcagagcagtatagggcggcgggtagtgggcgtgcaggatgtcgggcaacagagcgcgtgccagtcccatggcagccggatgagggtggggaagtgggtggggatgtgggtggtgcagatgcggtggtgggtgtagttgtggcggaggaggtgggggcgggtggcgtcgcgcatggtgtggctgaaactgttgttgctgctgttgctgctgccggcgttcccgccgctccttgcgacgttgctcccgtgtccggatctgttgctgctgctgctgctgctggtgttgctgttgcatgttggatgatgtactggctgacagatcatccgtttggcattccgttgaggtgaaggtgcgtgggtggttattattgtagctgctgctgcttgcattcacactgattatattcacactgttatcaggctgcacatgattattattgctggccgtggatgcagcagcaacatgttgctgatccccttttgggcagctactattattattgagcctattttgattttgaacacttgcactaaacactttggctgctgctggcacacacttattgatttcaaccacgctgttattgttgctgatgttgctgttggtggtgttgctgatgcagctgctgctgctgctgctgctgttgttgttgctgctgctgctgctgggggtgtagctgcagttgacaacgcacacgccgttgttgttgttcacaatgctcgtgggcgaagccaccgagacccgattgccgttactagtaccgttagtgttgccgttgttattgttgttgttgttgttgttgttgttcacttggatcgttaggctcggctgtcgctggcaggacttggaagtggctgttgttgttgttgcagttgctgttgctggcagcacagcaatgttgctaatgcttctagcctcatcgacaacttgattgtcgccgctatcggtgctgctgctgccggacacattgaggaacacactgctgctgctgctgctgttgttgttgctgctgctgttgctgttgctacaactagcaacagtgtctgctgccgcagtggctggcacatttagacgcatttcgctaacggtgtcggtggcgttggcgttttcaatgtccaactggcactggatcagaccccgttcgaatctgctttcactcgcgcgaaattcggcatagagacgctcgagttctgccaaacatttgttgggccgcagcacgctgctgctactcgaatcgtcgtacagtgggcgatagttgctgctgctgctgctgctgttgtagcaattccggttgctgctgctcgcgctgtacagcgttggcccgccgaaagttgccgagagactgatcgctgagcgctcgccgctgatgttgctcgcgtagctaatgttgctggcgctgctggtgctgctgctgctgctcgctggcgtgttcgtgttgctggctctcagcagctctctacgctctctggcggtacaggaaacaggttgactgacctgcactgccaccgagctggtttcctcattccctgcccctgctgccgctgctgcagctgctgctgctgatgtcgctgttgcagttgctgcctcatctctctgttcattgataatgcaattcgctgcgctgctgcctgggtttttctcgctttgttgtgatcttgcattcgttgctgggctttgtgtttccgttgccgttgtctcagtgttgctgttgtgctgcgttgcagttgctggcgtgaatggatcgcaattctgcgggagagaggtggaaaagagaaggagaaaaagagagagagagagagatagatgagcatgagtacgttttgcatatagcgagtgacaagatttacgtttccagtcgtaattaatgctaattgctgggggattacccgctgccagtgggtctcattttccaccagcattttcccgccaaaaaggtggcgaacgggtacccgtttaggatccttcgggcgaagcataaatgcgcgcttaattgaattaattaagccaacgcataaacataaaaccgtcacaagtaattgctggtgttgttgtggctgctgctgcctgcaaagtgctgataaagctgttggtccctaaccgaaaccctaacccataccctaacccaatccccatcgacatggggatgtgggttaaaaaccaaatgcgaatatacacacatctctgctcggttctgtgtgggttctaattatgttacgctgtgttacttgcattaattacgtcacagaaatataatgtgatttactgttagccagccagcaagccagccatccccttcattttcccttcgaacccgctcgaatttattgttctaatgctgctcagtcttgtgcactgtgcgattgcgttgctctcgagtgcgttgcaatcacagcagcaacatgcgttgggcgaggggggtttttccaggggggggggaggtctgagtgccgaaaaaccaaactcatcctcggctaacggtgcctgccagtggaaaagctctggcaacttcattacgtctcgtccataaacctctcgtcatgagtcagtcgtcaaagccacgcacataagcagtgatatgtgccggaaaagggggaatatgtggatcacaagggtacacgaattgaagaagtagtcactctgaggcatttgtcactgcttattagattcggccagccatgaacatgaacagatcgacggtggaattggattagaaataccagagttctaagaacattggatgtttcatttggaaacaaacagtagtttcgttaattggattacacgtaccagaaaagaagtctctatcgactttcaaccctacataaaagtatagggtatatccttgtgacattcgaaaaactcaatcgattcttttctttaactatcgatttgcatacgtaggtacaaattgtaaaagcgtttaatgttatggcatttttatatgttgttgtttcgtgcaattgttacgactccacgtattttgatagcattattagttttcccaaaatgaaaactgatatattcgtttttcctacacccccccccccccgaacccttttgtgaaaccattgtcatgcattctccccaccccattctcagcccaccgccgcctttgttgcttgtttgtcatttttgtgcggtcaattttccgtttcgctgacgccacataaacaaattatgaagtgtgcacagaaaacacagccacatgtgagcccctatgcgagagtacttcatgccgttctttatgcatatgcatataaaatttaatatgtggaaacaaagccccgcccccgtccctctatttcgcagaccgcccccgcccccccaacagcggaccaagaccaacgttcgatgctgataggcaacatatggcgcttatcggcgagggatgctagcggcacttaagggcctaagtgaagcattagcccttatcggggttacaataggatggtagcggtgctatgcggtgcggtgcaggggggatatagcgcggagtacggggctgtcaatgggctcgataaggcgacagttcgacttggcgctcccatttcgcgctcgagtcccacagtttcccattggcggcgccaagtaattcatgctgagcccttgacatcaaatttgatggtgctccattaaggagctgaaagtatcggtggggtgggttggatatgatattccattttcacctgcagatggcgctaggtgattgctgaaaggtaagcataatcttggtatctccaaaggagttgcacttaatgcctcataaaaagtgacacttttaagagtgcactaaatagaaaccaggtcacactttattaacaaagagtcctaaacactttgattggctttgtgggaaatggatttcacttacctgcgaaatgtagtcatccgtaaaggagcgccgtagacccaagccagcgggaacattagccgttagtggtgcagccttggattcagtctcatccagatcccgatcctgacccccttctcgatccggattctgatcctctgctactgctttcgttggcgatcgttgcgatctatcacatggttcgagagccactcccacttccccgctggtcttgaggatcagagacgtggcaggtggagctccaatcttggagctggaggcgttgtacaaggagtcgtaggagggtggttccttgattgaagtagcggccgaggagcaccattgagttaatgtgcgggtggggcttccctggtaggcggggaacgagtagcggttccgccggccacccactccgctggcggagaagctcaccttggccaggggatcgaagccggcgatggccgcgtcgaaggcgcttaaactaaacgggggaaacgaaggcacggggggcagaagcagggcggatccgctgtccagcgcctgctggtggtgggcgaaaagcgggaggtgggcgtggtgggggtggttcaaggccgaggcctcgtagctgctgtgcgacttacgcagctggcgattgagccgttcgtcgtcgtcctcctcttcggcctcctcctccgatgagctgggcaggggtgtgcgctcatagggcgtccagagcatggaggagagcgcctcctccacgtccggcggtcgctggcggtgcattccactagccaatccccctgacccacctcctgcccccgctccctgcccatggctgggtgtattccgttccgacaaggacatgctgcagtggtggtcagatttcgaagcctcatcgctccgctttgttccacatcaggtgcttacatggtgggatatcctaaaaaaatatataatatttatgattaggagttttagtagttgtttaagctagtaagttaactatgttatctatattcacataatttttgtattcactgcatcgtttgaatagaagtcaagttcaaaccttgcctaataaaaggaaaactttattgtttattatttatttatttatagttaattcgtactctttttccatttcctcatatcaaaaggtttttttgttaaccttagtggcctttcccccttaaaaaatcatgtacatcctttcttaaatccttgcgaatatctcatacacttataagtctgcatgcagactttcagttttcttgtcgatcgaaaaatgaaaccctgcaatgttccataaaaaaccaggcatgtatcagctcgaattgtaaatggaaactgaaaaacttttaactaagcaaatggctgacaaattaaacgcttaccatgccccaatttcgagtccagaaacttttcagcccgactcggcctcttccaatttgataaattgcgattaaagcatttgaaatcggtagagctggatggtaagaggttttctaatagaatatgccgccggcggggggtttctttttttctctggcaaagggatgggctggggtgaaaaaaaaacctaaaaatggaaaaccccaaaacgaaataagccagcagacatgaaaaacaagcatccgttttgtggaaaatatatgcagaaaagtttgcgatgcaaagtttttggcagactcgtcctctctcgattttcctcctcttttgccccaaaggagttagggaaaactttgccgcacagggcggaaaatcgagtgtgtgtgtgtgcgtgtttaggccgtgccaagccaagtttaaactggcatcgagtggaagggaatggcttgactgccatacgactaaacgagagaca

SEQ ID NO: 14321 - DNA, 2988 bp, DROSOPHILA
atgtccttgtcggaacggaatacacccagccatgggcagggagcgggggcaggaggtgggtcagggggattggctagtggaatgcaccgccagcgaccgccggacgtggaggaggcgctctcctccatgctctggacgccctatgagcgcacacccctgcccagctcatcggaggaggaggccgaagaggaggacgacgacgaacggctcaatcgccagctgcgtaagtcgcacagcagctacgaggcctcggccttgaaccacccccaccacgcccacctcccgcttttcgcccaccaccagcaggcgctggacagcggatccgccctgcttctgccccccgtgccttcgtttcccccgtttagtttaagcgccttcgacgcggccatcgccggcttcgatcccctggccaaggtgagcttctccgccagcggagtgggtggccggcggaaccgctactcgttccccgcctaccagggaagccccacccgcacattaactcaatggtgctcctcggccgctacttcaatcaaggaaccaccctcctacgactccttgtacaacgcctccagctccaagattggagctccacctgccacgtctctgatcctcaagaccagcggggaagtgggagtggctctcgaaccatgtgatagatcgcaacgatcgccaacgaaagcagtagcagaggatcagaatccggatcgagaagggggtcaggatcgggatctggatgagactgaatccaaggctgcaccactaacggctaatgttcccgctggcttgggtctacggcgctcctttacggatgactacatttcgcagaattgcgatccattcacgccagcaactgcaacgcagcacaacagcaacactgagacaacggcaacggaaacacaaagcccagcaacgaatgcaagatcacaacaaagcgagaaaaacccaggcagcagcgcagcgaattgcattatcaatgaacagagagatgaggcagcaactgcaacagcgacatcagcagcagcagctgcagcagcggcagcaggggcagggaatgaggaaaccagctcggtggcagtgcaggtcagtcaacctgtttcctgtaccgccagagagcgtagagagctgctgagagccagcaacacgaacacgccagcgagcagcagcagcagcaccagcagcgccagcaacattagctacgcgagcaacatcagcggcgagcgctcagcgatcagtctctcggcaactttcggcgggccaacgctgtacagcgcgagcagcagcaaccggaattgctacaacagcagcagcagcagcagcaactatcgcccactgtacgacgattcgagtagcagcagcgtgctgcggcccaacaaatgtttggcagaactcgagcgtctctatgccgaatttcgcgcgagtgaaagcagattcgaacggggtctgatccagtgccagttggacattgaaaacgccaacgccaccgacaccgttagcgaaatgcgtctaaatgtgccagccactgcggcagcagacactgttgctagttgtagcaacagcaacagcagcagcaacaacaacagcagcagcagcagcagtgtgttcctcaatgtgtccggcagcagcagcaccgatagcggcgacaatcaagttgtcgatgaggctagaagcattagcaacattgctgtgctgccagcaacagcaactgcaacaacaacaacagccacttccaagtcctgccagcgacagccgagcctaacgatccaagtgaacaacaacaacaacaacaacaacaataacaacggcaacactaacggtactagtaacggcaatcgggtctcggtggcttcgcccacgagcattgtgaacaacaacaacggcgtgtgcgttgtcaactgcagctacacccccagcagcagcagcagcaacaacaacagcagcagcagcagcagcagctgcatcagcaacaccaccaacagcaacatcagcaacaataacagcgtggttgaaatcaataagtgtgtgccagcagcagccaaagtgtttagtgcaagtgttcaaaatcaaaataggctcaataataatagtagctgcccaaaaggggatcagcaacatgttgctgctgcatccacggccagcaataataatcatgtgcagcctgataacagtgtgaatataatcagtgtgaatgcaagcagcagcagctacaataataaccacccacgcaccttcacctcaacggaatgccaaacggatgatctgtcagccagtacatcatccaacatgcaacagcaacaccagcagcagcagcagcagcaacagatccggacacgggagcaacgtcgcaaggagcggcgggaacgccggcagcagcaacagcagcaacaacagtttcagccacaccatgcgcgacgccacccgcccccacctcctccgccacaactacacccaccaccgcatctgcaccacccacatccccacccacttccccaccctcatccggctgccatgggactggcacgcgctctgttgcccgacatcctgcacgcccactacccgccgccctatactgctctgcccgtgcccgtggccatgtccgccgctccgccaccgccgcccccgtcgactgccgttgcggcatctgctgttgcggcggcggcacagcagccagcacatgcaagtccggctcctccgccagcgctgacgtccgtgatatcgacggtgccactgccgggtccgctgccagcgcctctcatgaacgacggacgcttcacgctgccgctgcccatcatgcgcagatccccctcggagagatcgggcaaaggctgctgtggccagtggtttgccggaccgccgctgcgcgcccttattgccgtcgtcgccctggggggcgtggcctgcgccctgggcggagcggccttgggcgccacaggactcgccggaccgcccaactcccacctcacggccgccctgttaatgattggtgagtga

SEQ ID NO: 14322 - protein, 995 aa, DROSOPHILA
MSLSERNTPSHGQGAGAGGGSGGLASGMHRQRPPDVEEALSSMLWTPYERTPLPSSSEEEAEEEDDDERLNRQLRKSHSSYEASALNHPHHAHLPLFAHHQQALDSGSALLLPPVPSFPPFSLSAFDAAIAGFDPLAKVSFSASGVGGRRNRYSFPAYQGSPTRTLTQWCSSAATSIKEPPSYDSLYNASSSKIGAPPATSLILKTSGEVGVALEPCDRSQRSPTKAVAEDQNPDREGGQDRDLDETESKAAPLTANVPAGLGLRRSFTDDYISQNCDPFTPATATQHNSNTETTATETQSPATNARSQQSEKNPGSSAANCIINEQRDEAATATATSAAAAAAAAAGAGNEETSSVAVQVSQPVSCTARERRELLRASNTNTPASSSSSTSSASNISYASNISGERSAISLSATFGGPTLYSASSSNRNCYNSSSSSSNYRPLYDDSSSSSVLRPNKCLAELERLYAEFRASESRFERGLIQCQLDIENANATDTVSEMRLNVPATAAADTVASCSNSNSSSNNNSSSSSSVFLNVSGSSSTDSGDNQVVDEARSISNIAVLPATATATTTTATSKSCQRQPSLTIQVNNNNNNNNNNNGNTNGTSNGNRVSVASPTSIVNNNNGVCVVNCSYTPSSSSSNNNSSSSSSSCISNTTNSNISNNNSVVEINKCVPAAAKVFSASVQNQNRLNNNSSCPKGDQQHVAAASTASNNNHVQPDNSVNIISVNASSSSYNNNHPRTFTSTECQTDDLSASTSSNMQQQHQQQQQQQQIRTREQRRKERRERRQQQQQQQQFQPHHARRHPPPPPPPQLHPPPHLHHPHPHPLPHPHPAAMGLARALLPDILHAHYPPPYTALPVPVAMSAAPPPPPPSTAVAASAVAAAAQQPAHASPAPPPALTSVISTVPLPGPLPAPLMNDGRFTLPLPIMRRSPSERSGKGCCGQWFAGPPLRALIAVVALGGVACALGGAALGATGLAGPPNSHLTAALLMIGE

SEQ ID NO: 14323 - DNA, 3364 bp, DROSOPHILA
gatataattgtattattttcacctgcacactgacgatgtgatccacatagttctgcttcttggcctccgatttggtttgttgacgtttccggggcggaatgaaaacagggcgttccttactgcccgtactggtgtctccgcccaggccgctcgagccctttcccaccatttttcgaattttccacttggtcctggcgcaaaaaactacatcaccatctttgggagcagacaaattttttcgttccccgtgacgttacttaacgcccagtaatgcaaaaagtgcacttccggcctttgtcgcttcgcggctgtgttgttattgatttttcctgggcggctggcacgtccttgtgctgaatttgcgttcattggcgtttttagggggctgctgttgttgcattttgggttgggcggcaatgtttacaaaaacttggcgcctgcgcgtgcggcatgtttaactttttaaaattctgttatttcaatagcaaaattttaaagtttaagttatgtagtgtttataaatacacaatttgccacttaacaatatttttagtttgttttgcgagtagcttttgtttttagctgttgtaacggttaaaggaataacagtctactttcaacgggaacagctgacttaggcaaagcaaagttggctgcgattgtatatgcacaagtcagtgtgaccaaaaagtacaagctgatcctgcattggggatccatgttaagttatttagatatttagtttgtgaaatgcacaacagcatttttaatagaaagttaacaaattttgaaaacagttttaattttatccgatttgtaaaacatatatttaattatttatttcaaatgtagtttcaaaagacaagaaaaaaaacaaatacacgtaagtagccgcataaaccaaataaatagttcctgagtcccggtgagcttttagggttttttatcgatcgctgtctggtcacactgcgctaaccggccttttcccgcctgctcttcttccttatcatcattcattttccagtcgttctccattcgccaattggaccttgtcgctaaactttccaataaaccatactgcaaagatgtctgctaccgagggcaaggtgagtgcagcaactggaattttaattagcagaaacacacccaggctgtcaatcaacaatcaatcacaggttatcacatgcaaggccgccgtcgcttgggaggcaaagaaaccgctggtcatcgaggatatcgaggtggcgccgcccaaggctcatgaggttagttcagttcggaatgtgtcaaatgtgacagatttaactaattaccatgatggcatgacttcaaaaggtgcgcatcaagatcacggccacgggcgtctgccacacggatgccttcaccctgagcggtgccgatccggagggcctgttcccagtggtgttgggacatgagggcgccggcatcgtggagagcgtcggcgagggcgtgaccaacttcaaggctggcgaccatgtcatcgctctctacatcccccagtgcaacgagtgcaagttctgcaagagcggcaagacgaatctctgccaaaagatccgacttacccagggcgctggagtcatgcccgagggcacctcccgtctcagctgcaagggacagcagttgttccacttcatgggcacctccaccttcgcagagtacaccgtggtggccgacatttcgctgacaaagatcaacgaaaaggcgccgctggagaaagtctgcctgctggggtgcggcatttccacaggctacggagccgccctcaacactgccaaggtggaagccggtagcacctgcgctgtttggggcttgggagctgtgggcttggccgtgggtttgggctgcaagaaggctggtgccggcaagatctacggcattgacatcaatcccgacaagtttgagctggccaagaagttcggattcaccgactttgtcaaccccaaggatgtggccgacaagggttcgatccagaactacctgatcgatctgaccgatggtggattcgattacaccttcgaatgcattggcaatgtgaacaccatgcgctccgctttggaggccacacacaagggttggggcacttcggtggtgatcggagtggccggtgctggacaggagatttccacgcgacccttccagctggtcgtgggtcgcgtgtggaagggttccgccttcggaggctggcgctccgtttccgatgttcccaaattggtggaggactacctgaagaaggatctgctggtggacgagttcatcacccacgagctgccgctgtcgcagatcaacgaggcattcgatctgatgcacaagggcgagagtatccgatccattattaagtactaagcatgagataacaattctttgcttttcactttttatacaagttggcaatcgcatgcgattgcttaaaataataaactcccagtgtatatgtacataagagtatcttcattgggggtcggattactgtccctctcgcgcttactcctcataattgcttggatttgcttatctgcactgccccactaaatctcgaagttcaacaacttggaattgttcgagattgcggttacttaatacgtatgtatatttcaagaatttcgcaacattgttatagattgatagagttatctgatgacccaaactaaactcactgccggacatcccctaaggccccgaaagttgtagattaaaggtcaatcgtaagaacaagattggaataaccaagtggagcgataagacaggtactttgtgctgttttcaccatatgaaaaagtcacgattacacgtatagaatgcctgtatttaaatacgcactacaacaacgtttgcagacaaacacgcgtacagatacttaaaaatgataataagtctatgtatctagtatgtttttcaatttaacaaacatgcatgcagttttggtttcgtcgttacatataaatctcattttaaatgcatatttcttatggaactcgctagcttatacacaagtgtcttttaaatagtctgatattgcatacgtataagagtaaaactttagatgtgttcgactttacttgtgactaagaatgcgctgacgtttaaaaaacatacagagcaaacgaacacaaaggagtataaatactttttcctaagcctaggagagtatgagaatactattgaaatactattatcgcgggacattagaacttaaatctatcgaaaacacaagagatggtatatagggagctatggattattctaggagtgggattcggtttgaaattatttgagcacgggcaggaccaaaaaagtccgcctcacatccgcgaattgtaatacgggtcgtcttcgcatggcggat

SEQ ID NO: 14324 - DNA, 1225 bp, DROSOPHILA
tccttatcatcattcattttccagtcgttctccattcgccaattggaccttgtcgctaaactttccaataaaccatactgcaaagatgtctgctaccgagggcaaggttatcacatgcaaggccgccgtcgcttgggaggcaaagaaaccgctggtcatcgaggatatcgaggtggcgccgcccaaggctcatgaggtgcgcatcaagatcacggccacgggcgtctgccacacggatgccttcaccctgagcggtgccgatccggagggcctgttcccagtggtgttgggacatgagggcgccggcatcgtggagagcgtcggcgagggcgtgaccaacttcaaggctggcgaccatgtcatcgctctctacatcccccagtgcaacgagtgcaagttctgcaagagcggcaagacgaatctctgccaaaagatccgacttacccagggcgctggagtcatgcccgagggcacctcccgtctcagctgcaagggacagcagttgttccacttcatgggcacctccaccttcgcagagtacaccgtggtggccgacatttcgctgacaaagatcaacgaaaaggcgccgctggagaaagtctgcctgctggggtgcggcatttccacaggctacggagccgccctcaacactgccaaggtggaagccggtagcacctgcgctgtttggggcttgggagctgtgggcttggccgtgggtttgggctgcaagaaggctggtgccggcaagatctacggcattgacatcaatcccgacaagtttgagctggccaagaagttcggattcaccgactttgtcaaccccaaggatgtggccgacaagggttcgatccagaactacctgatcgatctgaccgatggtggattcgattacaccttcgaatgcattggcaatgtgaacaccatgcgctccgctttggaggccacacacaagggttggggcacttcggtggtgatcggagtggccggtgctggacaggagatttccacgcgacccttccagctggtcgtgggtcgcgtgtggaagggttccgccttcggaggctggcgctccgtttccgatgttcccaaattggtggaggactacctgaagaaggatctgctggtggacgagttcatcacccacgagctgccgctgtcgcagatcaacgaggcattcgatctgatgcacaagggcgagagtatccgatccattattaagtactaa

SEQ ID NO: 14325 - protein, 379 aa, DROSOPHILA
MSATEGKVITCKAAVAWEAKKPLVIEDIEVAPPKAHEVRIKITATGVCHTDAFTLSGADPEGLFPVVLGHEGAGIVESVGEGVTNFKAGDHVIALYIPQCNECKFCKSGKTNLCQKIRLTQGAGVMPEGTSRLSCKGQQLFHFMGTSTFAEYTVVADISLTKINEKAPLEKVCLLGCGISTGYGAALNTAKVEAGSTCAVWGLGAVGLAVGLGCKKAGAGKIYGIDINPDKFELAKKFGFTDFVNPKDVADKGSIQNYLIDLTDGGFDYTFECIGNVNTMRSALEATHKGWGTSVVIGVAGAGQEISTRPFQLVVGRVWKGSAFGGWRSVSDVPKLVEDYLKKDLLVDEFITHELPLSQINEAFDLMHKGESIRSIIKY

SEQ ID NO: 14326 - DNA, 3433 bp, DROSOPHILA
tgaaatgcagccaaatagatgaaataattaaggcggcgcgcaatttcagcgctgctggcaaaagagtttataaaaatgcttgcaacctgcgcgccggcgcagtggctaaatagacgcgaagaaagcagtactggcgactggaggttacgacgcgcgttgcgatttcaactggggtttttaaagcggttaagtgtccagtaaccagcgtaacggctttgcgaaacgggaaaacaaaagtgaccagtgggtgaacgagtggcggcaggaggcaagcggtgcggaagtgggttacaagaggaagcaaaggaagtcaggaagtccagctgacgaaaaaaaagcagtttcaacggtcaatgaagcagtgcatagaacggaacaagcagcacttttaggaagcaggatagcaagcagtttaaggcattttagttttacctcctcaaatcccttgagaaaacctgtgccaaggttaaagcctccaaaagctttattaaaggaattaaaataaaaagaaataaatatatgcataaatatactcatagggaaataagaaaacataaagctgttaagacaaactgaccagacacgcaacaaattgggaaatatctaaatttcaataccaaaaacgtttttcaaatttgtaagcagagtattcaggccaggataacagatttttattatctaattgtttataatttataaatttagaattcatttaagtaattgagaaatttaaatagcaaatagtaaagctcatcataatagtcgccaaaattagtacgaaagcaaggctcaaagaagttgtttcccgtagtacttaagtattcctataaacgctgaaggccccggttgtaagcagttttagaatccccgcattcagctgaacaggaaaccatgcaaaggaaatacagttagcagtgaaagcagtcgaatcaacacaagtgccagcaattgcactcgcaattaaaaattaaatgcgtgcgcgaacaaagcgaccaagccaatgtccaaacaatctgcaagtgcaagtgccacgctgctgctgctcatttggctgacatggcaaacgatgcagtgcatcgcgttggactggcagcaggttaagccgatgtacctggtgtccatgtacccgggccccgcgggtctctccacttcctcgtcctccccattttcctcctccggttccctggagcacgatgcggaaatgagtgccagcaacgtggacaatcggcacataaaggggctgggaatgggcagggagatgagcgctttgagcgaagaggacgatcgggagccactggttctcaacttggagaccacgccgctaatggagaagatgttacccgagggcgcaatggcgatggatcgcatcttcggcggtgatgtgggcaatccccactgttttccctaccaggtgggaatgctgcttcaaagacctaagggtctttactggtgtggtggctcactgatctctgataagcatgtcatcaccgccgctcactgtgttgacatgtaagtgaccagaagaaatactaacgatccaatcatcttaaggttctacattttgcagggcgaagagggccttggttttcttgggcgccaatgagatcaagaacgccaaggagaagggacaagttcgactgatggtgccaagcgaaaacttccaaatctaccctacctggaatccaaagagattaaaggatgacattgctatagtaagactccctcatgccgtcagctttaatggtgagttctggtccttaacaaagtgaactacctatctctgaaatatacataattttagagcgcatccatcccattcaattgccgaagaggcactacgagtaccgcagttttaaaaacaaactggccatcgcatctggttggggtcgttatgccaccggagtccatgcgatcagcaatgtgctgcgctacgtccagctgcagataatcgatggacggacttgcaaatccaacttcccgctatcctatcgaggtacaaatatatgcaccagtggaaggaatgcccgttcaacttgcaatggtgattcgggaggacctttggttctccaaaggaggcactcgaagaagagagtcctggtgggaattacatcctttggcagcatatacggttgtgatcgaggctatccggcggccttcaccaaagttgcctcatatttggattggatcagcgatgaaactggtgtaagtgcccaccaggataccacggaggcaatatttttcgaccagtatgtgagggaatatgggaaaccacgtcaaagccgacgcttggaaacggaggagcagttggaagacgatgtgcccgacgaactagatgtgcatccgagacccgcttccgatgaggacatctccgagaatgtcagaccgcgaacacggtcacgcccgcattccgaacacgagttctatttcttgtaacccaaaaataaacgtttattttaagatcaaaatcaacgcttagtcgccgttgttgaccacaccactcttctcttcgatccagtccaggtagtaggtgatacgggtgaagacaccgggccatcccacctcgcagccgagagcaatgccgaaggaggtggctccaatcagggtgttgctgccgtcatccaggaccaaaggaccgccggagtcgccgttgcaggtggaaattccgccggtggtcttgatgcaaatgttgctggcggcaaccagaccgaagtaccagggagagcagccgctgttgttcatgatgggaaccgtagcgtactgcaaaatgtcggtcgctccggtagcagctgtgtggaaagtaaggaaatatagtttagaacagttctaagatatttataggaactacgattaaaaacatttttgaagattaaaaactcattaaaaaattaataatagaatactaaactaacaaaggattataaataaagtgtaaaaacaatgttgcgaaataacaacaaaagcagaaaagagtccataaaaatcgaattttgataataaattttaagtggccttttaatccaaaggtaaaataaagcgtgaaattgggttttttcgatcgtaaattgcattaacgaaataccaaaaatagaattttctgataattttagtcactttctagaataattttggtttcttttacttagtatttagtatttaatatttagtgttaggatagatacattcgcctctattctacgacctaaactaactctctaacctaactctcactacatatttttcgagtgctaaacttgctggttacgttaaaagagcttaactttctctagtagttataaaattgtagttcaagggtgtaagggtcacttacagtcgctgatcttgccccatccggaggcaatggcattctctccgccgtaggtgctgtagctgtcggatttcacgggcagcttagcgggctggatgtactctgtaa

SEQ ID NO: 14327 - DNA, 1317 bp, DROSOPHILA
atgtccaaacaatctgcaagtgcaagtgccacgctgctgctgctcatttggctgacatggcaaacgatgcagtgcatcgcgttggactggcagcaggttaagccgatgtacctggtgtccatgtacccgggccccgcgggtctctccacttcctcgtcctccccattttcctcctccggttccctggagcacgatgcggaaatgagtgccagcaacgtggacaatcggcacataaaggggctgggaatgggcagggagatgagcgctttgagcgaagaggacgatcgggagccactggttctcaacttggagaccacgccgctaatggagaagatgttacccgagggcgcaatggcgatggatcgcatcttcggcggtgatgtgggcaatccccactgttttccctaccaggtgggaatgctgcttcaaagacctaagggtctttactggtgtggtggctcactgatctctgataagcatgtcatcaccgccgctcactgtgttgacatggcgaagagggccttggttttcttgggcgccaatgagatcaagaacgccaaggagaagggacaagttcgactgatggtgccaagcgaaaacttccaaatctaccctacctggaatccaaagagattaaaggatgacattgctatagtaagactccctcatgccgtcagctttaatgagcgcatccatcccattcaattgccgaagaggcactacgagtaccgcagttttaaaaacaaactggccatcgcatctggttggggtcgttatgccaccggagtccatgcgatcagcaatgtgctgcgctacgtccagctgcagataatcgatggacggacttgcaaatccaacttcccgctatcctatcgaggtacaaatatatgcaccagtggaaggaatgcccgttcaacttgcaatggtgattcgggaggacctttggttctccaaaggaggcactcgaagaagagagtcctggtgggaattacatcctttggcagcatatacggttgtgatcgaggctatccggcggccttcaccaaagttgcctcatatttggattggatcagcgatgaaactggtgtaagtgcccaccaggataccacggaggcaatatttttcgaccagtatgtgagggaatatgggaaaccacgtcaaagccgacgcttggaaacggaggagcagttggaagacgatgtgcccgacgaactagatgtgcatccgagacccgcttccgatgaggacatctccgagaatgtcagaccgcgaacacggtcacgcccgcattccgaacacgagttctatttcttgtaa

SEQ ID NO: 14328 - protein, 438 aa, DROSOPHILA
MSKQSASASATLLLLIWLTWQTMQCIALDWQQVKPMYLVSMYPGPAGLSTSSSSPFSSSGSLEHDAEMSASNVDNRHIKGLGMGREMSALSEEDDREPLVLNLETTPLMEKMLPEGAMAMDRIFGGDVGNPHCFPYQVGMLLQRPKGLYWCGGSLISDKHVITAAHCVDMAKRALVFLGANEIKNAKEKGQVRLMVPSENFQIYPTWNPKRLKDDIAIVRLPHAVSFNERIHPIQLPKRHYEYRSFKNKLAIASGWGRYATGVHAISNVLRYVQLQIIDGRTCKSNFPLSYRGTNICTSGRNARSTCNGDSGGPLVLQRRHSKKRVLVGITSFGSIYGCDRGYPAAFTKVASYLDWISDETGVSAHQDTTEAIFFDQYVREYGKPRQSRRLETEEQLEDDVPDELDVHPRPASDEDISENVRPRTRSRPHSEHEFYFL

SEQ ID NO: 14329 - DNA, 3188 bp, DROSOPHILA
ataaaagcaattcgattcaatatacgattattaagcttccccaactaaaaatcgtatttttctgatccaccttaagccgcctatttcactccagtttcttgacgaatcagtggaatttgtcagcaattgaggactagtcatgccgacacagaggtgcgctgtagtccattcaggaacgatttggaatgataagataagtcggcccacatttggcggaaaactttttgggaaaggtgtgcgtgcacccacaacgtatgagtcatgttttgaatttatttttttgtattaatttattgctagtatcttgtatacttttcattttcataatttgatttattaaaaattgcatcaatagtttatgtttttattcaattatcaattttgtaagcttttgcttttcgcgtaaaaaatgcacaaagttctctcgctaatcgaagcaaaaatcgttaataatattgttaagtgtttgctctgctcgtgctctgcttatctgtttcagttttagtcataaaaatacatattttatatttgtgtatatttattcataagatgcacgtggccaagtcctatgccatccacagttccagttagcagtcgcgttcgctgtgctaaaaaaaaaaccgaaatcctaaccaaaactggcgaaacaaaagccgcaaacagaacagaacgggggctaaaattggaaacaaaatgcctggctggtggaatcattgaacacagactggctgcgtggtatctacgactgctggagatgccgagagctggaatgtcggaggatcctgggaccgcctggcctgacataagtacatggtcttgggttttttttcgtttagagggtttagggggtatcggaaatgcactacactatattcttgtctggtagctaactcgcaaatattactctgatcttgatccctgatctcgtgtcaatgagttagcattcgcactcgcctgcgctcgggattagctcgtcaattaacagtaattagttagccgatttcgttaattgttgtttagtctatttgcctttgctatcatttgttactttataaataaacttaaacgtaaagtgtgtatgtgtgtatagatgttgaggaatccgccgcagatccggccagtacatacacctgacacctgtgtacaccagtgctgctggccgatctcctgcatctgcatctgctcctgctgttgaaaaagggggagaggatggttggatcgtcggctcaaccggttctagcaggcgcagccgccctcgggatcctttgtctcgttgggtgagtcctttagcacaacctcctgcatgtcctcggagggcttgttctccgtggaatccatgccgggcagtgccgcggccacccgtcggaacaattgcttcacattgtagccggccttggcgcttgtctcgatgaacatcacgttaagctccttcgccttgcgctcaccctcctcggtggacacctgacgcttgtcggagagatccgtcttgttgcccaccagcatgatgatgacgtcgctaccccgctccgtgcgcacgtcatcgatccacttggaggtctggtggaacgagttggtgttggtgatatcgtaaacgaccactgccaccgtggagtcgcgtatgtacgagggtatcagcgagcggaatcgctcctgtcccgccgtatcccacagctgcaggcgcacagtgcgatcctccaggtacatggtcttcgataggaaatcaattccgatcgtcgcctggtacgtgttgtcgaagctgtcgtacatgaagcgcgtaatcagcgaggtcttgcccacactctgctcgccgaggaagacgagcttgaacttccgcagcggattgccaaaatctccggatgacatcttcctcaacgtacgtgtctactttttcttaattacgggtttgctgaactctcttctcgctccgctccgctctcaccaatctccacccctcctcactgtttataatggggctgggccagcggttttcggggccctttcgcactgcgatttctcgggatgcaccgctttcaagttgccgcactctattacacacgctctaaatgctttccgtctggctaaagactcaattgcggctcgaatggcttggtaaatcgctaggttgagtcgtggaaaaattacggtctctgcttcttcttctttaacttctgagtcagttgctgtgtgaccagagtggcaatcaaaagcaatttctctgccacgctatcgataaacgcatatttgtactaaatcgatgttttatgatttaaaaaaaaatcgattgatattcgttaccgttattaaataattttaactaaaatttacctgcttaaaatgtttaaatactgatgaagtacaaggtaattgcttaactttttatttcatattaaaaagtgaatactaagtgtaagaaatactaacaggtgataacgcgattttcaaatataaagctctctaaagtgatttgcttgtttttagataaacgagcgtaggtatttgcccatcctatcggtggaacttgacgtacttctgtcaaagagtcactgttcgggcgtcgcttaatctcaaattataataagtggttatctgaagaacacacggtccttaattgaaagccttatctgctggcgctggcaaaattttggaatggcgaattaatttaaacgtgccgcgataaaggtcgatgtaaacagttccgcgaaaactatgttagcgaacggacagcaaacaaagtcgttggccagtgggcttcttctcctactgggcatatgccgaatatccggagtggctatcggcgcacccgaggggcgtgtcgtgggtggatctccggcagcggtgaatagtgctccctatgcggtgtccatgcagtacggtggcacccattactgtgccgccagcattctgaatgccaactggctagtcaccgctgcccactgcctgaccaatagtaaccaggtgctgggcagcaccttggtggccggaagcatcgcggtggacggaactgcaagcactacgcagacgcggagcatcacgtacttcgtgatcaatgacttgtacaccggcggaactgtgccctatgacatcggaatgatctacacgcccaccgccttcgtttggagcgccgccgttgccccagtgacgctaccatcctcgggagtggtgcccactggcaccgccaatctgtacgg

SEQ ID NO: 14330 - DNA, 1188 bp, DROSOPHILA
tcacacagcaactgactcagaagttaaagaagaagaagcagagaccgtaatttttccacgactcaacctagcgatttaccaagccattcgagccgcaattgagtctttagccagacggaaagcatttagagcgtgtgtaatagagtgcggcaacttgaaagcggtgcatcccgagaaatcgcagtgcgaaagggccccgaaaaccgctggcccagccccattataaacagtgaggaggggtggagattggtgagagcggagcggagcgagaagagagttcagcaaacccgtaattaagaaaaagtagacacgtacgttgaggaagatgtcatccggagattttggcaatccgctgcggaagttcaagctcgtcttcctcggcgagcagagtgtgggcaagacctcgctgattacgcgcttcatgtacgacagcttcgacaacacgtaccaggcgacgatcggaattgatttcctatcgaagaccatgtacctggaggatcgcactgtgcgcctgcagctgtgggatacggcgggacaggagcgattccgctcgctgataccctcgtacatacgcgactccacggtggcagtggtcgtttacgatatcaccaacaccaactcgttccaccagacctccaagtggatcgatgacgtgcgcacggagcggggtagcgacgtcatcatcatgctggtgggcaacaagacggatctctccgacaagcgtcaggtgtccaccgaggagggtgagcgcaaggcgaaggagcttaacgtgatgttcatcgagacaagcgccaaggccggctacaatgtgaagcaattgttccgacgggtggccgcggcactgcccggcatggattccacggagaacaagccctccgaggacatgcaggaggttgtgctaaaggactcacccaacgagacaaaggatcccgagggcggctgcgcctgctagaaccggttgagccgacgatccaaccatcctctccccctttttcaacagcaggagcagatgcagatgcaggagatcggccagcagcactggtgtacacaggtgtcaggtgtatgtactggccggatctgcggcggattcctcaacatctatacacacatacacactttacgtttaagtttatttataaagtaacaaatgatagcaaaggcaaatagactaaacaacaattaacgaaa

SEQ ID NO: 14331 - protein, 208 aa, DROSOPHILA
MSSGDFGNPLRKFKLVFLGEQSVGKTSLITRFMYDSFDNTYQATIGIDFLSKTMYLEDRTVRLQLWDTAGQERFRSLIPSYIRDSTVAVVVYDITNTNSFHQTSKWIDDVRTERGSDVIIMLVGNKTDLSDKRQVSTEEGERKAKELNVMFIETSAKAGYNVKQLFRRVAAALPGMDSTENKPSEDMQEVVLKDSPNETKDPEGGCAC

SEQ ID NO: 14332 - DNA, 2399 bp, DROSOPHILA
ttcaagctattcacaaataaatatcaagtaaatatgttaataagtagggtaaactactaaaagacgtacaataataaaaataactttaatggaaatataaattattgaataatcacatgataacaatagcaattgcaacaatgaactgttaagcttaaataaattgccgtcatgtctttgaaggctaatcccccccaccttcctcgatcgacggactctaactcgttttgttagatggctttatccattgtggagtttactaccctcgctgctcaatttatgaatggcccgtgacgtatttataaatataacaaataacaaatactttttgcttagttcctcaatctcgccgagtggctttggcatgaatcacgtgcattctaccacttgtgggggttattaataaaaatctggacccagctgggcccaaaagatgtgcacgggcaccttccgaacttctgggagtcatggatcgttcggcaggcttaaaaataagcagccaagagctcttaacacaaaatgccgccataagatcaggcatccgatatgatcgtttggggctcgcctgcgttctgtatccccagccgattcacagccgattcagaataccgatccgatccgatacgaaacgaaccggtttgccagctgtgtgaaccaaacaaacagctgctcagctgctaaactttcgctgccggcggtttcttgttcttggcagcaagtgcagcgtctcaagccccaagccccaatccgcaatccgcaaaccccaaacccccaaagccgagcttcttggccgggctcatataaaaacggcatttggcgcgcgtgctcagtcagttgcagatttgaaacggaaacgcgcgtgtgcgccgcaatcgaattcgatcgagtatttggatttcaaattggatttttacgccgtttcggtcaagttctgaatcacttgtagtgacacacataaggcaaggtcgcggaataccacagtgccccaaagtcaatagttatggaaggccaggccaagcaagcgtacttcgttaatgaagcatttacctacgaggagccgccacaaggaggtggtggaggtggtgcagacgcactgcatcgccggaaaagcggcggtggcaacaaggaactccaactggacatgggtggcttcaagaagggccaggaaatggcaggtggcaatggcagtgattcgctgccgcctagcatggactttgatgacatactccccctgatcggggagtttggccgatatcagaagctactgttcatctgcatgatcccattctcgtttttcgtggcctttgtgtacttctcacaaatattcctcaccttgatacccgaacagcattggtgtcatgtgcccgagttggatggcttggatgtggaggccaggtgagttaagttcggattgaagaaaatctcgcaacactcagggattttccctcaaaaactcacgaagtcaaggaaaaatacaaaaaagagcttatttggctccatggttcggttatggcatccgcagttgagcgcgtaatgcacgttatgtgtgccataaatattcaaatgtgttgtgaataatacccgtagtcgatcgtaggtggccagcacaatatacatatgcaaacactatatgcaaaactgctatactgcatgcaaaactgcagtagccgtagacgtcgcctcaagtgctaaattgtaatgaagactttgtggctattcaaatgatcatgaatctattagacaacgtgtttcaaaactttatgattgcctacagctgtgggtgctaaataataataattaataaattaaagtcaggtacggtatgtggtaatggccatatcaattcttcgatataattgccttaatgtaacaagttatcaagttgatataaataatgctatcaagttaactaatcgtttgaggggtcataaacaaaagagcgcgaaaagataataaaataaaattattcgaaaccaattcgaattgttcagtaaaagttgcaattcatcaatcgaattgtaattcaataacatattactcataataatcaatcataatttgaactttttatttctcaaaataaactaagattcgaataccccaaagttcaaggtttaatcgagatcgagtagttcaaagaattcagcaagcataacaacaaataattgtatttgcttaaccacaattatttacctcattttcctgaaccccttttgcacaatctattcaatcaatccccatacggaagtactatcattgtgcgtaaatggcaatcttaaaaatgcggttccgttttaactttcacaaataaaggcaattgatcgatctttataactaacaaccaatagtaccaatcaccttggaatcgaaaggctaaggctaataccggttaagcctgc

SEQ ID NO: 14333 - DNA, 399 bp, DROSOPHILA
atggaaggccaggccaagcaagcgtacttcgttaatgaagcatttacctacgaggagccgccacaaggaggtggtggaggtggtgcagacgcactgcatcgccggaaaagcggcggtggcaacaaggaactccaactggacatgggtggcttcaagaagggccaggaaatggcaggtggcaatggcagtgattcgctgccgcctagcatggactttgatgacatactccccctgatcggggagtttggccgatatcagaagctactgttcatctgcatgatcccattctcgtttttcgtggcctttgtgtacttctcacaaatattcctcaccttgatacccgaacagcattggtgtcatgtgcccgagttggatggcttggatgtggaggccaggtga

SEQ ID NO: 14334 - protein, 132 aa, DROSOPHILA
MEGQAKQAYFVNEAFTYEEPPQGGGGGGADALHRRKSGGGNKELQLDMGGFKKGQEMAGGNGSDSLPPSMDFDDILPLIGEFGRYQKLLFICMIPFSFFVAFVYFSQIFLTLIPEQHWCHVPELDGLDVEAR

SEQ ID NO: 14335 - DNA, 14422 bp, DROSOPHILA
tttgggaaatagaaaactatttgctttgcttccactttacttcgtttctggctatccataatctctaattgaaatactctagtctcgagttaattttatgatttatgtagtacgcatattggctatcaatactttggcttgttggatcgatgtatgagttgaatgtgattctcggacttttgcttggacacgaaacttaaagtgagttgtttcattcgttcgttattggttcagtgagttgcgtaaatagactttgtatttttcatttgttcgcaaaaagggacggtaaaaattacaataaaatcatttgaaatatgtatgcaacttgttttgttcgcttgcttctttctcattcgaaatatcaactgacttcaatgtgtatataaatatatttacaattaattagatcctcgcttttctggcgcgttgcatacttttgtataggcaactccaaagagttaatatgtgaatgcaatgaatggacgtagtgtgtatcagtatgtgtgtctcagtgtttatttaaatataaattcaatttaatggctcggtaatttacacaatatacgatcttgtatatataaaaatttcatgtagaataatatcgatattttccgattgacaacgaaaacatcaagaacccaaaacgatgcaaccaggtttttaggttttaggcttttttgagggtggattaatttaaaaactactaccgaaagtgctctggctgatatctctaccttttatgttcaattagctactataataatatcctttaaactttaacgctattcttgctattcttatgttggttaagctgctggtaatcaccatagttatttaattctggtttaaacatatcatcaaagcaaaaataatgatttctctgcgggttaaacgtaatgtaatgttaaatgtaaatgtaagtgtaaaaattgaacggaaatccgcccataaattttataaataaaaagaaactaaagtattttcttgctcaattttgttgcgttgcaatttattaattgtattaaataataatgcacaaatcataagttatgtttgcaattaatgctaaataagacgcaaaaacttagtttttctcaattgcaaattataattaattacctacaatttcttcatttcatggcgaccaaatgccgctcaataaatacaaaaatcttcatcatctatctgaatcgtctttgagacgtagcctggtgctactttaggttcaatggctgcaagccatgcgggtaatatacatttcgagcaaaaatctgatgacttgatttttacgtacatatttgttggccaattagcttaaactggaccttggaaaaatacttttaattatcgggttggccaattaatgcatgtttcagttgccaatatcaataccatctgttcaacatcaatttgtgtatctttttagtttgtcaatttattcgcttgcgcacagcgttgttaacaaaaatcaaaaaatcatcgcgacaaaattcagatcaaaccaatcaggcgtctttaagacaagtacgccattggtgtatagaaaaatacgatgctttacgttattgtttaatcttccttaaagtttttcttttttgtttttaattaaattaaatggacgtttaagtaactaaccgttaataaccgtttgttgctcccttgcctaacacaaaactttcatctaactaaactttcaataaatacaagtacaatacaaacaaacatagttatagtagttggatacagctgggatatagcttcgttctcaaatacgttcgcagtatatcatgtggttttgggaatctctcatttccgcaggaactccaacgactttacaacttaagcaaagtataaaccaaagctagaagtttacgctgcacgctgatcttatgttagaatggattggcgttactgcttgctggattcctgctcgaaggtctcgtgctgaaggaggacttgccgctcgtgccacgctgggctggcatcggccgacggacgtgacgcatttcgctgttgggagtgaatacaggacatttgttagttgttaattgggaacatacatttaataatttaagctagatcaaattaaaatattaatcagcgcacaacggtttctcttggggttaggcggattccagcagcatgttagcaggcgagcgtgcatgcaacaaaatttctgccacttgcaggggcttaccaattgctggattcttaaggaagtttcaggggaaaacaaggatattgggtgccctaatcaataaaaggatgtatgtgtttttgcttgtcactacgagtggtgatgcagctgacgtttaacgacccaagtgcacccaccggtccatttccatctcctcgagtcgctgagtgagtgccagcttctgctggacagccaagcgcaacagctgatttagagtctttttctcctcctctgctgcctccaattggcggttgagatcgtccacctgggtcacatactcctcgcatcgagcggcgaacatggcacgcaggcctacaaaaattggcaatcattgtaagtatatataaatcatttcgcatagaagactatagtggccaaactatctctcagatacttacttgagaatgtggcagcatcctccttaagaagcctgagctcattacgtagcttggacatggtgtcgctgacaatgatcttctcgttctcatacttggacttgagattggtcagtgccacctcagcggtttgcttgtttgacttgagcacgttgcgcagagttccaatctgctcgcgcttcacggacagcaaactcttcaacttgactatctgctcctgcagttcctccatctcctctgtgttaaccttctccagtgctgaaatatatccaatttaatagaaatttcgatagctttaaagcaaccacttaccgtcgccaccctcggagcggattttgtgtttattcatatcaatggtatgctcaacagccgtcttcagatacttgatctgatcactgactgtatccacgtacttcttaatttccacggaatccgccaacccttgcagatcctcgacgatctggggcttggcaataaagacatccgatttgaattgcgactggatggcagtcaaagaatcgttttcgaagctggaaatggttaggttaaaagttcaacaataagtcatattataagttaaaaagattttatatccatttcacttgcctcatgtcatcggtcttatgatcgagcagaacacgcgtcggtgtctctccgttgactgtgcaaactaggtgatacagctgcgccagatcgtcgcttaaggccaccaatgtactgcgagctgagcccagactttggccagcgttttgcgagatgtgcgtaagagtttgaacatcgctctgcaggtccagtgacttttgttccgtagcaagaagcttgttcttaaggttggtcacctcgttgcgcagcgtagtggtggcgtccgtatagttgagtcccttctgaagttcagcaatgtcagtcttaaggccatcgatctccttggcggagagcgtaaaccagttggcgtactgcgagattaacgctcgcagctgctgctccagttcatccttcttctggccaccttccttgccctgctccttcacatcgatctgcttctttagctggactagagcatcgacatgggccgcaagaagagccagacgagacataaagttctgcagctcgttttgtgacttgtccagactcgtctgagcttcccttaaattcgccgtcagatgagtcttctcactttccatgctctccaactgcttctccagtttctttagttcgttcagatgaatctccgaaaagagatcacatttggtgccgtcaggagatttaagttcggtgctcaggtcagcctccagacgcttaagagccagattttcctcctcaccgtccgagttgttgctggcgttgtcttccatgttgctgcgtatgctgtaggcgaggttgctgatgtggtacatagactcacggttcaagtggccatccagttccttcttcaatgcatatttcgcctcacgttcaccctattatataagcaaattaaatattttagagaatctaatgtttacaggagagtttttggagaggtaaaatatattatttatctatttctattgaagtatatttacctgtaaggtctctagcgcttcctccatttgtttttcggcaatttttttaagattggcgagctcatcgacctgttgattcaacagctcaacttcttcagtgagacgacggatctcgtgtttggcaccttcaaattccacctggaaagtgtaggcaaattgtcataggaaactttgaaccaactgtgttgtattcagactgtacctgtgagctgcgcaggctggagacctgcttttgcagcgatatgttctcctcctccagctccgagtattcgctaagcatacgcgtctcccggaacttaaggtccttcagctcggacttgaggcgtaggcgatccgcctcgctgtcgctcttgtcccgcccaaaatccgagttctcctgcagcatcctatcgcgctcattgcgaaccctttccaactcatggcgcagttgcttaagctcgttctccagatcaaatatctggaggttgagcgatgtctccctagctgcggattcgttcagcagagcgtcctcctgctcgatgcccgtcttgttggtcactttctgtgaggtttgaaacttggtcagcgcctggaaaaatcaaaaaaaaaaaaaaatagtgggagtccatttgagtaactgtgcggaaagcaaagtaatcataaaagtttcctgcctgcccaccgaatgccggcgattttattgcagtcatttgcatgccccacaacacaagggtagaaatttgggggcgttggccactggggaagcgcaccagtctgcctgccctgcatttcattacgtttttttttttttattaaattccctatctgagatgctcttgctaaaggtatgaccggactgagaagtgtaatataaattgatttatttttaattataaaattacattatgttcaatatatcttaaatatttaattcatatttcgttttttatccttcgtttagatatccttgttagtccagatgcgccactgggaataggagatgccttagtccgcaattattggattttgttaattgcgactgtctcgctgtgggtcgtgttataaccgcccaagagcgcataaaggttaacggcgaccaggggcacacccaggattatgagcctgcgaaggtaaacacgaatacagaatgtttatggggccggcggaccaagcccttaactggtcgctggagaccgtgtccatatggacagtcgggcgtggtgaagtggttcgtgggggtatataatcctgtggcggctttaattgaaatctcaacccctaacgatgccgccgctcgtccggattttattttgaatggcgtccatttggagtacgtgcttcgcaagttctagcatcatcatcattatcaaaactgtgcccaaacgtaagtctcaagtggcacgagtggaatgaccacgattcacggatttcgccaaacggaaactgcatcaagtcctgggaaaaactttcttttggcgtaactctctaaatgccgtgtaattagcaagcaggcggcaaacaaactagtctcagtttccacgccgcatccttaaccccttgataagctaccgagttcccatctcctcttttcatttctcttccccttcccttccattaccccttcactcttttcggttctagccatataattatcgttgtgcgacgtcagtcgcctttcttgttgtttttgcaatctcaatttgacaatcacacacccacaaagtaaacccaaaaaccccgcattcaacccactttgagccaagtgcatttcgttaattagtgtaatccgaagaagaagagcgagtaggggaggggggaggggtggaggggattgggaagcggatgggctgtattacaagagaaagcaaacaaaaggccaaggcggttccaaagcctcggatggaatttcagctgcctaaagctgtcacacattcatgcaactaaattgcaaggcgcctcttaaattagaaagagacggccaagcagaggtggagggagacgggacgagagatgcagtgcagcgtgtgataatcatgattggttattgaaaaagtgttaagacgaagatacttttgtattaactttatttagttcagctaaatttctttcagtgccatagtttacctagtgacgccatctatcgggcatgggccgacaacaaatgacggcataaactttatgcaaattagaaaagatttttaattaacttgcgtaaatattaacacagttcacagaggccagacaagagcagagcaaccgcacgccacttggcataggccagacaccgggtctgctcctcctgccctcctcctcttctctcagtcatcccccatctgagcaaccaaccccactttgtatctggtggattgctgcacagtgggtatgtggttgcgattagaatgaaagaggagtgtccgttcaaatagcctacgtacacacaaaaaaatgaatgttaaaaatgaaaaaatcatgaatttttgaataaatcgtaactattcatttaaaaacacatataaccatgtaacacccgtctctacatattacataaacatccaaactatataccaacaattatcacggataagttttttccagtgcatgtgcggatacagatggcctcctcgcagcagcaaaagcagctgttgccatcagttctccggatgactgcaatggaactcctcctggtcggggccactaaaaatagagcagattgcccacattatggcgccgatgagctgaattttggagcgcactgtgtgtgtgtggtgtgtgagagcacttaggtggcaggaccacagtataaacaacaacagcaccaacgagacgtcgaggggcgagactataacaatttcctcctggtcacaaatgtgggtggctcggtcgggattcccgctgtttactccccaatgctgataaagtatgccatgaatgactgaacagattgtgtcgagcgggggcgagatggatgggcgacaccacgcccagttcgttaaatggcagcttcactctcatggaacgcaggcgaatttaaatgtgaaaaagcctgcaaatgcagtaataaccgatttgcacagcggacaaaagctgggctaaaggtttaggatttttgttgaataaaattaacaaaatgatttgttgaatttctaagtatcaatgatagtgaaaattaattgaaatacgcaaaagccttcgctgtataaatatttctcaatgacttcaagttctttaaactaacaacctagtgtgacctattttttttttgcagtgcacccctttttgtaggctgtgcgcaattttgaacacaacgcacatgcaaacaatgagagcccaaaaaaaatagagaatgggaaatggaaaatggaaaatgtgagaacggcgcatttgtagccatcatgtcaatgcacgagcttgacactcggtctgaatttgaaatgtcgcctaaatcgacaaagaaacggcggccagaaaaacgacgaaaactgcaggcggaaaatgggaaaacctgtgtgcgtgcaaatgctgatgctgcgaaaattttgcagccaagggaactcaaattacgctcttaacgaaatgggaatgcccgaatatgccggttttcaaggggtaaaaaacaaggaaagctgcaaaaaataccccttatgaatttcacactaacaagatgcaaaggaaatctagttaaaagcaatggcacccgcgagtgtgctaacaataaaactgaatttggaaaagaggttttttaaatagaaatttaaagtttaaattccaagttcctcggtgtcacttttaagtgtgtatatactttatctcagttcaatgataatgacttgattatattcttttgtaataagcaaataaccgattattacaaaaagctgaatattaaaatcaataaatatcattaagtaaaaagcataagtatttaagaataaacgtaaacgaaaaataagcagcgttcaaaagtaaccagatgaaatattccacaaaaagtagactgactacataataacgtgcttcgaacatcatcaggaaatgcgaaatggacgcagcgggccatgggaaatccttgaaagcgcggaactataaaaaggcataataaccatttgctcctgctgcgagtatctgtgcctgtgttgttgcataatatacacagtgtgcatacatacttatatcctgggcaaatttctcaagcgcatttaagagccaatagtaagtcagtgcagagctttccacgacgtgttgatggcggcgacggttcatcctttttgcgagctcattgcatctggcagtgctccaattccccgcagagcctttggctggggccaaaaagtttacgcaaataaattgcagcgtcattatgcagcaggacgagaatgctgcgctggaaaactgcaattgtcacaacagttttacccttgcatccgtgcccagattttcgctcatcatcatcatcatcatcgtcctcgacgacgtcgtcgtcagaaaagtacaagtctgtgtgtgcatttacattttcattgctggcaattcattggggaaaatcggaggaggagccattgcggaaaagcgggcggagatggcctcagttggcgggaaatacaacacttttttccccactcatttcccttcagccaggccagacgacagcgacggaaacatgttttgtcagtgctcaagcggcgcatttaacccttgccagccccgcttaacccattcgttgcgaccccggccgccattgtggctattgcagttgctcctgtccgggagttgccgctcctcctcctccgctgactgccagtttgattgccatagaattgcaatttgcgccaaaagaacagagcatcagtgtcaaatcattgtacatattttcttttttttttttgtgtgtttcttgctcatacccactccgtttcctctgggcgctggctttcatgttgccgctacgattctaattgttattgtctagcttggatttgaaaaggataaagggcatttggcaggactcacaagaccgtaaattaggaaggcatttgggcaaagtgtcggaggaggatttagattactcctttgattatcgtaatgatgcaaaaggtaaacatttgtctgctttacattatatatttccaactgatttaattcttattgaattaattatattctaccaaaagaattcataaatttttaagaccattcaacaaactttaacaagttttgtaaaaaactcggtccaaccgcaaacaaaaacctgaacaaataatgccattaattattaaatttgtgttaaaaactttttggggcggaaagtagcaaagtcaggccagccgcagcagaatgccaaactacgctgcgctctggaatgtgaccaacggacgacgggatgtccttggcggtggcgccatgtgagccatgatatatggccaccacccgcacccaaaaacccattcacatgcgcccacaaaacaggacacatcgtccatattacgtggcgtacacgtgttgtttccactgcatcgttcgtcgctcgttttatggcccttgtttcggtgccttttaattgccgcagttacaatcgcccgaacaacaacgtgttttcccgccccatccacatccacatccacatccatttccacatccagctaactgaataaattgccaaatgcggctgacagtttcgaccgtccgacgtctcgaaaactgggtaaatatttgtattgcggtcctgcagttgcaattgccaatttgcagtcacagtgatggcaacgaaattagcacttccctaattggacttaccagcagattgcattaattctggttttaaaatccaggatactccatgcaaatacataacacatttaccctttaatttaggagtaataataaaagtaaagaagatggcatcgactaccttttaaaggatatctcatatatctcattcgatgaaccaagttcttaaccatattataagaaaccatcctcttagctacctataaataaaccccctaaacatgacttcagtttaatcgaaattctattgcattaaaacgcagtcgatgggaaaattttttgcgcctggggctctttggaaaatacccagttaatttcagtaagctaatttccaacccaagacggaaacttggccctccttcgctgccgtctgcccgctgatttatgtcactttatgctggggtcgcccgaggcagatatcttgattgcaagtggaaatatgtcgcccagtctccacatagcttcctttaaacctcacccctttttttacacttttgtggggacacagaaaatgcccgcagtgacgtggtcgtcgacgttgctattattttttttgtaatttttaagcatccattataaatgtgtgtgtgtgggtggagggttcttttggcctcgcactcatttttttatttgtgttctcgtaaaagttcagttgagttcaaatccaacaagctggaaactatcaagctacgttacaagtgcactgccacctgtccaacaattaattggcaggctttttgttcgaagcgcataaaaatgcatgcgcatatacgtattacgcacatacatatgcccatttgtaaaaaaggtgttaccgcctgcattgtgtgtgtgcgtgtgtgcaggtgttaacgcccccgtaggattttaattccagctaacttttgttagccccatggttaatggaactttaattgcactgtttgctaattggggatacttaaagaatatgaactatatgtttacaccaaaatcaaatctaaaaataacaaatgattttgttaatttgcgtaatacagtaaacatgtgtataattgttctgatctttatttaaccagttgtatttactgtatgctttatttacccttctccaacaaaatcggcctaaaccaacgttttcttttggcaacaagcaaaacaaaccaaaaaggaagcttgttgggacaccagtcggaaaaagccaaagcacgaaatgataatagacggctgaatgagtatagactgcttcccccatttgatttttaccgaggaaaggacacaacttttccctgccgtctggtaatgcagttcagagcccgacaatccacggcctgtgaaaattccagaggaaatgccaggcgatgacgaggactaattggaaaggaaggttggtggtaagaagaaaaggaggagttggatgtggaagtggaggtagttgggcactgaataaaggtgcaaaatgaaatggcaagagtagattggccgtgctgcaatcggccaactgaaagctgagataatttttataggccaaaacaatgtttatgccaaattgagcgtgatcagtggagacaagataaagataaaaaaacaaagaaaacataattttgaaacaatgaaataattctgccagccaaatgcattttaaatgtttaagtgttttcaatcaaatcaaatgagaatgctatagtgttaactttaaagatcgctttatgatttgaacaacacatatcatctaggatcactagaataatggcatcgcatggctttttttggcctttatactgacggacagaaggacacttggctagcgattatgatctatgataaacatacataaatactttttgcggtcgtaaaggctttctttcagctgttaagttgtgtttttcattttttagtttatttattgttttgtttagcggactgaatagtatcttcaatcgacccaagcggttccactgtatttaaaggtatacaaaacaacagcacgtgaccatatggccaagccagtttccgatttcatgatcagagagcgaatcccaattatttctgctagaccagaccagacggactttgcagagcgataggtagactcgccgaaagagagtcaaactggccaacaggtgagcgagttagtttgccagcaagacaaattgttggccgttgtggaaaggttttctctgtctaaatatgtaggtgtgtgtgccccaaggtgtgtgtgagtacgcgagtgggccagctgggcgataagcggcgactgcttggaaacagatcgaaaaacatagcaacagagggggccaaattggcgggttactatataacccattggagcatttaaaaactgcgaagaattgtaggcaaacttacctcctgtgtgatgtccagttcgtggcgcgtgttgtcgtagagcgtctccagttcctcgcacttctgctgcagggcggacttctcctccagcagggacagtccgtactgggcggactgggcgctggcggaggacacctggtccagttcgcgcgtgaggcgctccacctccatttgcaggtcttgcacggattggtccgccgatgggccgttgttgctggcgctggacatgatgatggatggatggtgtccttagtggtcgggggagggggtgatggtgtgggtgttggtggacggtacagctgcccgtgggcaggtgaatctcctcgttgttgctgttgatgcttctatcctgggcggaatcttttcgatacaattttatgttttggagggaaatcgatagaagtcgatttgtatatgccgcactgttttgttgtacttcagtgctttttttaaaataattttttttatcgaaaccccacactcacacaactccactcgcggtgtgctttttgcgtgtgtgtgcgtgcgtttcaccttttctcttttccgtttgaatgcgaacgtgtgtgtgtgtgtgtggaatggtatcgctgcgggttttctcctctcttcactcaccgcgctaaattagtaaattaaacagcgcttaatggccaattaaccgtgggcttttaacggcaaataattctgcactatatttatatatgcctgtaagtcacacacacacaccagcgcactgccgtacgcacacataggcgcgtataaaacagttggcagcagaaactgaaaacgcagcgcaggaagttgtttcaattaactcgaaaagaaacagccgaaatgacatcacacaatttcccctttcctttcgttcgctggcaaagtgggagtttttcccattttccctgcactttccccgttcgcacgactgctcttcgcgtattctcgttatccgttgcacaattgcggcgtagacggctaaatgcggtatatatcaggcccaatcgctgcggtcgtcgatggagtcgaaattttcaagcaagtgcaaaaacaaaattttgtccgcaatcacgtcgattcttggcaatgtttgtgacggaatttcagtgcgaccgcaggcaaaactttcgataatgcggagaggtgtggagaaaagcgttaagaatgcgcttagctcggacccaaacctcgcgttggtaataataatcgcgtttccactactaagggtatgattttatttaaaatgcttgaagcaacagatttatttttatataaaaatatataatataaatataatttaagctgaaaccaaagtttgtaaacagcgtcagcatttcccatactatcagaatgttcgatatatgtctcaaaagttatcgggccatgtagcacatcgatactcgattttatattcacatttcgcctaatcacatttacttttcaacttgtctgtcgatcgaaattaagcgaacagaaatctaaagcataaccaaaatgccggacgcagtgcagcagagtttcgtgcgtagcttcattgactacctgaagaagcagggggacgtgatgtcgccggaccagaccgaaagcatcgaggtggcgatccagtgcctgcaggcggcctttgacttgggcgatgatgtggaggcagcgccggctgcggctggtgaggagcaggccaccacacagagcagcagcactgcgagcgcaccggacgatgatgcggtggccagcggaagtgctggtatcggcgccgccgccgccgccgttcccaataacattgacatgttcgagctcttccagtcgctgtatacagaacgcaatccggaatccctggccctggccgaatccatcaagaacgagggcaaccggctgatgaaggagaacaagtacaatgaagcactgctgcagtacaatcgtgccatcgccttcgatcccaagaatccgatcttctactgcaatcgggctgcggcccacatccggctgggtgagaacgaacgcgccgtaaccgattgcaagtccgccctggtgtacaacaacaactacagcaaggcgtactgccgcctgggcgtggcgtactccaacatgggcaatttcgagaaggcggaacaggcctacgccaaggccatcgagctggaaccggacaacgaggtgtacaagagcaa

SEQ ID NO: 14336 - DNA, 4172 bp, DROSOPHILA
ttaacgcttttctccacacctctccgcattatcgaaagttttgcctgcggtcgcactgaaattccgtcacaaacattgccaagaatcgacgtgattgcggacaaaattttgtttttgcacttgcttgaaaatttcgactccatcgacgaccgcagcgattgggcctgatatataccgcatttagccgtctacgccgcaattgtgcaacggataacgagaatacgcgaagagcagtcgtgcgaacggggaaagtgcagggaaaatgggaaaaactcccactttgccagcgaacgaaaggaaaggggaaattgtgtgatgtcatttcggctgtttcttttcgagttaattgaaacaacttcctgcgctgcgttttcagtttctgctgccaactgttttatacgcgcctatgtgtgcgtacggcagtgcgctggtgtgtgtgtgtgacttacaggcatatataaatatagtgcagaattatttgccgttaaaagcccacggttaattggccattaagcgctgtttaatttactaatttagcgcggtgagtgaagagaggagaaaacccgcagcgataccattccacacacacacacacacgttcgcattcaaacggaaaagagaaaaggtgaaacgcacgcacacacacgcaaaaagcacaccgcgagtggagttgtgtgagtgtggggtttcgataaaaaaaattattttaaaaaaagcactgaagtacaacaaaacagtgcggcatatacaaatcgacttctatcgatttccctccaaaacataaaattgtatcgaaaagattccgcccaggatagaagcatcaacagcaacaacgaggagattcacctgcccacgggcagctgtaccgtccaccaacacccacaccatcaccccctcccccgaccactaaggacaccatccatccatcatcatgtccagcgccagcaacaacggcccatcggcggaccaatccgtgcaagacctgcaaatggaggtggagcgcctcacgcgcgaactggaccaggtgtcctccgccagcgcccagtccgcccagtacggactgtccctgctggaggagaagtccgccctgcagcagaagtgcgaggaactggagacgctctacgacaacacgcgccacgaactggacatcacacaggaggcgctgaccaagtttcaaacctcacagaaagtgaccaacaagacgggcatcgagcaggaggacgctctgctgaacgaatccgcagctagggagacatcgctcaacctccagatatttgatctggagaacgagcttaagcaactgcgccatgagttggaaagggttcgcaatgagcgcgataggatgctgcaggagaactcggattttgggcgggacaagagcgacagcgaggcggatcgcctacgcctcaagtccgagctgaaggaccttaagttccgggagacgcgtatgcttagcgaatactcggagctggaggaggagaacatatcgctgcaaaagcaggtctccagcctgcgcagctcacaggtggaatttgaaggtgccaaacacgagatccgtcgtctcactgaagaagttgagctgttgaatcaacaggtcgatgagctcgccaatcttaaaaaaattgccgaaaaacaaatggaggaagcgctagagaccttacagggtgaacgtgaggcgaaatatgcattgaagaaggaactggatggccacttgaaccgtgagtctatgtaccacatcagcaacctcgcctacagcatacgcagcaacatggaagacaacgccagcaacaactcggacggtgaggaggaaaatctggctcttaagcgtctggaggctgacctgagcaccgaacttaaatctcctgacggcaccaaatgtgatctcttttcggagattcatctgaacgaactaaagaaactggagaagcagttggagagcatggaaagtgagaagactcatctgacggcgaatttaagggaagctcagacgagtctggacaagtcacaaaacgagctgcagaactttatgtctcgtctggctcttcttgcggcccatgtcgatgctctagtccagctaaagaagcagatcgatgtgaaggagcagggcaaggaaggtggccagaagaaggatgaactggagcagcagctgcgagcgttaatctcgcagtacgccaactggtttacgctctccgccaaggagatcgatggccttaagactgacattgctgaacttcagaagggactcaactatacggacgccaccactacgctgcgcaacgaggtgaccaaccttaagaacaagcttcttgctacggaacaaaagtcactggacctgcagagcgatgttcaaactcttacgcacatctcgcaaaacgctggccaaagtctgggctcagctcgcagtacattggtggccttaagcgacgatctggcgcagctgtatcacctagtttgcacagtcaacggagagacaccgacgcgtgttctgctcgatcataagaccgatgacatgagcttcgaaaacgattctttgactgccatccagtcgcaattcaaatcggatgtctttattgccaagccccagatcgtcgaggatctgcaagggttggcggattccgtggaaattaagaagtacgtggatacagtcagtgatcagatcaagtatctgaagacggctgttgagcataccattgatatgaataaacacaaaatccgctccgagggtggcgacgcactggagaaggttaacacagaggagatggaggaactgcaggagcagatagtcaagttgaagagtttgctgtccgtgaagcgcgagcagattggaactctgcgcaacgtgctcaagtcaaacaagcaaaccgctgaggtggcactgaccaatctcaagtccaagtatgagaacgagaagatcattgtcagcgacaccatgtccaagctacgtaatgagctcaggcttcttaaggaggatgctgccacattctcaagcctgcgtgccatgttcgccgctcgatgcgaggagtatgtgacccaggtggacgatctcaaccgccaattggaggcagcagaggaggagaaaaagactctaaatcagctgttgcgcttggctgtccagcagaagctggcactcactcagcgactcgaggagatggaaatggaccgcgaaatgcgtcacgtccgtcggccgatgccagcccagcgtggcacgagcggcaagtcctccttcagcacgagaccttcgagcaggaatccagcaagcagtaacgccaatccattctaacataagatcagcgtgcagcgtaaacttctagctttggtttatactttgcttaagttgtaaagtcgttggagttcctgcggaaatgagagattcccaaaaccacatgatatactgcgaacgtatttgagaacgaagctatatcccagctgtatccaactactataactatgtttgtttgtattgtacttgtatttattgaaagtttagttagatgaaagttttgtgttaggcaagggagcaacaaacggttattaacggttagttacttaaacgtccatttaatttaattaaaaacaaaaaagaaaaactttaaggaagattaaacaataacgtaaagcatcgtatttttctatacaccaatggcgtacttgtcttaaagacgcctgattggtttgatctgaattttgtcgcgatgattttttgatttttgttaacaacgctgtgcgcaagcgaataaattgacaaactaaaaagatacacaaattgatgttgaacagatggtattgatattggcaactgaaacatgcattaattggccaacccgataattaaaagtatttttccaaggtccagtttaagctaattggccaacaaatatgtacgtaaaaatcaagtcatcagatttttgctcgaaatgtatattacccgcatggcttgcagccattgaacctaaagtagcaccaggctacgtctcaaagacgattcagatagatgatgaagatttttgtatttattgagcggcatttggtcgccatgaaatgaagaaattgtaggtaattaattataatttgcaattgagaaaaactaagtttttgcgtcttatttagcattaattgcaaacataacttatgatttgtgcattattatttaatacaattaataaattgcaacg

SEQ ID NO: 14337 - protein, 782 aa, DROSOPHILA
MSSASNNGPSADQSVQDLQMEVERLTRELDQVSSASAQSAQYGLSLLEEKSALQQKCEELETLYDNTRHELDITQEALTKFQTSQKVTNKTGIEQEDALLNESAARETSLNLQIFDLENELKQLRHELERVRNERDRMLQENSDFGRDKSDSEADRLRLKSELKDLKFRETRMLSEYSELEEENISLQKQVSSLRSSQVEFEGAKHEIRRLTEEVELLNQQVDELANLKKIAEKQMEEALETLQGEREAKYALKKELDGHLNRESMYHISNLAYSIRSNMEDNASNNSDGEEENLALKRLEADLSTELKSPDGTKCDLFSEIHLNELKKLEKQLESMESEKTHLTANLREAQTSLDKSQNELQNFMSRLALLAAHVDALVQLKKQIDVKEQGKEGGQKKDELEQQLRALISQYANWFTLSAKEIDGLKTDIAELQKGLNYTDATTTLRNEVTNLKNKLLATEQKSLDLQSDVQTLTHISQNAGQSLGSARSTLVALSDDLAQLYHLVCTVNGETPTRVLLDHKTDDMSFENDSLTAIQSQFKSDVFIAKPQIVEDLQGLADSVEIKKYVDTVSDQIKYLKTAVEHTIDMNKHKIRSEGGDALEKVNTEEMEELQEQIVKLKSLLSVKREQIGTLRNVLKSNKQTAEVALTNLKSKYENEKIIVSDTMSKLRNELRLLKEDAATFSSLRAMFAARCEEYVTQVDDLNRQLEAAEEEKKTLNQLLRLAVQQKLALTQRLEEMEMDREMRHVRRPMPAQRGTSGKSSFSTRPSSRNPASSNANPF

SEQ ID NO: 14338 - DNA, 6941 bp, DROSOPHILA
ttgaccaaattatgatttacgcttcgaatggccaaaccaaacattttttcttcatttcattcgcaattaaggcgctatatataaggagtggaaataactaaattaagctcttgtcaccgataaatgtgtcactagcaactccatccacctgttatcatcaaccttaatcctcgtggcttaaaatctacgaacagcggttcatagttcatgctcaagtacacgaaaaatgaacattaatgccgcgtttattgcctttaaccgcattataataactttaaaacgctcgtttttatggcgaacggaagctgggcaatttatttgctgaccagcgcaacaatggaggcaagtccttcacaaaaaaaaatggtagaaaaaaaaccagcgaggaccaagaaaagaaatgagaaatgctgcctgggctattaaatccctggctaaattaactttaaggcggcatgcttcggccagtctgattacattaagaggtcctcgtagccgcaactgtagagctgaagtacgcgcgtgatataatgcgatgcgagtccggcagcgggacattcaagttgattaaaatcaagcatcaagtaaataaatctacggccaaaaaggcagcttcgctggcgccactaactgcctggagattaatttaaatgaatgaatcttgccatcaactctccggggctcgcaacttgccgcaatcacggccaatctgtaccgctttgccatccaccggggaaaaatcggataatttataagtttacattaacgagtgccatttgcatatatcgattttatacatattttctgaaatactgtcttccacacgtactttgaagttttttcttcaaaagcgaagcagcttttgaagccataatttgacataaaagtatgtatgtcgagcttggggtatcacttaattgataattaatttcactcatatacttacatactttcgaaaacattcaagccgccagtgttttaaaattttcgcccagtgtactcacctcctaatattgcgctgtatggaccgggtgacggcgcccatgtcgcaggcgcccttgtctcccggtttgcggttttccatccggctgctgcaggagcgtccatccaatgtggcgtagatgggccgacgcggcatgtgggcagtgtgggcggaccgcagtgtgggtatcttgctgcgctctgcccgcggactgggctcgaaaccggaatcctggtccttggtggtggccaaggcagacatgttgccgccatcgcgcgaatcctgagagtttttccaattgctgcgtgttttgttgccgctgcgcacgcgcttcttgagccgacgcttccttcctccactgccctcacatgtgtcatccgcgatggatgctccggctgcagctgctccacctgctgcgctggaatttcctactccatgtcgatttccactgctaagaaaacgacgcaaggcactatcgtgctccggatcaataccatccctctcatcgtcatcatattcatcgtcgtactcttcatattcgtagtccatcttctccagctccgcggcactgggcagctggacggcagacgccccttcgcctaccacctgaaagacttgattgcccgcttcgtaatcgaccttgcgtccaggtcgttttgtgctttcatccagggagtcatcgcttttcagaacgtggaagctcgatttccgttcaccggccggctcatcggaagctgaggctggaggatttgaattcggattcagaactgggtcgtcatccgccgaatcggaaggcaggagtgtaaaggagcgcctcgtctcctgttccctttgcggtggctccggctggggtggagtgggcgtttggggtgtggatgggcgtggctgtggtgctgctggtggctttttagactctgcagagggtggaccgggtggagcagcggtgggcggaggtatgggagtaggattggtatttggtttcggcttggcttcagccagctccatctgttctgtttttttgccaacagacgctggctctgccgccgcagattccatcccttccactgtgttggcattaggttgtggttgttctgcggcacttggtggctttgcggcctcctccttggggggtggtggcggtgtgcttggctgtgctggtggtgcatatggggttggaggattttggtgttcctttacctcctcgtcatgattttccccaggtgcttgaccctctttggggagctccttttccactgacttttcctcactggaacttttggactcgctgctcagcgcagtggcagctattatgatcacctgctccacctccttggagaccaactgcgtctcctcctcactcagctggagcttgacttcctgctccgactccttttccttaccattttcttctgcttgtggtgcttcctcggaagacttggatgtttggatctcctctgcatcgtgatgtacatctacctgagtgaccaccgacttggctgcctcctgttcttcatctgttagctcaactgcatgagactcctcaaccaagaggttatccatctgtccggacttttcactctttgcgctctgggttggtgacttgataaaggttccctctttagtgggtggcgtttgatgcctgctggcggatggtggtcgttctttagtactggtttgatccttgccgttgtcagcctggtgatccccattgacggcgagtggtttccgcgaacccttctctggcgatgagtgattttccgagtgatttttctcgtccggatcgctgctgtctcggttttttgacttcctagaggatgtggaacgcttgcgattaaccacccgatccttttgtcgcttgtggtagcaacagttttcgcaggagtcctccgcactttcctcctcccactcactagagctggcataccgttccctggacttccgccttcgaatctcaatgttgctcttggagcgacagatctcgctgcaccgctcgtgcttggactcgccacaactgctggtgcgcctcctcagttgccttctcttgtgacgccgacagacgtgcctcaatcgctgctccttgcgataagtttgctcggagcagctgcaatccccatctcctacatccgccttaccattctcgtttccattatccgaatcggagcgttttaggtacaccacgtatttcttggagctgcgtagatcatgcagctcctccttctccacatactttaagggtctcaccatgtcagtagcgttggtttcgtggaagggattcccagtcctcctgctcgacaatctcaccttgttggccggctgaccgccgttggcctgcaggaatttggccgtggagcgatgtccacgctgcagagctccatccagtggtgttagaaccaatcctcgtgagttccgatacacagcatttacatctgctccgtagtccaacagcagcttacacatgtcggtgtaatcattggccgccgcaatgtgcagcaagctgcgcccatcattgctggtggtgttcacctgcttgggcctctgggcaagtagccattcgaggagctctcttctccccgaggcggcggcctcgtgtagcggcagatcacccttggcattgcgcagccagagattagcaccgcgctctttcagcaacttcaaggtctcgaactgtcctttggagcaaccgcagtgggcaggtgttcgtcctttgcgatcctggcgattgggatctgcctccaagtccagcaatctagcagtggcatcggcgtgacccaaagttacggcataatgcagagctgtacagccattggaatcgataagatccgtgggagcaccacacaggcctatcaaggtgtcaatgcactcagtgtgtcctcgggaacctgcacaatgcagagcagtgaggccatctctgaaagtatttaggaatatttaatgatggaattaggtagggtaacatgttaaaaacccacttatctgaagactccacccgggcacccgctttgaccagagcaatcactgccttcgccgagcccgccgatgcagcccacaacagcggctggcgaccatccttgtcctggacatcgacactgctctggggatgggagagcaggatgcccagaatctcgagggagagcctcgaactgttgctggaactggcctgctgcttgctatcctgcttgctggcgccacacatctgggcggcatagtgcagcggagtgccaccattggcgtcgggcttggccacactggctcctgctgccaggaccgctcgcaaggactccacctccccacaaactgaaaaacataggatgcatttagtctaattactataggaaaaatagtatatatacattaaatcatattcataacgaatttccatcatccaaagttaattagaattttttattgccattgtgcacaaacattaatcgcttttaatagttcatgagtgtgttcattgattaattttcatttttctagtcaacaagtaagtaactttttagttgtaattaattggaaaatgcatgccgtcctaaataaattgttgaaaaattatttgtaatgcaattactgcagctttttgtttagttagttcaatgtaaatattttcagaggccaagtgtgaactgttggtaaacaaattgttgtttaaataaaataatataaacataaattgtttacttttaggcaaccaacaaaaatagttattaaatcaatattagtttagttccagaggattatccctccactcacctgtcgcccagtgcaccaccgagtggccctcattgtccaccgcgttcacatccgccttgttggccagcagcagattaaccatggccaggttgccctggatgacggccaggtggagcggtgtgaagccatcctcgtccgccgactccagcagctcgggggctgcgatcgcaatactggcggccgccacgaggtccttgcttccttccgagtcttgggcggcacagtagtgcagcgcgttgcggtgacttcgatcccgctgccgcagcaattccggctgttcaacgatgaaatggagaacgacagagagcaaaattcagaaatttcactttagttagttaagtgcaatggatggtggggtcaaaaattaattacttcgcccgctggaaaattatagccgcacggagcgattgcacctgctgagttgaggccgcagccgattaataaactaattaaaatgtcatttgcatattgcatcaatttgcatcacggcgctctggacatacactaccccaacccctatcccaatcccatctcccatctcccatctcctaccaatttgccggcgggcagcgtttgatggatcgcgtaattttcacagtctctggcttaattgccagcaaatatttttggtgaagaatataagtgtgtgcatcgagtgttgtagttgcagtgttgtttgtttgtttgtttaaccggcgagttgttgttgttgttgttgttgttgctggtggtggttggtcggtcggtcgattggttgtcagccaggccttttgtgcaagtgtcgagtggctgattgggcaaaagcaattactttttccaaacgcatcacacctccggcagcgcatttaatgcgatgtcacaaaaatggccggccaataaataattaaacatattctcgcgttaatcatgcaaaaatgattgccagttataaaagagtaacagtcgtggaaaaatgtacttttgcgtaccgctgttggtcagttactaaagcaacagcacagcgaaggtaaacaaatgttaacagcgacgcctggaaggagccaacgagagggtaagagggtgcagggtcctgcgggcagaattggaagccgttgtcctgggcaacgtggtgagttgccaaggacttgtgtggtggtggctcaccagattgacgcttgcatttttggcgcgcaaaacaatatcaaactccagcggcgcagcgaacatggctcgttcctcgtccctctgccaggagcctcggcctgccttcgtcctttttggccaaaggatttcgggtaggagcgtggagcgtgtcaaaacatgtcaagtgcacaaaaaatactgtcgccgccgccgaaaagtatgctaaaactttgcccgctgccgccaggaattcgcaatgcgacgacagcgacgccgacagcggcagcgacagcagcagaggagcgacgtcaacggcagcacgcaaatgtgaaagtgaaaacgttggcaaatcgtcggccaacggggcggatgatgaggatgaacgtgggcgggcttgggccagaccagtcctcttttcagccgttttgtggagcgcccatgggcgccgcttattaggcttcgcaactaacttttcttgcggcatagtttgtgctaatttcttgctattcactggaaaaaatgaataggctccttttgagatgacttcgctgctaagtttcttaaagccatagcgcaaaacttcctcgttaatttaggggaaattgtgctatataagattaaatttcaaactaaaacagatcctaaaagtgcctgaaattatgtaagtacattcttttcagtgcatttggtgtttatcttgtcagtttggctgagtgattgactgtgttgcttttctaaccaacattcaatttttacaaacatttcggtcacgttgcctttctatttatatcgcgcaaaggatatcgcgtgactgttgtaaaactgtcgttagacgaggagtggaggccacctctcagccacctgtcccagcccctcctggatccacgggaagtgctcaatttattgcacattttagcatgagtcaaacaagagctcaatagctgtgcaagaaagtaaggcgaaactcttgtggcaacaagaacagcaagagaaagtgaactttgacttcttatggcgaaaaggattcgcaggactctcaagaagggctcaacaggtggaaggcccttggtacaaaacccgaaaa

SEQ ID NO: 14339 - DNA, 3489 bp, DROSOPHILA
atgttcgctgcgccgctggagtttgatattgttttgcgcgccaaaaatgcaagcgtcaatctgccggaattgctgcggcagcgggatcgaagtcaccgcaacgcgctgcactactgtgccgcccaagactcggaaggaagcaaggacctcgtggcggccgccagtattgcgatcgcagcccccgagctgctggagtcggcggacgaggatggcttcacaccgctccacctggccgtcatccagggcaacctggccatggttaatctgctgctggccaacaaggcggatgtgaacgcggtggacaatgagggccactcggtggtgcactgggcgacagtttgtggggaggtggagtccttgcgagcggtcctggcagcaggagccagtgtggccaagcccgacgccaatggtggcactccgctgcactatgccgcccagatgtgtggcgccagcaagcaggatagcaagcagcaggccagttccagcaacagttcgaggctctccctcgagattctgggcatcctgctctcccatccccagagcagtgtcgatgtccaggacaaggatggtcgccagccgctgttgtgggctgcatcggcgggctcggcgaaggcagtgattgctctggtcaaagcgggtgcccgggtggagtcttcagataaagatggcctcactgctctgcattgtgcaggttcccgaggacacactgagtgcattgacaccttgataggcctgtgtggtgctcccacggatcttatcgattccaatggctgtacagctctgcattatgccgtaactttgggtcacgccgatgccactgctagattgctggacttggaggcagatcccaatcgccaggatcgcaaaggacgaacacctgcccactgcggttgctccaaaggacagttcgagaccttgaagttgctgaaagagcgcggtgctaatctctggctgcgcaatgccaagggtgatctgccgctacacgaggccgccgcctcggggagaagagagctcctcgaatggctacttgcccagaggcccaagcaggtgaacaccaccagcaatgatgggcgcagcttgctgcacattgcggcggccaatgattacaccgacatgtgtaagctgctgttggactacggagcagatcgtggacatcgctccacggccaaattcctgcaggccaacggcggtcagccggccaacaaggtgagattgtcgagcaggaggactgggaatcccttccacgaaaccaacgctactgacatggtgagacccttaaagtatgtggagaaggaggagctgcatgatctacgcagctccaagaaatacgtggtgtacctaaaacgctccgattcggataatggaaacgagaatggtaaggcggatgtaggagatggggattgcagctgctccgagcaaacttatcgcaaggagcagcgattgaggcacgtctgtcggcgtcacaagagaaggcaactgaggaggcgcaccagcagttgtggcgagtccaagcacgagcggtgcagcgagatctgtcgctccaagagcaacattgagattcgaaggcggaagtccagggaacggtatgccagctctagtgagtgggaggaggaaagtgcggaggactcctgcgaaaactgttgctaccacaagcgacaaaaggatcgggtggttaatcgcaagcgttccacatcctctaggaagtcaaaaaaccgagacagcagcgatccggacgagaaaaatcactcggaaaatcactcatcgccagagaagggttcgcggaaaccactcgccgtcaatggggatcaccaggctgacaacggcaaggatcaaaccagtactaaagaacgaccaccatccgccagcaggcatcaaacgccacccactaaagagggaacctttatcaagtcaccaacccagagcgcaaagagtgaaaagtccggacagatggataacctcttggttgaggagtctcatgcagttgagctaacagatgaagaacaggaggcagccaagtcggtggtcactcaggtagatgtacatcacgatgcagaggagatccaaacatccaagtcttccgaggaagcaccacaagcagaagaaaatggtaaggaaaaggagtcggagcaggaagtcaagctccagctgagtgaggaggagacgcagttggtctccaaggaggtggagcaggtgatcataatagctgccactgcgctgagcagcgagtccaaaagttccagtgaggaaaagtcagtggaaaaggagctccccaaagagggtcaagcacctggggaaaatcatgacgaggaggtaaaggaacaccaaaatcctccaaccccatatgcaccaccagcacagccaagcacaccgccaccaccccccaaggaggaggccgcaaagccaccaagtgccgcagaacaaccacaacctaatgccaacacagtggaagggatggaatctgcggcggcagagccagcgtctgttggcaaaaaaacagaacagatggagctggctgaagccaagccgaaaccaaataccaatcctactcccatacctccgcccaccgctgctccacccggtccaccctctgcagagtctaaaaagccaccagcagcaccacagccacgcccatccacaccccaaacgcccactccaccccagccggagccaccgcaaagggaacaggagacgaggcgctcctttacactcctgccttccgattcggcggatgacgacccagttctgaatccgaattcaaatcctccagcctcagcttccgatgagccggccggtgaacggaaatcgagcttccacgttctgaaaagcgatgactccctggatgaaagcacaaaacgacctggacgcaaggtcgattacgaagcgggcaatcaagtctttcaggtggtaggcgaaggggcgtctgccgtccagctgcccagtgccgcggagctggagaagatggactacgaatatgaagagtacgacgatgaatatgatgacgatgagagggatggtattgatccggagcacgatagtgccttgcgtcgttttcttagcagtggaaatcgacatggagtaggaaattccagcgcagcaggtggagcagctgcagccggagcatccatcgcggatgacacatgtgagggcagtggaggaaggaagcgtcggctcaagaagcgcgtgcgcagcggcaacaaaacacgcagcaattggaaaaactctcaggattcgcgcgatggcggcaacatgtctgccttggccaccaccaaggaccaggattccggtttcgagcccagtccgcgggcagagcgcagcaagatacccacactgcggtccgcccacactgcccacatgccgcgtcggcccatctacgccacattggatggacgctcctgcagcagccggatggaaaaccgcaaaccgggagacaagggcgcctgcgacatgggcgccgtcacccggtccatacagcgcaatattaggaggtga

SEQ ID NO: 14340 - protein, 1162 aa, DROSOPHILA
MFAAPLEFDIVLRAKNASVNLPELLRQRDRSHRNALHYCAAQDSEGSKDLVAAASIAIAAPELLESADEDGFTPLHLAVIQGNLAMVNLLLANKADVNAVDNEGHSVVHWATVCGEVESLRAVLAAGASVAKPDANGGTPLHYAAQMCGASKQDSKQQASSSNSSRLSLEILGILLSHPQSSVDVQDKDGRQPLLWAASAGSAKAVIALVKAGARVESSDKDGLTALHCAGSRGHTECIDTLIGLCGAPTDLIDSNGCTALHYAVTLGHADATARLLDLEADPNRQDRKGRTPAHCGCSKGQFETLKLLKERGANLWLRNAKGDLPLHEAAASGRRELLEWLLAQRPKQVNTTSNDGRSLLHIAAANDYTDMCKLLLDYGADRGHRSTAKFLQANGGQPANKVRLSSRRTGNPFHETNATDMVRPLKYVEKEELHDLRSSKKYVVYLKRSDSDNGNENGKADVGDGDCSCSEQTYRKEQRLRHVCRRHKRRQLRRRTSSCGESKHERCSEICRSKSNIEIRRRKSRERYASSSEWEEESAEDSCENCCYHKRQKDRVVNRKRSTSSRKSKNRDSSDPDEKNHSENHSSPEKGSRKPLAVNGDHQADNGKDQTSTKERPPSASRHQTPPTKEGTFIKSPTQSAKSEKSGQMDNLLVEESHAVELTDEEQEAAKSVVTQVDVHHDAEEIQTSKSSEEAPQAEENGKEKESEQEVKLQLSEEETQLVSKEVEQVIIIAATALSSESKSSSEEKSVEKELPKEGQAPGENHDEEVKEHQNPPTPYAPPAQPSTPPPPPKEEAAKPPSAAEQPQPNANTVEGMESAAAEPASVGKKTEQMELAEAKPKPNTNPTPIPPPTAAPPGPPSAESKKPPAAPQPRPSTPQTPTPPQPEPPQREQETRRSFTLLPSDSADDDPVLNPNSNPPASASDEPAGERKSSFHVLKSDDSLDESTKRPGRKVDYEAGNQVFQVVGEGASAVQLPSAAELEKMDYEYEEYDDEYDDDERDGIDPEHDSALRRFLSSGNRHGVGNSSAAGGAAAAGASIADDTCEGSGGRKRRLKKRVRSGNKTRSNWKNSQDSRDGGNMSALATTKDQDSGFEPSPRAERSKIPTLRSAHTAHMPRRPIYATLDGRSCSSRMENRKPGDKGACDMGAVTRSIQRNIRR

SEQ ID NO: 14341 - DNA, 11310 bp, DROSOPHILA
ggttgagctcgtgcggactgctgccgccgggcgaggtggctgcggggcatgtgttcatatagccaatgcgtacgagctgcttgatgccggctacttaccgaaacttatattagagcgcccggttttcggggacagcgtgttcttgtgcggcgttataccttgcggatcgccgagcagaaaaggtggcagatactgggtctggttggagccaggactgttgaccgggctgcccagattcattggctccatatcgaatgcgaatattaattataataattataacggcgaaaaacgaaaaagcgttgcattaacaaggacgccacagctgtaatcggttagtgcgaccaggctgggctggggtcgaaatgctagaggtggatgccaacatcgatgtcatcgatgttttcgaaaaatcacaaacatcgatgtttttcaaagaatcatcgatgtttttccatctttactgcgcatcgtaggttaaaagtgtttaaattgtgagtataaattaaatttccaaattttccaatttccatttattaatagcatattgcaaattttcagtgacttgctggtggtcttggctggcgtcgtggaagacgacacgtatatttatgcatgtatgcatgcgtgcacctgctcgtatgcatactggcttacttttctattgaattacttttctattgaattgcattaattagtatatttgatttataggagcaattattggaccaggggcggataaaaacgtagacggcaataagcttgtcatgtttagttatagtactgcctttttatttaagcaattataaaaaaataataatctttaagttaagcagttaatttttttgtttttattgaaaacatcgatgtccgccaacatcgatttctccacctctactaaatacgccgttcttcgcagtcgcgccgcgcaacttgcacttttgcagctccccgactggcagtgggcacatttcgtttcccccaaacggtcactctagcggccacctttcaaacaacaacatcacgcgtcgcgtctccgtctttttcctttttttttttacattagactacactacgttctcctggcgtttcgttcgtgtcgcgcgtgattaaattggcaactgagaacaataagaagaaatcacagtgtgcgagcagcaacaaacacaacgattagtgtaaacaaaacacatcgacaacaacaatccaaattacaatataggcaaagaagaagaaacgaaaggcaggaccttcgcagcaagagcgagacagcaaaggatcgggatcgggagagagcgtgagagtgcgacttgatcaacgggatacagggtgacatgtggagtccgacgcactgtagtgtaacgggtaagtgggggcgaaaagcgggggacacccgttttagtatttgtgttttttttttattttttttttacggcgaataaatcgcattaaaacttaaactcgtttgtgccgcgtgtgtatgggtgtgtggcctgcgccgttgtgttggtgtgtgcttaaaatattgtcatgacggtcgtgttgttcctattgcttttgctgcagacgtaccaattcgaaatttcactttttccccaccgcgcgcttcctccttttgccattgcctcttgctcttcctcttgtgttttcctgactccagcaattgcctttttatcaggcttttctggctgataagataattcccttgctcgaatgcgcacttactcatcgcattgctagaaaattgctcatgctaagcgctccccttatgtatttgcatcgccttccgccccttggcattccttagcatacgcccatggtggcgcttttttggtgcctcttgtttacctttgccattgttttcgttttgcgttttcttcagggctaagtgtcaatgagaaatcgcgaattccgattccaaattcgtgacaaaacacaaagcgcgctcattctgctgttcccagtccagtgattatggaaacaaataataactgaaagccaaagcatagatattttcatatctccaacatggccaataagaccctttaagaaatgttttccgcaatgttagttattggttgcaatagtggccactgggcggccaaatgagtaaatgagtcacgaattgtggttcaatctagagctgcgtggaatttacacaaatcaagatgataaatacactgggctccattgacatgaacggatccagcttgttgtgatcttgaacttgccccgctatcagttagtacgttctttgcctcaattcgctcgtttcatttattttgcatatttgcacagcgcacagtgttttattccagcaatttgcgattaaaacccagagccgttgacgtcacggcgaatgagcaaacaaatcatcgccgtgtggctctcccaaattcgccgagtttcgccttgtttgttaagttcatatgtacatatatacaaatgtacacgcacataaatacacctgtcaatatttgccaatttctttgcgatgagaatgagatgagcgcgcacgctttggaaacagctgttttcgctgctgttctcaggagcactctgttccctatcctttgaaatgccatagtgttcccacacagagagaaattgcgactcaaaaggattcgtttttttttttgttgtctcttttcaaaacgaaatacaaaactattaacttatatatagaataggcaattctggactgaaatatttaaattaaaggccatgtttttttttttttttaattattgcacagctgcaggctttgaattctacttaccagatttgctagttaaattaagaattcatctgagtttaccatgtttacatgcatgtttgcatgccagagaatttctttcactgtgcttttttcgtttcccctgttagatcatccagcaaacacctggcgtcccgccctcttattaatggcttgttgtttggggaccatttagtctgggagagttccttatcgactgcgaactccacccaattggcccattgcgtgccttatttttagccgtaaattcttggccgccacttactcactcactcactccactcacttactcggctacttactccaactcgcacatctacggacacacctactgaataaatgcctaaaatacctgaaaatgaaaattcctcagcgggaaattgtgcaatgagcggcgggcagccaagcagacccaaacaaaacaaacgcctaattttccttttcatttccattttggtttttggtttatgtttggcttgcttttgcaacgcattttatgcggttgcagtgaaaatcagagcggaccagaccgcccttttttttatcgataatgaatggtggcggcacagtgaatacctgctaacgcggaagccaggtaccaggtactatataacaaacctatatttcttgtatttatactgctaaaaatacaatggaaccgtgtgatacatacgtagtaatctgttacacttctgaaccttttaagcaagatattgtgtcgttcgactaaaagatagatattctaattaaattgaaaaatgatctttatggcagcttctactgtatttcccctactatcaccgaatcgataaggaaatcagtgcgataagagctggagctgttgctagaactgtagctggagctggatcacctctggtcacgtcagcgggcagatggcgtcttgagattgtgtccacttcttccgcaccctgcccggcgatgccatcgtccatgtgagaccgttttaatgcggctccatcgatgcacttatgcgaaacagttacgttccattgctcgacccatttagccagaatagaaccaaacaaaccgaagcggatcggatgggatcgggatgggtccggggtttggtcttatgatcatgatggaagggggaggggaggggaggggatagtgaagaaaaacaggtctggcattggatgggatcgctggccgaaagtctcttcgcatcgcgggtctgcaattgattattttccagttccagttcttggccagtggccacattcctccggcgcttgccgaaccccagtccccagtcaccagtccccaagcaccgagccccgaacacccgggcacatcctcccctgaatattcatgctgggaatctcggattctttgagccaccggggcatttatattcaaaacatgccatggcaaacagaagccaactgcaactgaaatgctaatcgcctttcgtttgggaaaactgtgtttcatgtcttctgctgtctgttttccatttcaaaatcgcacggcttcgtgggttcaatgcttgcgagaaagaaattgtttatgcataacaataaaatgattcgctgtaagatggtgggatcccattgatagaccgtttactttgatcgccgcctctgtacattttcgcattttcgcacgatccgcacacacccacacacacatacgtatgtacatactaatgtatgtatgtacatatgtgtgcaatgttgcattgcctgctcgatgttgcagttgcaacattaattgttgctaatgcttttcatcaaacgggatctgtgctgtaatgcggggccataaaggcgaggattggcccccagttaggtgagcttgtagcacgtggttaacccgagttgaaacccataaccctgaactccgcaccatgaacccttcatctttcgattggcgcactcgttaggcaagagccgtccaaaagtgagtctcgagaagaactatcttccgaaatgggagcgcgagcaagtggctcattagcatgcgtggttggatgcccatgccccaaggagcattggcctcggctagcagtttgctgtatgtatatacatatacttggccacgccctctcaccgcccccgaaaaaaaaaaagagtgcgagagctaaaaaaaagtggaacatgaaagtgcgtgctgggaatttcacgtttaaagtgcgccataagaagcagcagctatagaagctctttatgattgcgatgcactatatctgtatctgtatctgtagcttggtcgagggctggcggggatggggcccgtcaattaggtttcacacacacacacacacacataatcccctgacttgtgcgatcacttcatgccatagtttctctttgggaaatgttggggggatatgaatggagatgccaatggaaatggaaatggaaatggtcacctggggagcatcaaagcactgcatactgcacacgcagaaaccagaaaagcagccgggaaatcaagcaaacaagccaaggcacaccgagaaatgatttcattgaaattaattaacccgaaagttgacctctcccctctccacccattccctcctcacatttacacacacacacatgtagtggcgagtcagaaaggtcaacaatatgcgatggcagatgttgattctattgtcggccgtctgtctctctggggtcgcataaaacacaaaacaaaggtgcagccgcctgtttgcttgcctcgccacggaggcttttagccataattgactgtaaactagaaggggagaaacaggggatttaatcatccgattcagttacccccacgtacacacgtaccaatatcaggaatccaattccagtagcccagaatcgaaatcgaatgaacatcgatcggcaagcagcgaaagatttctctttttagcatcgaagccagccgttattttcgtcggcttatttgggccacgaacgacaggtgactcatgttccagagttccagtgccatgagtaagccagcctgacaatcctgccctgcttttctgctccatatcatagataactctcgtacacttctgacattctgctgatacaaattgaattgaattgaattgcgccgccctttgcacgtgattaaaacgaaactgggaggaatagtgcttctgttttggcactgcttctattatcgcctctcaatccgatcgaaacactcgggggcacttggtgctcacatatgtatatgctgatcatcgctaggcgaaaatcaaatgcgcaactatgcggcacagtgggcgcaaattatgatgttttcgaggcaaaaatggtacttcagagtggccaaaatgaatcacctttggcacacggtgccggcagcgtcattagtttcgagaggcggccataaaagcggaccaacttaacggtttcgccgttggtggattgctatttggttttgggttttggttgtattttttcggctctgcctgccttgtttgttgctttattttgcttttcgttattttgcttaccattttgccatttagcatttggcatttctattttggggcgcccctccatgcaaaacaccaccattaccatcgtcgcgttatgaaggggaactggctgggcagacagacagacgggcaggcaggcaggcaggcaggctggggagtccatcgatctctgggcggatttgcatgaaccgctgcacgaaattgccgggcgggttattgacagccatactcgtggccatccatctttccgtccatgagctctgttagccatcagctattagctcgagaaaaaaaaaccaagcccagagcgacctgaagatgagcaggttgctccgctttggtcgccactcattgatcttcggcagccgttggattatcgatattagcccaggggcgctgccccgtctttagccccaatgattggtacgaaaaaagtggaggaaaaacgggaaaaatcagcgacggtccggcagaagaagcggaaaacatttcaaattggcttacaggcatgcagacgggaaaaactgttaatgcgataataattatgagacgcccactcggtggaaaagggggcgggaaaaggcataagatgtggcacttgcacccgaacagaaatcgaaaccgaaaccgaaaccgaaaccgaagacaccgaaaatgatgcacaaatctgcaggccaggcccattgtttctgcgctttcccgcttttcttctagtcaattttcaccgcctttcgttgacaccgcttttcactttttgccttgttgtctatgcccggtaattgcttcttttcccttcaactctttttgctttctactcttcactttaccttacttttccttcttatttttttggcattacgaaacgctggaggggattgcgaaaaacagactttgtgcaagtgcccaatcacatttgaataatcgaaatgtatggcgattgccggggaggagctggaggatgaggtggagtctctgtcccgctatttccacatgtggggtgatgaacatctgggcagtggaatgacctgtagcccgggccaagccaaaaatagatgtctccgttgatcagcgagcttcgggttctgttccgtttcgttctggcaatgacttaatttcgccttcatttacatttcgactccgattccaactccaatttccacttccggcagctgtgcatccgaaacacagcgatgagctagaatcggagacggcgccgaggtgcaagcgaaaaaaataataacagaaaagaaacaccacagacaaccaatctgagccagcgattgtcgccactcgctcgagtgaatcactagccaaataatgttgccgatgctccgtccagcggacccaaaagcaaattttgagtttcacccgagcgcctcgtgacctcgagagcccgaccagagcatccggcagatatgaaagccaccaccacagcgccgacacgccaaccacgcaaaccacacaaccgcgattcgcatcccaatccaacccattccatgccatgccatgccaagccatgccaacgccaatcccaaactctcaaactcaaactctcaatcccagcattgtttgcggccggccggacggccgactcttccagatacatttatgtatctgggcatttgctttccagatcatattccatgatccggactcttgttccccacgctccccatttgtcacattaagctcaggccgaaaatatcatactcatatttatttttgtaagaattaatcattaagcttggggtacaattatttgcaaatgtgagcgatatatttggatagcccaacagagaccttcactcatttcctgctgttgtgggtagtcgatgcgttgggatgtgactcaaatctcgcttcaaatctaaacgaagctctaatctctcccacatttctatcccattacagtgcagcgagcgcgtgggctgctcaccaagggcaagaatggcaccaacaactgcttcgtcaccattgctctgggcaaggagaagtaccagacgtccgtcaaggacaaggccgagacgagcgtcaactggaacgaggagtgcgaactgtaagttcagagttaacagctccttctgctctgcataaggctcaagtatttttcattcgttcgcataggaaaattcccgatcagggtaatcgcgccgagctcactttgacctgcctgcacaggaacaatctgggcatcgatgagttcctcggccaggcgacgctgccgctcaacgagatggatgtgtatgaccggccacgcgccaagtggttcaagctggagagcaagcccggcaaggagaagaagaacaaggagcggggcgagctggaggtgcgcatcgccttcgtggtcaagtccggctcgctgaccgatctcagcaagaaggacaagcacaagtcttccattggccagctggccagctccgtgggtggcagtctgttgtccatcggcaacggcgagaagcggcgaggcatcaagaagctggctggctcgcttagctctaagctgcacatccgtagcaagaagaagaaccaggaggcgggcgccgacgatagtagctccttcggcggctccttcgccagcctgggcacgcccaacagctccaacggcaggggccagaatggtggcagtggcaggcgacgtggcggccagcgggcgggcgaagccgatcccggcgtgatcagcgaggacgaggacgagtttgtgttcgacaacctctcgcacaagagctccggcagctcacttaacatccaacgcatcggcctgcagccgccgccagtcggtacgcccaactttacgccgcgccacccatcgcccctgctgaacaacggagttagtggcgtcggaagcggcagcgcgaaaggtaagcaagcggttttgccagcgacgctcgatgaggatgcgtccatcgacgcggagatggaacagcttgagctagatttcagtgttcgtgcccacgcccgcgcaaacgctaacgccagcgccagcggaaatgccagcaccctgccgcctccctcgaaaccaccgcgcattcccctgtcgcaggtggacgagcagccggctgccgggagtctggagcgggaaaagccaaaggagaagccagccgaggtggagagcgacaaggacgagtgggcgtcaaagttgtatggcggtggaaagtacctggagatcggtagcagtaactcattgaaacgccgcagctgggaggaccgagttccactccccgccagtgttgaggagccgccgccattgcactcgtccagttcgtcgtcgagttccagttcggatagcgatgacgatgacgagaaaccgccgcaggctgctcccccaccagtacccgtgccggcttctctaccagttccatctgcagctgcttctactgcttctgctgacccagtggtggctacttcatcgtcgctcttctctcccgacgtggagcaccgcaactttgatacctttaacgccagtttcgccaagtacgagcagcgaaacagcactgctatttttgcagatgaacccgagctggaagacctgacagtggagctggagaagccggcgcccactcccacagcacgccccaaaccgcagccacgtgctacggccgatctgagggcggaggaggagaaggctaaggaagaggctgcacggcaactgcgtgccgaggaggatgcacgcttggaggcagagctgcgtctgaatgaggagcgcctgcgcgaagaagaggaggctatgcagcgagagctggaggaagagaaggagcgccaaaagcagctgcagatggatgagcagcagcggcgtgaggccaagcgctgggaagaagatcagaggcttttgagctttgccaaacgatccacatccctcgaggagccagtcccagagaagcaggagctgaagcatgagagggagctcgtggccaagcaggagccggagaaaacgctggatacggcagagccggagccggagcacaacttcctaacgcccgaacagtcgcccaaggagttccagacgaatggcagtggcagtggcagcggggagcgctgggagaaacgactgggcaaattcaaatacggcaacaagcgaggtgagctgatgtacccgaaccgaaaccgataccgataccgataccgaaccaaatccagagcaaccaaaccactgaatcgctgcaattccccaccactccaaaaaaaaaaaaacacctggcggcgggcggggagtatggcataatggctggcggatctcgaagcgcacacgaaaccgaatccaaatcaagctaacttccagtcaacgctgtcatctgtcgtgtcatcctccttcgaggcgattcctatgcccctttactcaactcttcccacctatccccacctgtctgaatttcctgtctgtcccttggctgttttgtgttgtttccgttgtgtttctcgcatccgccagtgaatttgcatctgagtttgaaccaccttagctcctccctcatccgcgcgcctcctcctcctcctcctcagtatcttaactgaccaattttgatttccgtgctccgcagataaatacaacaacgacaacgacagcaactcgcccagtcccaagtctacggagcgcatcataattggtcacgagaagtcgggatcgcatgcggatcgccgctcggagatatccgcccagctggccaagaaatacgagggcaagtcgcgcgaggtaagtgacattgtcatacctcgcctgtgatcaaagtgctcatataattgcataccgtcaggaactaatgctaattgccaacggaatggagaacgaggctctgctgcagcggcagcgcgtgaaggagctggaagactatctggacaacctgctgctgcgcgtgatggagacgcacccgaagatcctgcagaatccgtattcgcgcaccacgtccgccaagaggtacggcacctggtcgttctggtcgtcctctcgtactagagccacgcccacccactaaccaactgcatgaccctgaccgccggtaggattgttgatagccgatagaaaaccgccccgcccctgctgatcaaaattcagggtcgcactggatgggaattgaatctgata

SEQ ID NO: 14342 - DNA, 2860 bp, DROSOPHILA
gccacctttcaaacaacaacatcacgcgtcgcgtctccgtctttttcctttttttttttacattagactacactacgttctcctggcgtttcgttcgtgtcgcgcgtgattaaattggcaactgagaacaataagaagaaatcacagtgtgcgagcagcaacaaacacaacgattagtgtaaacaaaacacatcgacaacaacaatccaaattacaatataggcaaagaagaagaaacgaaaggcaggaccttcgcagcaagagcgagacagcaaaggatcgggatcgggagagagcgtgagagtgcgacttgatcaacgggatacagggtgacatgtggagtccgacgcactgtagtgtaacggtgcagcgagcgcgtgggctgctcaccaagggcaagaatggcaccaacaactgcttcgtcaccattgctctgggcaaggagaagtaccagacgtccgtcaaggacaaggccgagacgagcgtcaactggaacgaggagtgcgaactgaaaattcccgatcagggtaatcgcgccgagctcactttgacctgcctgcacaggaacaatctgggcatcgatgagttcctcggccaggcgacgctgccgctcaacgagatggatgtgtatgaccggccacgcgccaagtggttcaagctggagagcaagcccggcaaggagaagaagaacaaggagcggggcgagctggaggtgcgcatcgccttcgtggtcaagtccggctcgctgaccgatctcagcaagaaggacaagcacaagtcttccattggccagctggccagctccgtgggtggcagtctgttgtccatcggcaacggcgagaagcggcgaggcatcaagaagctggctggctcgcttagctctaagctgcacatccgtagcaagaagaagaaccaggaggcgggcgccgacgatagtagctccttcggcggctccttcgccagcctgggcacgcccaacagctccaacggcaggggccagaatggtggcagtggcaggcgacgtggcggccagcgggcgggcgaagccgatcccggcgtgatcagcgaggacgaggacgagtttgtgttcgacaacctctcgcacaagagctccggcagctcacttaacatccaacgcatcggcctgcagccgccgccagtcggtacgcccaactttacgccgcgccacccatcgcccctgctgaacaacggagttagtggcgtcggaagcggcagcgcgaaaggtaagcaagcggttttgccagcgacgctcgatgaggatgcgtccatcgacgcggagatggaacagcttgagctagatttcagtgttcgtgcccacgcccgcgcaaacgctaacgccagcgccagcggaaatgccagcaccctgccgcctccctcgaaaccaccgcgcattcccctgtcgcaggtggacgagcagccggctgccgggagtctggagcgggaaaagccaaaggagaagccagccgaggtggagagcgacaaggacgagtgggcgtcaaagttgtatggcggtggaaagtacctggagatcggtagcagtaactcattgaaacgccgcagctgggaggaccgagttccactccccgccagtgttgaggagccgccgccattgcactcgtccagttcgtcgtcgagttccagttcggatagcgatgacgatgacgagaaaccgccgcaggctgctcccccaccagtacccgtgccggcttctctaccagttccatctgcagctgcttctactgcttctgctgacccagtggtggctacttcatcgtcgctcttctctcccgacgtggagcaccgcaactttgatacctttaacgccagtttcgccaagtacgagcagcgaaacagcactgctatttttgcagatgaacccgagctggaagacctgacagtggagctggagaagccggcgcccactcccacagcacgccccaaaccgcagccacgtgctacggccgatctgagggcggaggaggagaaggctaaggaagaggctgcacggcaactgcgtgccgaggaggatgcacgcttggaggcagagctgcgtctgaatgaggagcgcctgcgcgaagaagaggaggctatgcagcgagagctggaggaagagaaggagcgccaaaagcagctgcagatggatgagcagcagcggcgtgaggccaagcgctgggaagaagatcagaggcttttgagctttgccaaacgatccacatccctcgaggagccagtcccagagaagcaggagctgaagcatgagagggagctcgtggccaagcaggagccggagaaaacgctggatacggcagagccggagccggagcacaacttcctaacgcccgaacagtcgcccaaggagttccagacgaatggcagtggcagtggcagcggggagcgctgggagaaacgactgggcaaattcaaatacggcaacaagcgagataaatacaacaacgacaacgacagcaactcgcccagtcccaagtctacggagcgcatcataattggtcacgagaagtcgggatcgcatgcggatcgccgctcggagatatccgcccagctggccaagaaatacgagggcaagtcgcgcgaggaactaatgctaattgccaacggaatggagaacgaggctctgctgcagcggcagcgcgtgaaggagctggaagactatctggacaacctgctgctgcgcgtgatggagacgcacccgaagatcctgcagaatccgtattcgcgcaccacgtccgccaagaggtacggcacctggtcgttctggtcgtcctctcgtactagagccacgcccacccactaaccaactgcatgaccctgaccgccggta

SEQ ID NO: 14343 - protein, 832 aa, DROSOPHILA
MWSPTHCSVTVQRARGLLTKGKNGTNNCFVTIALGKEKYQTSVKDKAETSVNWNEECELKIPDQGNRAELTLTCLHRNNLGIDEFLGQATLPLNEMDVYDRPRAKWFKLESKPGKEKKNKERGELEVRIAFVVKSGSLTDLSKKDKHKSSIGQLASSVGGSLLSIGNGEKRRGIKKLAGSLSSKLHIRSKKKNQEAGADDSSSFGGSFASLGTPNSSNGRGQNGGSGRRRGGQRAGEADPGVISEDEDEFVFDNLSHKSSGSSLNIQRIGLQPPPVGTPNFTPRHPSPLLNNGVSGVGSGSAKGKQAVLPATLDEDASIDAEMEQLELDFSVRAHARANANASASGNASTLPPPSKPPRIPLSQVDEQPAAGSLEREKPKEKPAEVESDKDEWASKLYGGGKYLEIGSSNSLKRRSWEDRVPLPASVEEPPPLHSSSSSSSSSSDSDDDDEKPPQAAPPPVPVPASLPVPSAAASTASADPVVATSSSLFSPDVEHRNFDTFNASFAKYEQRNSTAIFADEPELEDLTVELEKPAPTPTARPKPQPRATADLRAEEEKAKEEAARQLRAEEDARLEAELRLNEERLREEEEAMQRELEEEKERQKQLQMDEQQRREAKRWEEDQRLLSFAKRSTSLEEPVPEKQELKHERELVAKQEPEKTLDTAEPEPEHNFLTPEQSPKEFQTNGSGSGSGERWEKRLGKFKYGNKRDKYNNDNDSNSPSPKSTERIIIGHEKSGSHADRRSEISAQLAKKYEGKSREELMLIANGMENEALLQRQRVKELEDYLDNLLLRVMETHPKILQNPYSRTTSAKRYGTWSFWSSSRTRATPTH

SEQ ID NO: 14344 - DNA, 3365 bp, DROSOPHILA
atgggtcaccgcgataaggaggagacaaggattaggacgtggggtcctggctgacgggctagtcctgcgaatcggtgcacactctcttgccgagggtgacagtttcggaaataaatttatggggttaagtgaccactaagttggggctttggcacaatgttagagcttttcgaatatttgctttactgaaaaaataccttaaactaattagtaagccgcagactccaccagaattgggtaaataaacagggcattttcgtgttttgtttttaattaaccttgctttcatacatttttgtcctcaacattgttgggattttattatttccattgatcaaaatttttgacgcctaattgtgttcaaaaaagatgcacctgtattccaataccaatcagtaatagaatgatttttgctaatattaataaacgaatgctatgcttacgggctagtttaatgttaaataattatttcgcaataataaaatggtacaacaaatcactcaattatcaaatgattaagcacgctattaattaacactacaattgcagtgatttatgatagggaaaatgctataatttgcctcgttcaaccatggttattggatttttatttatctgtacacgaatgtgaacttaactgcacgttggaggaggggaataaatgtcggtgttctttttatactttatttgctagccccagccacaaacacacatgcaccgcataaacacggggctttggtgtgttagtgtgtatctaaggtcagcatactcacacagctctgcacttgaatgtaattagaggttgaaaacaaagcgaacgcctatggaaatcacacccaaccacacccccacgaaaatgaaaccacaatgcccgcccaatcccttttcatccctcgatttgaactttcattgtgttcagctgaaccgaactaatgtgaacatttttccgcccgccgcccttttttccgcccctcggccacgacctttgacccgcccacaggtgacctgaagaacaacgtcatcgatatgtccacggatgctttccaggcccgccacaaccacttcatcgatgccatcttctcgaggatcaatcgcattgtttcggaaaactatgatccctatgtggtcaatctaacgggtcgctccgttttgccaaatgccgccagtgggtcaaatgtgaaggccgctaacaagaagcaatcgacgagcagcaaggtcggaggtcacaagaagctgtaagttattacatcaactaaaatttgataatttaaacagcttaaagacaggatattaacttggcctgacatagtatctcttcaaaataagaattcacacagattattaagcatagagtacaggcttaaaacatcttttccaaatgaggaaaaatcaaatattgttataaatgaagggcttaaggagttcaatcaaaatgcgcttcagaaagttctcgtaaatgctgaaaggcagtgtcaaaggcgcaattaagctgtttcgcattcaccaactcgaatttggtccccattgcaggaagaacacgcgctcggagccccgttccgtcaattcgaaccaggaggcacgggaggctgcggtgaagctgcaggagcaattgacgcaattacagtccgagctggccatcaaagccgtggagaagaggcccagccccacatcgcctgccaccgagtccgagtccgattccggatcaccgaaggcggaaacgcgcaccgtttcgggctcaaaaacgggccaaaagaagtcctcgaacaagcagaacacgaaaaaggcgtcgggcctgaaatcaggaaactacaatcagccagcgggggccagcaaggcgggagcctccagcgctggtgcagtggaaaagctgcaaaaggccgagggcaggctctccggactggcatccttgaagcgcgtgggaaatgtcaaggtgatcagcgatgccgagggacgcaactcgacgatcaaggccaagttcacgctgggtcccttggttctgcgggtggagaagtcctttaagaagggcagcgtgaggagcgtgaagagtgcgaccgccaggacgaacgagatgatgggtcgcatcaagttcagcgtgctcgatgatcgggccaccctgatgtccatcaaggtgcagcagcccaagcaggtgagtgactaggccgcattctcgacatttttcccagcgaattctttgaccaattaacctttgacacaggtggaggtggagagcaaggacaatcacgaccgcacccgcgaatttgtgtggcgacgcacgcccaaaattgccaaattggtcaacgagaaactgaaattggcagccgaatccttgtttgccccacagggcgtcgaggttgtcaggctctgagtgctaaaaaaaaagtaaggggtcctgcaggataacagccatttctcactgctctgctcagctgtagtctacgcctaattgtaatgcctaatttatttatttatttaacttatttacccatctatttatcaacccatctatcgataataaatcaattctgaccatgcaatgcttttgtttcatttaaattgccaaataaaaagttgcaattagtttcggcttagctgtgcattaaaattgtgctaatgctaagctttgatttaatgaattctaacactggtctgtcatataatacaaacatatagtttattaatatattttgatgaaactaccattatggcaatctatagtttgtacttaaacaaggctaaatggagataaatggcttaaaataaattttaaaaactgcctgaaatatctatagaattgtactagattttcatcggtgaaatctaagatacctgattgaactactgaacaaactgtggcagtttagctttttgataaatcgtttggaatcatttatctcaatttagtttcaaactcgaaacaatttttatttagttgttgtggactattttgcccactaagattgcaagcatatggatgcgatgtctttgaaagaattttaaaaatgttaccaacatttatttgatattttcttgatatgcttaagccctttttcgttattaaatggccagagttttgccaaaacattaagcccagtgtagttggcaattatctgtgatcaccgggaggaaaatcaggcactgcaaatggctaaaaatattgtccaattctggaagagctcgccttcgttccttgcttttgtaaataaaggtgcagtcatggcggcgtgtcctttggcaacacccctttttcacccgttctcccgccaggacaccaacacatacacacacacacacgtatctgtgtcaggtcgcttgcagttttcattaatgttgcacctgggcgaggagttcgtcgaggtgcaggtgca

SEQ ID NO: 14345 - DNA, 1001 bp, DROSOPHILA
gtgacctgaagaacaacgtcatcgatatgtccacggatgctttccaggcccgccacaaccacttcatcgatgccatcttctcgaggatcaatcgcattgtttcggaaaactatgatccctatgtggtcaatctaacgggtcgctccgttttgccaaatgccgccagtgggtcaaatgtgaaggccgctaacaagaagcaatcgacgagcagcaaggtcggaggtcacaagaagctgaagaacacgcgctcggagccccgttccgtcaattcgaaccaggaggcacgggaggctgcggtgaagctgcaggagcaattgacgcaattacagtccgagctggccatcaaagccgtggagaagaggcccagccccacatcgcctgccaccgagtccgagtccgattccggatcaccgaaggcggaaacgcgcaccgtttcgggctcaaaaacgggccaaaagaagtcctcgaacaagcagaacacgaaaaaggcgtcgggcctgaaatcaggaaactacaatcagccagcgggggccagcaaggcgggagcctccagcgctggtgcagtggaaaagctgcaaaaggccgagggcaggctctccggactggcatccttgaagcgcgtgggaaatgtcaaggtgatcagcgatgccgagggacgcaactcgacgatcaaggccaagttcacgctgggtcccttggttctgcgggtggagaagtcctttaagaagggcagcgtgaggagcgtgaagagtgcgaccgccaggacgaacgagatgatgggtcgcatcaagttcagcgtgctcgatgatcgggccaccctgatgtccatcaaggtgcagcagcccaagcaggtggaggtggagagcaaggacaatcacgaccgcacccgcgaatttgtgtggcgacgcacgcccaaaattgccaaattggtcaacgagaaactgaaattggcagccgaatccttgtttgccccacagggcgtcgaggttgtcaggctctga

SEQ ID NO: 14346 - protein, 324 aa, DROSOPHILA
MSTDAFQARHNHFIDAIFSRINRIVSENYDPYVVNLTGRSVLPNAASGSNVKAANKKQSTSSKVGGHKKLKNTRSEPRSVNSNQEAREAAVKLQEQLTQLQSELAIKAVEKRPSPTSPATESESDSGSPKAETRTVSGSKTGQKKSSNKQNTKKASGLKSGNYNQPAGASKAGASSAGAVEKLQKAEGRLSGLASLKRVGNVKVISDAEGRNSTIKAKFTLGPLVLRVEKSFKKGSVRSVKSATARTNEMMGRIKFSVLDDRATLMSIKVQQPKQVEVESKDNHDRTREFVWRRTPKIAKLVNEKLKLAAESLFAPQGVEVVRL

SEQ ID NO: 14347 - DNA, 3903 bp, DROSOPHILA
aagactaatgttgtgtggccgcgatgatgtgagaccgccgacttaacgatgggctaaagtcggacagatcgaattcaagacactcttctggtcttgaaataaggtttggaactgagcactcgaaaattgtgtttttaaaaattgaatattatttaaagttaaatttttaaattaacttaaacgccataatccgaaaatgtattttacatgaacaacgaattttgcattcccatattcaaattataaaaaatattctaatgaaacacattccctttctaagttatgaaacgcaagtgaataattcctatatcaatttgtctagcagattatgttaattaaatcgattaatgacaaagcttgctctcggtataatatgataatagattttgcatgaggaatgaagcttgatattcaaataaatccataacttgacattatgaaagcggaaagcggttttaataagtatttaagttcatcattcatttgttatattaataaaaatcaatcatttgatatataacgtgagaaaattcgtactcaatttagcttgcagttattttaataactttggttaaaagaaataattaaatactttaaatattgcgtgattttgtaaaccccccgttttaacacatttatcacgaatgcacagcaatcaatcttgttaataccccaaatgcaaacactttagaccagcccaaatgtagcagacatggacggttagagtgtatccgaaaacgtttaagtcgcaaccgcattttcgagtaccgctcaagatcatgataattaagttgtctcgcatacatacataaatgctaagagatatatgtacttctgttagctgtttgtgtgctcaatgcagaagtgttggccatggcttagagcgtctgagaactggagacaattccacatgcctgaccctggatgagttaattgcactgaccgaataataaccccctttttcccgcctccttttctcagactggcgctttccatacccatgaccaatggcgaatacaacaattgttacatgtacgacgtcaactatacggatatacttgcccagggcaaggtgatggccgatcccaagtggccgcaggtcaagtgccgccacggctggtcatataacttcacggaaataccctacgcgacggtggccaccgagcagaattgggtgtgcgatgacgccgccctgcccacctacgcccagtccatattctttctgggcgccatcgtgggaggactgctctttggctgggtggcggatcggtttggtcgtattcccgccctgatcggcaccaatatgatgggtctcctggccggcgtgggcactgcctttgtcagcaacttctgggagtttgctatcatgcgattcttcgtcggattcgcctttgacaactgcttcacaatgatgtacatattgggtgagttctattattatttatttgaaattaaatttaaaacaaaaaatattgtatacttggaatggccttcaattagaatgtgaatatgttcaatgattcactttttcaacaatctctacccttcagttaaccattcttctgaaagttttttgaactttaaaagtcaaattgttgtactcaaagtgaccacgtgattgcagaatgtaaatgtacaaacataaacctctttttgtggagttattaaaatttgtctgacataatgtagaaccagctaactcttaaaataatgctagactgagtttattgtttgtgtttcacttctttccagttctcgagtacgttggtcccaagtaccgcacctttgtggccaatatgtcgatcgctatcttcttcactggagccgcctgccttcttccctggattgcctactttttggcagattggaaactcctggccatcgtgacctctgctccgctacttttggctatattcaccccattcgtggtacccgaatcagctcgttggttagtctcccagggaaaagtggacaaggccgtgggaatcctgaagaaacttgagaagggcaatgggcgtcaggtgccccctcagacatatcaaatctttacggacagctgtaagaggatgcaggagcaggaggcccagaatggcaaatactctgtactggatctctttaagtcaccaagattgcggcgaactactctgctgcttattgttatctggatggccatatccctagtcttcgatggacatgtgaggaatgtgggatcactgggtttggacatcttcttcaccttcaccctggcctgtttcacggagctgcccgccgatactttgcttacggtgatcctggatcggttcggacgccgttggttggcctgcagctccatggtccttagtggagtgttcagcttattggccactgtggtgcccgtgggcatatactccgctgccttggccatcatgggtcgattctttgtaaacattagctataatattggtttgcaatgggcggcggaggtcctgcccactgtggttagggcgcaggcagtggccttcatccatatcatgggttatgtggccagcatcatagcaccatttgtggtttatctggccaacatttcccaagccctgccactgattatccttggaattttaggaattattggtggcttattggcgctcctactgccggagaccctaaatcatgtcctgccacaaacccttagcgacggtgaggagtttggacgtggacaaagcatttgggacttcccctgtctggccaaacaggtggacgacgatgaggatgaaaagagaaacgccgacgtggaggaggtccgatctcaggcttttgtgaggggaacccagactggagcatccctgaatgcctcaacgggtggagaactgagatctagcatcctgcgcagatcgaccaagtcacgcaactccacaaagctctaagatgtacgactaggtaattaattgttacttatagcagccaatattctatagatctaccttgcatttttagcatcaaatagcctctaagtgttgttatagacttttgtgatactagaaataagaaattctatgcgcctctacaaacaataaataaattaaaaatattaaagaaccaaaagtccagttccccaattatcactcaacgagaaacgggtataatgagggtaagaagtaggtaaaatgcatgttaataacgaaatttgttacagaacccgggttctaaaccggaaatcaaattcggcttcgaaccttacaaactctagaaacattttacatttgctaaaattttaaaaataagcccaagaataaattaatagtattaaaacgattaacttataaaaaaaaaacaaattatactttattaattcaaataaaatactaataataaaaatggtaacactaataaaaataaacacctccataaatttgtttctaatttagatcaccatctctaagtacatcttttcggctattttaacgaaaagccccgataaagttatgcaatatatacacgcttaaccgtttatgatcattgtgtttatcagcttctctgcaagtgcaaaatgcaattaaacgttgtatgcatttattggcacaagggtcaacaaccaaatccccatgtaaatatccgattgaactacaaataagtaccgattctccacttacctatataagcgtcaccattcgagtgcatccaaccagtacagccaaaatggcatcttcatccgcttggctagtccttctcatgggcattggcctttctggcgccctggatttgaatttacaaaatagcagtagcaaactcttgacggttctcaacacatctgctccggttcaagagttgctataccacatcgatgtctggcgaaatgaggcagctgctgtggcccaggataatccaacttcttccaacctggaatcagtaattcgctctgaagtt

SEQ ID NO: 14348 - DNA, 1575 bp, DROSOPHILA
atgaccaatggcgaatacaacaattgttacatgtacgacgtcaactatacggatatacttgcccagggcaaggtgatggccgatcccaagtggccgcaggtcaagtgccgccacggctggtcatataacttcacggaaataccctacgcgacggtggccaccgagcagaattgggtgtgcgatgacgccgccctgcccacctacgcccagtccatattctttctgggcgccatcgtgggaggactgctctttggctgggtggcggatcggtttggtcgtattcccgccctgatcggcaccaatatgatgggtctcctggccggcgtgggcactgcctttgtcagcaacttctgggagtttgctatcatgcgattcttcgtcggattcgcctttgacaactgcttcacaatgatgtacatattggttctcgagtacgttggtcccaagtaccgcacctttgtggccaatatgtcgatcgctatcttcttcactggagccgcctgccttcttccctggattgcctactttttggcagattggaaactcctggccatcgtgacctctgctccgctacttttggctatattcaccccattcgtggtacccgaatcagctcgttggttagtctcccagggaaaagtggacaaggccgtgggaatcctgaagaaacttgagaagggcaatgggcgtcaggtgccccctcagacatatcaaatctttacggacagctgtaagaggatgcaggagcaggaggcccagaatggcaaatactctgtactggatctctttaagtcaccaagattgcggcgaactactctgctgcttattgttatctggatggccatatccctagtcttcgatggacatgtgaggaatgtgggatcactgggtttggacatcttcttcaccttcaccctggcctgtttcacggagctgcccgccgatactttgcttacggtgatcctggatcggttcggacgccgttggttggcctgcagctccatggtccttagtggagtgttcagcttattggccactgtggtgcccgtgggcatatactccgctgccttggccatcatgggtcgattctttgtaaacattagctataatattggtttgcaatgggcggcggaggtcctgcccactgtggttagggcgcaggcagtggccttcatccatatcatgggttatgtggccagcatcatagcaccatttgtggtttatctggccaacatttcccaagccctgccactgattatccttggaattttaggaattattggtggcttattggcgctcctactgccggagaccctaaatcatgtcctgccacaaacccttagcgacggtgaggagtttggacgtggacaaagcatttgggacttcccctgtctggccaaacaggtggacgacgatgaggatgaaaagagaaacgccgacgtggaggaggtccgatctcaggcttttgtgaggggaacccagactggagcatccctgaatgcctcaacgggtggagaactgagatctagcatcctgcgcagatcgaccaagtcacgcaactccacaaagctctaa

SEQ ID NO: 14349 - protein, 524 aa, DROSOPHILA
MTNGEYNNCYMYDVNYTDILAQGKVMADPKWPQVKCRHGWSYNFTEIPYATVATEQNWVCDDAALPTYAQSIFFLGAIVGGLLFGWVADRFGRIPALIGTNMMGLLAGVGTAFVSNFWEFAIMRFFVGFAFDNCFTMMYILVLEYVGPKYRTFVANMSIAIFFTGAACLLPWIAYFLADWKLLAIVTSAPLLLAIFTPFVVPESARWLVSQGKVDKAVGILKKLEKGNGRQVPPQTYQIFTDSCKRMQEQEAQNGKYSVLDLFKSPRLRRTTLLLIVIWMAISLVFDGHVRNVGSLGLDIFFTFTLACFTELPADTLLTVILDRFGRRWLACSSMVLSGVFSLLATVVPVGIYSAALAIMGRFFVNISYNIGLQWAAEVLPTVVRAQAVAFIHIMGYVASIIAPFVVYLANISQALPLIILGILGIIGGLLALLLPETLNHVLPQTLSDGEEFGRGQSIWDFPCLAKQVDDDEDEKRNADVEEVRSQAFVRGTQTGASLNASTGGELRSSILRRSTKSRNSTKL

SEQ ID NO: 14350 - DNA, 5456 bp, DROSOPHILA
gtttaaacttggatttgtttctggatgctgtgcaaatatacaattttttgtaaaataccttaaaaatgtagatttttaaaaacaactaagtttttcagcgaactgaggaagtttccaagtacgaattacagttcgaatgggtaaaacaaaaaatgtatttcagcttacatatataatttctttgttttttattttacacgattgaacttttgtgcactatgattcatcgaaacctgtacgaatggcatagtgtacatatattgtgtactacggatattttttaacgacattttgcacactttttgttcttcatatctgaaacttatctctgtaagtcgcacttttgcgctattttcttctctttctgggtggaggcgtagagtccacaactgcgtatacgtattatggtgagtgggtatatacataaaaacaaagtagtaagcatagtgaattggtatccaagtgctatttggaatagggctcagtaccttgtggggttgtggagatgctaggctagaccagacacagctccatttccccactcccacagaaattgcgaaacttctttgatttgatacgcacccgaacagcgatcccagaaagcccttctgctgggtcaacttcttctccgcctcggccatcagctggagcgccttctgttcgttgtcacccatgtcgaggatttatgtccgcctcggcactaattgcatctaagtttaagacttgttcggcttttcagcgagtgtgtgtacgtattgggatcttttttcgagaaaataaaatcaatatgctgacttggtgtgaccgcagaagtggtgccagtgttaccatctcacagcattctcaaataactcatgccagtgttgtgaaatgcaagggctgtaacgtttgttcgttcaaaataattctcagccgcctgaatgcgtcacctacagtctggcaggtgcattttaagaacagctgccctaaacgttgcaaacaatcttttttcagatattttattaaattttatatatattcgcttttagttcaaaagcatttacatattgtatcctatagctacagatatttctggccaaagttgaatatacttgtacacttaaacactttgcagcagtattgtaacttatgtattattttaaatggcgctatagcgcactacgaacgcacaatattacactattacttttataatgtatccagcattaaaattttgttatcagtcacctcggtgaatataggcatttcgaaacacgtttgcttagtttaaacatttaatttgatctctttaaaatgcattaagtgatcggatcgtgtacgaaaaccattaaacagatatattaaattacttttgagggaggcccaacactgacgatgaatataacttaagcagtattttcgatatgaaggggaaggggcaaaaacaaataaattctataaacatcgaacaaatcaatttgaacgggaactacaattttaaaagatgatgggagaggaggatactttctgggctataaatgaagttggccagggcattcgtgaattacgttaaactaacattcggccttataatgatagttgggctggctacgcttatgtgaacatcttctccagcattttcctaagtttctcctgggcatatcggatcttctggtacaagtctttagacacgccgttctccacaatggtcgaaaatcggtaggtgcggaagttcttctcctggtccatataggttatagcactcatgcgcgggcagaggatgagcttcatgtgatctgagaagtttagctaagaaggatagatagttcattaggaccagatgtacatgatgccgatgctgtacaattatacaaacctgcacagaaccgttggtcaaatgcataactacggcacatgttgtacggaaccaggagtgtaaatggggcatacgcgagatttgatcgctctcaatgttcacattgttggcacctgccttcaccaggtgctcgatcatgtagcgcttaaagtacgacagcagcttcatcttcttgtcaagcgacttgcagtaatccgtggtggtcatgtacgtctccttgccatccttgtcgatgaagtgtacgttgatctgattcggcagcaggatcagctttgtggtgtcgttgaacatcacgccgatgccctcatcgcacagctggtaaccaaatccgtacttgtcgctgtagtcaacccacttggatatccagaagagcggctgcgctgcaggatctgtgttctcgtcgcccagattgccttgcagaattcgcggctaaagaagtgaagaggtataagagtcttaaattatttaactaatatagagcaaaaggtacttacctttccgttgataagattagtgagctgctggtacaggctctcgatatcgctgcgatagtcctcgctgtggcggcacacctgcgctgacgcggtaatggcgtcgtgcagattggccttgaggaaggtcgactccagacgagtgtcgtcgggcctgatgccgttcatctccatcagtggcttgcggtgcatcgaatcctcgatggtgtcgttgctgccgatacgcggcgccattgtcagacaagagctgggcaagaacatgggcacctttgagcccttgaggaactcaaagttcagcagctgaccaattgccgggcggctctccggatttggctgcagcatggcgatgaccatatccgccgccggtttccttaagtagctgggcacgcggtactcgcacttcttgattttcgagtacgtatccttcagagtcttggtttcgaacggcggctggcccacaagcagtgtgtacatgacgcagccaatcgaccagatgtccacctcgaaggagtggcccttcttggtgaggatctccggggctatatagttgggcgttccgcataaggtcttttttcgctcgccctcatactcaatgcgcgtggccaacccgaaatccccgatcttcacgtgcaacaaatcgttgaggaagagattgcccagcttcagatctcgatggataatgcggttatcgtgcaagtacttaacgccctggattatctggtaaatgtagtagcggcattcgaactccgtaatgcttttcctacgtttgtgcagctccatcatggactgtaagtcggagaggtaagtgtcatggtggcatattgcagagatgttctattaaactcactcttttcttgcacagctccagcacaatgtagatattctgcgaatcttcaaagtagttgtgaaacttgacaatgttcggatggttaaggctgcggtgaatagttatctcctgggcggtcttctccttctgattgtgtttgatcatcagcttcttggatacgatcttgccggcgaagacgtcgtcggtttccacatcgatgatctcgtaacattttgcaaacccgccctgcataaagcatattaattttgtatttaaaaacattatacaaaaacataaccttatactgtattaaaaacagatctatgataaaactttgcatataggtattttcaagtaaatggcgtttaataaacgtattgatgtctattttacaaacatattctgtataaactttttatccatattggttggcaacataaaattagtaatttatatttaacaatcacatgtttagtacctttgctccaatctgcggagccccttccaagaaaatatttatatgccaatagcacaacgaggaaattgttggttcaactaagttgcaacagttccttttcttgtctatgtaaattcgaagaagccgcgccaaaaaaaaaaactgaacaagcagccaactgcatgaacacacacacacaggctcgtacaagattcccacacacaggctctctttttctctcctgctcttaaaggagagagctacaaaaacaacaagggaatgctcatcagcaaggaaaacggaacgaaaaccgggatgtggaaatggatatgtgtgtatgcgggtgcgtgcatgtgtgcgtgtaggtaaatgtgtgatcccttcgactgatctgatcccgggcatctgcaaatccgcatccggactcaccttgccgaagaaccgcatgcgcttgtaggttttccgctggttgatgtcgacgaggcgatccggaatatccgtgctcttatcctcgggcttcgcggccatcttgctctcctttcttctttactacggactgccccttttgcgtttgcgttcgcctggagttttgcggcgatactcctcgttctgagcctataattccaccggcgatcggctgaaagtgcctcggaaacggagatcagatccacacggttgacaagagaagcggcgatcaaatctcggttttgcccatcgaatgcacgaaaaccaagcacaaagcggagaacgcgccgaaaccgttcgattttttaaatgccaaaatgaattggacgtgaagcgtcagctgaattggtgtgcccgtttcgctggctatcgcacactttctggtatgtatcgcggtattttgttgagtgttgaacaacaaattctatggccgttacccttttgaatttacctactggcgtttactctgttcgaattgagcgcaatattttttcctattgctctgcgcaacactgtgtttaaccgctatttatttgaaaatctacaaaaactaacgttacatttttgaaatttcaaaagggtttcataaattgagtttactaaacagtcaacggtcaactttatattgtagagccccttttctaatttgaattgctgcaaacgttttctgagtaaaaatactgccaccttgtaattgcaggtttcgatcctgatttgtgttaaaaagaaattattagaaacagctatctcaaagccttctatgtttttcagttaaactttcaaataacggttaaaaataattttgataaaaaaaaaacaacactaaaacacacacaagtaaatagaaaaaataatgtgtttacttaataactttattaaataatccccagattttgtttttctacattgatttaataacgactacgaataccccactattggtgtagatttccgtttagattttgactatgcctgctgatatctcgaaggggtcgcttgggttggaggattgtatgttctagaataggtctatttggggtctcttggttattgccatcgtttcgttctctgggattactccttacaagctgccccgttttggctcttgttgctgttctgattttaatgttttgtttttgtttgcgaaagaggccttataagtagaaaaatgtggttttagttcttagttgtcgtcgttaatacataaattattacattaaatatattatcaatagtttagtttcatagttggttgctttgccagtgtacgcagtctctccaaaatgccttgtgtttccgtgtgggtgagtgtgtgcttgtgtgttttaggccgaagaagtggctggtggatctgatcgtgga

SEQ ID NO: 14351 - DNA, 2623 bp, DROSOPHILA
cgaaacgggcacaccaattcagctgacgcttcacgtccaattcattttggcatttaaaaaatcgaacggtttcggcgcgttctccgctttgtgcttggttttcgtgcattcgatgggcaaaaccgagatttgatcgccgcttctcttgtcaaccgtgtggatctgatctccgtttccgaggcactttcagccgatcgccggtggaattataggctcagaacgaggagtatcgccgcaaaactccaggcgaacgcaaacgcaaaaggggcagtccgtagtaaagaagaaaggagagcaagatggccgcgaagcccgaggataagagcacggatattccggatcgcctcgtcgacatcaaccagcggaaaacctacaagcgcatgcggttcttcggcaagggcgggtttgcaaaatgttacgagatcatcgatgtggaaaccgacgacgtcttcgccggcaagatcgtatccaagaagctgatgatcaaacacaatcagaaggagaagaccgcccaggagataactattcaccgcagccttaaccatccgaacattgtcaagtttcacaactactttgaagattcgcagaatatctacattgtgctggagctgtgcaagaaaagatccatgatggagctgcacaaacgtaggaaaagcattacggagttcgaatgccgctactacatttaccagataatccagggcgttaagtacttgcacgataaccgcattatccatcgagatctgaagctgggcaatctcttcctcaacgatttgttgcacgtgaagatcggggatttcgggttggccacgcgcattgagtatgagggcgagcgaaaaaagaccttatgcggaacgcccaactatatagccccggagatcctcaccaagaagggccactccttcgaggtggacatctggtcgattggctgcgtcatgtacacactgcttgtgggccagccgccgttcgaaaccaagactctgaaggatacgtactcgaaaatcaagaagtgcgagtaccgcgtgcccagctacttaaggaaaccggcggcggatatggtcatcgccatgctgcagccaaatccggagagccgcccggcaattggtcagctgctgaactttgagttcctcaagggctcaaaggtgcccatgttcttgcccagctcttgtctgacaatggcgccgcgtatcggcagcaacgacaccatcgaggattcgatgcaccgcaagccactgatggagatgaacggcatcaggcccgacgacactcgtctggagtcgaccttcctcaaggccaatctgcacgacgccattaccgcgtcagcgcaggtgtgccgccacagcgaggactatcgcagcgatatcgagagcctgtaccagcagctcactaatcttatcaacggaaagccgcgaattctgcaaggcaatctgggcgacgagaacacagatcctgcagcgcagccgctcttctggatatccaagtgggttgactacagcgacaagtacggatttggttaccagctgtgcgatgagggcatcggcgtgatgttcaacgacaccacaaagctgatcctgctgccgaatcagatcaacgtacacttcatcgacaaggatggcaaggagacgtacatgaccaccacggattactgcaagtcgcttgacaagaagatgaagctgctgtcgtactttaagcgctacatgatcgagcacctggtgaaggcaggtgccaacaatgtgaacattgagagcgatcaaatctcgcgtatgccccatttacactcctggttccgtacaacatgtgccgtagttatgcatttgaccaacggttctgtgcagctaaacttctcagatcacatgaagctcatcctctgcccgcgcatgagtgctataacctatatggaccaggagaagaacttccgcacctaccgattttcgaccattgtggagaacggcgtgtctaaagacttgtaccagaagatccgatatgcccaggagaaacttaggaaaatgctggagaagatgttcacataagcgtagccagcccaactatcattataaggccgaatgttagtttaacgtaattcacgaatgccctggccaacttcatttatagcccagaaagtatcctcctctcccatcatcttttaaaattgtagttcccgttcaaattgatttgttcgatgtttatagaatttatttgtttttgccccttccccttcatatcgaaaatactgcttaagttatattcatcgtcagtgttgggcctccctcaaaagtaatttaatatatctgtttaatggttttcgtacacgatccgatcacttaatgcattttaaagagatcaaattaaatgtttaaactaagcaaacgtgtttcgaaatgcctatattcaccgaggtgactgataacaaaattttaatgctggatacattataaaagtaatagtgtaatattgtgcgttcgtagtgcgctatagcgccatttaaaataatacataagttacaatactgctgcaaagtgtttaagtgtacaagtatattcaactttggccagaaatatctgtagctataggatacaatatgtaaatgcttttgaactaaaagcgaatatatataaaatttaat

SEQ ID NO: 14352 - protein, 576 aa, DROSOPHILA
MAAKPEDKSTDIPDRLVDINQRKTYKRMRFFGKGGFAKCYEIIDVETDDVFAGKIVSKKLMIKHNQKEKTAQEITIHRSLNHPNIVKFHNYFEDSQNIYIVLELCKKRSMMELHKRRKSITEFECRYYIYQIIQGVKYLHDNRIIHRDLKLGNLFLNDLLHVKIGDFGLATRIEYEGERKKTLCGTPNYIAPEILTKKGHSFEVDIWSIGCVMYTLLVGQPPFETKTLKDTYSKIKKCEYRVPSYLRKPAADMVIAMLQPNPESRPAIGQLLNFEFLKGSKVPMFLPSSCLTMAPRIGSNDTIEDSMHRKPLMEMNGIRPDDTRLESTFLKANLHDAITASAQVCRHSEDYRSDIESLYQQLTNLINGKPRILQGNLGDENTDPAAQPLFWISKWVDYSDKYGFGYQLCDEGIGVMFNDTTKLILLPNQINVHFIDKDGKETYMTTTDYCKSLDKKMKLLSYFKRYMIEHLVKAGANNVNIESDQISRMPHLHSWFRTTCAVVMHLTNGSVQLNFSDHMKLILCPRMSAITYMDQEKNFRTYRFSTIVENGVSKDLYQKIRYAQEKLRKMLEKMFT

SEQ ID NO: 14353 - DNA, 2876 bp, DROSOPHILA
ctgggtgggatagttcaggtagccgagacttgagttggacagacccatggtacccagcgtgagagcagccagaattaggtatgttctcatgggaatgcaacgtggctccggctcaatgttccaaaaggaaccgccgcttatccgatagccctccagccgccgctccaccaaaccgaagccgatgtagtagccaaactggacgagcgtgaggaaccatccgtagggtttgaatccttcgacggtgaagatcagctcctgcagatagccgtacaggatgtacaggaagaagacgccggcgcagctgagcaggaactgagttgtgcgattgtagtaggtgaggtcaaagcaaaggatacggagttccggcggagattccgacgtcgaggacttccgctgcgagggcggcgagtttcccgccgattcgccgccattaatggtgataacgctccccttattatcggtcattctgctgctagcggatgtgtctatatacatatacacactatatagtggctatttcaagattatatttccagggagcccgtgtaattcaatgccacgctgtccgcggagttgtcggtttaaagtgcggatttgtcatgcctcctcggatgctgcattaatcacgggccggcgtggagatttctgttgggtgcaaattgccctggctaaatgtttgtttaccacaaataaactatttttgtcagcttagaactgagatagacgcgcggcgttgccacgttgtggtaataatagaagagagaccggtataacgtggaacaagttggcagctctgctaccaccgtcattctaattggaacttctgctactggcaataaatacatttaacaaatgagcagcgataaaggtttaagccgcttttttgctcaaaaaagcgtatgataagcgctaaaaactacttaaaaagtagtgccgagagtaactcctagtatttgactacatgtcgttctaagaatacaaagatatgggcacactgtcggaaaaaacaagaagaagcagtgaaaagtgccgctgaaaaagtgcaaaaagttatgaatttagtattttacataggataatagtgctaataacagtcgcaaaatggacgtgcaaccgccacgcggtaagtgcagcaattaaaaagtgctgaatataacttaaaatcaagctaattttgtgcccaagtcgattggcatgcacatgtgtacacatacaaacaaacaagcgcacgcacaacctttgatatgctcacattttttgcaaaaaccatttgctttctatttgcagatgccagtttacgaaatattatcgacaaactggcggagtttgtggccagaaatgggccggaattcgaggcgataaccaagcagaagcagcagaacaatccaaagttcgagttcctctacggcggggagttcgccaactattatcaattcagggtggcagcggaacaagctcgtgagtgcgttctaaattggtggaaaataacccctataatctccttttaacacccaatacagtgctaaagcaacaggccattaaccaacaactgccaccaggtgctccatccggccactacatgcaacatccgccgccaatgcagcaatcccaaccaccgggcctctatccgccacccaatcagcagccaccgcacccgcccgaaaccgcacaagacaatatgcaacagcaaacacagcactcctggccgccgaactccggcaacggtgggccgccaaacaatcagcaggccaatggcaatcccatggccatgaatctaacgtcacaactggaagccatcaagatgcagcagaagtcgctgcgggaacagatccagcaatccgaagcgaatctctccgcacagcacacggtaatttgaagttggaaataactgggatacctctatatgcccacctttgcaagcctttttccgaaagattagagcagctcgagtgtataaagaaaagatttcaatatgatttcatgttgaatgttggcctcctctggcaaaaatttaaagaagcaaattggtttcctttttaaactaaatacccacctaaaagttgcttttatagtctgaatataagaacgtgtttgcttcttcgaatttttgacctcccttttaaacgacccaatcgaatgtgaatatacctcgattttaagccagaatgcttttaattattttcttaagagagaagataacttgtataacccttatatactttcggacttaaatgatttccaaagatattgtcatagactcatagatggcagttttgtattccctagtttttgtaataacaactctggaacaagagttcatcaaatggtgtttaatattaataattatgaactgcttttgtggacttttcactctataagtactgtgaactaaattctttctaataagaaggacatttcttattgcttgtcgctattgaatttccctgtaatggaagtgacttccctcttgaaattgtttcttatgaaactaatccacgaattcctcagaataatcaatcctgctctcgacccttttccaaatgttttttcaatcgatctactcagttcttgttctccaagtgcggataagataaagttaaagtgtactttcagcaatatcaaactacaatctatatttgtcattatttttactatttaattaacaatttacaatgctacattaaatttttgctttattgtattttttgaaacataaaccaaaaaaaaaaaaaccaaatcaaaccactcttcataccaactgacaaaactgtataaaaacaaaaaaaaaacaaatcctaaaatcaaatttgttttgaaacgcttgtcaaatgaatcccaaaatgcgaatatgcatgcgaacaaacctttgtgtgcct

SEQ ID NO: 14354 - DNA, 650 bp, DROSOPHILA
gaaaaaacaagaagaagcagtgaaaagtgccgctgaaaaagtgcaaaaagttatgaatttagtattttacataggataatagtgctaataacagtcgcaaaatggacgtgcaaccgccacgcgatgccagtttacgaaatattatcgacaaactggcggagtttgtggccagaaatgggccggaattcgaggcgataaccaagcagaagcagcagaacaatccaaagttcgagttcctctacggcggggagttcgccaactattatcaattcagggtggcagcggaacaagctctgctaaagcaacaggccattaaccaacaactgccaccaggtgctccatccggccactacatgcaacatccgccgccaatgcagcaatcccaaccaccgggcctctatccgccacccaatcagcagccaccgcacccgcccgaaaccgcacaagacaatatgcaacagcaaacacagcactcctggccgccgaactccggcaacggtgggccgccaaacaatcagcaggccaatggcaatcccatggccatgaatctaacgtcacaactggaagccatcaagatgcagcagaagtcgctgcgggaacagatccagcaatccgaagcgaatctctccgcacagcacacggtaatttga

SEQ ID NO: 14355 - protein, 182 aa, DROSOPHILA
MDVQPPRDASLRNIIDKLAEFVARNGPEFEAITKQKQQNNPKFEFLYGGEFANYYQFRVAAEQALLKQQAINQQLPPGAPSGHYMQHPPPMQQSQPPGLYPPPNQQPPHPPETAQDNMQQQTQHSWPPNSGNGGPPNNQQANGNPMAMNLTSQLEAIKMQQKSLREQIQQSEANLSAQHTVI

SEQ ID NO: 14356 - DNA, 5586 bp, DROSOPHILA
caggcccaaacaagacaggcaaaaaagtgtacagcaccccagttccacttccaacccacttccaccacttccacttccacttcccggcaacaggacaacaccccctggcttggtttgagttgagctgacagccgagctgtcaaagcggattttagagcactcgctgccaggtaaacaacaacagaaaagccacgtatataggccaaagaatatgggatgccctttagttggtgaaaattgtttatagagaaatattaaaaaaaatgtatattaaaaaaaaaagtatgttaaacttggtcaattctaacagaatattcatattattgaatctgctgtgctagtaaaaatacctaatataaaacaaaacagtatttctaaaaacttgtacattacaaatcaaaattaaacatttatccaaaatggggaaaacaatagcggtaatattaaaattattatttggccaaataaattaaacaaaaatattatgagaatattacataggtgaaccaaaaagtttttgattttcattgaagatagccaagctaattggtaagttccttataccccactaaggctttgcagagcaaacacctgtcatgggttgagtgttggccaaaagggtttaactacgtatctcacttgtttctgttttgtcgttgttggtttgttggcggtgttgcttttgttattgctattgctgtggcggtttgcccttggccaaaaatgcattgtgttggcatatgtgctgctgctctgcggctaaaattttgacaagcgccagctcgacgaggcaggcgaaggacatttagggaccgaaataccttgtaaacatatgcgtgtgcttatacttaatttcacctaagcgctgggcactgaatttaagtgataaatgctgccaaaacttgatgaaaggcgtgacttcggaggtgtttgtttaggatcattttactcagtggctcatattttcttgggtaactgcaaagccttttgtttcaccaaattacaaaggaataaagtccattttcgtcatcttttcggctggatttccatcatcatcaacaaggagatgtacatccgagtactggatcttatcaagttcggcataaacgcttttgctgatgcttacttcggggtactttaaagaagtatttaaatgtagcaaataatatagatcgctaaatatacttaccagtttagccaccttccaacattccaaggccgtcttatttcggctcagtcgtaggttaatggtagctaaatatccccagacatctggtataaagatgtcgacttctgtgcaacgcgatagatacggaatggcttcctcaagacgattgagctgttggtgcgtatgccaataaacagcatattgaagcacttcaataaaaactcacatggtacagtgtcaggcccattccatagttggctataaagttcttgcgtctggcaggcaaacagatattaaatgctttttcggccagttcatattgttttctttgtaaggctaattgaccgagacgcaggaaactcaacttgaatagcaagttatccatcggatctactacagacaatagttcctgaaagtatttgagagcttcatcacagcgcccacgggaatactctacactgccgtttatgtgaagttggtaacagcgctagacaataatttcaacttaaatataaatttcgttttgcataaaaaactcatcttaccttcaactttccatacacactgttatccgtaggcatctttatgatctggaacttatcatcgatctggcgctgcagtatcttcaaagtggttctaataagatagacctcagcttccgtaaaacactgttcaatttcggaaaatatgacttcagcaaatgcgtatgctcctaggcgggcaaagagtttaaaaacaggataaaactgagtattcatcggggttgaagagctcttcatttcaaagtcgaccggcaagtaaagttcataaagggaagtaggagtatagtttagagccttgggtgtaattttcgttagattctgaaatttccagcgcgtcaactccattccgggtaaataactatgttccttgtaatagcagtacaaaaggatccagatttccgattccagactgttcttattcgcaaactgacgcagactctcgatcatattagatttgaccgtacttacgacctcttcgtcggttgatcttagatccatcatatagttaatatagagctgtaagatcagactgcgctatagaagtaaaataaatgtataaataaataaatacaattattagggcacaagactaaatgcattaagctgtattggccctgctcagatccgaatccaaaactcacgtaaagtaatatccactccaatcggttgttcggggtttcgtgaagtatctcgccgcttgttcaaactgcaggttttcgacactattcagcagggttacaaagtcgaatacaatgcggttggtggtgctgtggtcaatctcatcgtacatgtgaatggccaagtctcgttgaccagtgttgctgaccagtcgcatttcattcatcatccgattcaagccatgttcctcttgatcctgattcgacgttgtgacacaattatttttccaacagcaggcggtaaatacaccctcaatgcgatccatcagttccttatacatgtgcgtcagcatttccttatcgattaatggataacttatttaatacaattacattttcgattagatacccactctgaattcaatgttcgtttttgttggcattcgtacgttaaagtcgcagccgcatattttcagcaccagattacagatgttccccagctggcagcaaaagaactcctttctatcattgatgtcttgcacatctcgcttgattatgaactcgattgtatcggttataagatcatcaaaggctcggtagagctcgagtagcacatcaccatccgtctcgtcctctttgaggaactccatgtcgaagcagcgtcgcagctttgcccttttgaggaggctctcattgtattggtccaggggttcattgcgctcgcaaatgggctgaaagaagcaaatcttgaaggtgcagaacattgggcccattaccaaggtatccctgggaaggcttagcttgatggatggctcgaaaacgggattaagcctacatgcgaagcggcaataattcactggggaaggtaatgcggaaccatgctatcgtattgatatctaaacttaagagccctcacctcctgggtaaccaaagatacttggattaatgactccttcgtacaggacattggtcggtgtctcctggtacagttgcagcaacaattcatagtcattgtgaactacagcctcctcgaggattttcctcatttgctcgttgagaacgaaacggtgcagagagttgttgatcaaggcaaggtccgaaacaggatcaattttatggatctgaaagtcaacgtcctgttcccaaagtagcatgcgaaaaagctttggaagcttcaccctcgaattggtctccatttggttaaaactgaagttcatgttgaggtgcagatcccgcttgatgttctcccacacgatgatcgtgttctggtcactgatgatctgtgaaatgaatcctgagtacgtgcacaagggaaccaccctaaaggcaccatccgactcctcaggctgcgttgaacgaaaagaaacactgaggcccagttcagcggattttgagtggagatcctcgggaacattgtatatcgattccagggtcagaaaggccaagttcgtaaagttaaagttcttcaggatgggcagaatggaatacatgtgccaaacgctgcacgttgtcattttatcatttatctttttcgaacgatactccgggtacagatagatggtgatgtcgctgataaagcgacgtctttggaaaagctgtagaagatcgcagtggccacgggataggagttccagtcgctcctccgaaaaggtacctccctcaccttcctctccaccttcctcaccatcacgttcggatgaccacttacttgatctctcctttagaacattttctttactctccaaggcatctgtgattaattgatttatttcacgcgaagaggatgtgcgtccatgcttccttgacttccctttcccagatcctcccttgcggcgcctgggaatcctttgatagagggatatcaacagcggctgatcgctaaacgtgttcatgtcctcgatatcgtcctgcatcacacccattgcaaatacgggcttcttcagattgaactcatgctgatagattatggtatctgtcgtgtagcgctcctgcatcttctgcagtgtgttcttcggatggtagaggtgcagctccagaggattccccgtttcgggtagcttgctcatttcgttcagctggatgtagaggaagacccgttgctgtggggcctgcctctggtccaaaggaatctccaccgttcgctgctcgacagccttgttcctgctaatctcgttacctcctgctgagcgcctccgttttgtgagccgagcagttcgacggagggtgtttcggatctttctatccattgtgaattgaaataaaggtgtgctacagaaaactggttttatctttagatcgagctcagcagctgttgacagccgaagcgctgatttctcagtttttaagaagtcccaatacatacacaagtgtttgcaaccacacaaatcctatcatttttcagtcacacgcagagaatagagcattttgacggccagaactaattcaaaatgttggaatgcggttacacatatcacatatttaaatttaagaaaaacagcctgggatacctccttcacatttaaaatgcgtatccaattctcagacattcacccaaaccatgcagaagttgaagaggttacttagccgccttcgaagactctcatctgcgtatcttttattcaaaaggaaaaaatgttttatgtattctgatgccgacgccgcgggattctaaacaataaacacttcaacaagtcgcctgctcgtttccattcgccctcgcaaaattccgaacggtctggcctaaaaaatcgtatggcatttcgacgggaatggcgggggctgtgtgggttttattactcccagacatataagttttattagacacggtagggtcgtaaaccaaatttcggcaaagtgtcaagaagcaacatgaacaggttgagaattaagctcgccaagttttcattggtagatctaatttaatcagtcatcgctttgaattaggagaattcttagaatttacccagggcatggaaacacttattccgcacatttctctactgctttatccacacaaaagccaaaacaattaaacatcaagcttccagttggcaattaatgaatgcgaaagagagacgaagcgtaaattgatttaaatgcgcagaactgaagccaaaagaaagtcaatttatttaattttgttttatgtctcgctgctccagtgactttgcagttgatagttgtcggttttgtggcgctttttgttggttgccatttttttttttttttattgttttagcgaaacggtcaaagtcagtcc

SEQ ID NO: 14357 - DNA, 3070 bp, DROSOPHILA
atttcaattcacaatggatagaaagatccgaaacaccctccgtcgaactgctcggctcacaaaacggaggcgctcagcaggaggtaacgagattagcaggaacaaggctgtcgagcagcgaacggtggagattcctttggaccagaggcaggccccacagcaacgggtcttcctctacatccagctgaacgaaatgagcaagctacccgaaacggggaatcctctggagctgcacctctaccatccgaagaacacactgcagaagatgcaggagcgctacacgacagataccataatctatcagcatgagttcaatctgaagaagcccgtatttgcaatgggtgtgatgcaggacgatatcgaggacatgaacacgtttagcgatcagccgctgttgatatccctctatcaaaggattcccaggcgccgcaagggaggatctgggaaagggaagtcaaggaagcatggacgcacatcctcttcgcgtgaaataaatcaattaatcacagatgccttggagagtaaagaaaatgttctaaaggagagatcaagtaagtggtcatccgaacgtgatggtgaggaaggtggagaggaaggtgagggaggtaccttttcggaggagcgactggaactcctatcccgtggccactgcgatcttctacagcttttccaaagacgtcgctttatcagcgacatcaccatctatctgtacccggagtatcgttcgaaaaagataaatgataaaatgacaacgtgcagcgtttggcacatgtattccattctgcccatcctgaagaactttaactttacgaacttggcctttctgaccctggaatcgatatacaatgttcccgaggatctccactcaaaatccgctgaactgggcctcagtgtttcttttcgttcaacgcagcctgaggagtcggatggtgcctttagggtggttcccttgtgcacgtactcaggattcatttcacagatcatcagtgaccagaacacgatcatcgtgtgggagaacatcaagcgggatctgcacctcaacatgaacttcagttttaaccaaatggagaccaattcgagggtgaagcttccaaagctttttcgcatgctactttgggaacaggacgttgactttcagatccataaaattgatcctgtttcggaccttgccttgatcaacaactctctgcaccgtttcgttctcaacgagcaaatgaggaaaatcctcgaggaggctgtagttcacaatgactatgaattgttgctgcaactgtaccaggagacaccgaccaatgtcctgtacgaaggagtcattaatccaagtatctttggttacccaggagtgaattattgccgcttcgcatgtaggcttaatcccgttttcgagccatccatcaagctaagccttcccagggataccttggtaatgggcccaatgttctgcaccttcaagatttgcttctttcagcccatttgcgagcgcaatgaacccctggaccaatacaatgagagcctcctcaaaagggcaaagctgcgacgctgcttcgacatggagttcctcaaagaggacgagacggatggtgatgtgctactcgagctctaccgagcctttgatgatcttataaccgatacaatcgagttcataatcaagcgagatgtgcaagacatcaatgatagaaaggagttcttttgctgccagctggggaacatctgtaatctggtgctgaaaatatgcggctgcgactttaacgtacgaatgccaacaaaaacgaacattgaattcagagaaatgctgacgcacatgtataaggaactgatggatcgcattgagggtgtatttaccgcctgctgttggaaaaataattgtgtcacaacgtcgaatcaggatcaagaggaacatggcttgaatcggatgatgaatgaaatgcgactggtcagcaacactggtcaacgagacttggccattcacatgtacgatgagattgaccacagcaccaccaaccgcattgtattcgactttgtaaccctgctgaatagtgtcgaaaacctgcagtttgaacaagcggcgagatacttcacgaaaccccgaacaaccgattggagtggatattactttacatcaaccgacgaagaggtcgtaagtacggtcaaatctaatatgatcgagagtctgcgtcagtttgcgaataagaacagtctggaatcggaaatctggatccttttgtactgctattacaaggaacatagttatttacccggaatggagttgacgcgctggaaatttcagaatctaacgaaaattacacccaaggctctaaactatactcctacttccctttatgaactttacttgccggtcgactttgaaatgaagagctcttcaaccccgatgaatactcagttttatcctgtttttaaactctttgcccgcctaggagcatacgcatttgctgaagtcatattttccgaaattgaacagtgttttacggaagctgaggtctatcttattagaaccactttgaagatactgcagcgccagatcgatgataagttccagatcataaagatgcctacggataacagtgtgtatggaaagttgaaggaactattgtctgtagtagatccgatggataacttgctattcaagttgagtttcctgcgtctcggtcaattagccttacaaagaaaacaatatgaactggccgaaaaagcatttaatatctgtttgcctgccagacgcaagaactttatagccaactatggaatgggcctgacactgtaccatctcaatcgtcttgaggaagccattccgtatctatcgcgttgcacagaagtcgacatctttataccagatgtctggggatatttagctaccattaacctacgactgagccgaaataagacggccttggaatgttggaaggtggctaaactgtaccccgaagtaagcatcagcaaaagcgtttatgccgaacttgataagatccagtactcggatgtacatctccttgttgatgatgatggaaatccagccgaaaagatgacgaaaatggactttattcctttgtaa

SEQ ID NO: 14358 - protein, 1018 aa, DROSOPHILA
MDRKIRNTLRRTARLTKRRRSAGGNEISRNKAVEQRTVEIPLDQRQAPQQRVFLYIQLNEMSKLPETGNPLELHLYHPKNTLQKMQERYTTDTIIYQHEFNLKKPVFAMGVMQDDIEDMNTFSDQPLLISLYQRIPRRRKGGSGKGKSRKHGRTSSSREINQLITDALESKENVLKERSSKWSSERDGEEGGEEGEGGTFSEERLELLSRGHCDLLQLFQRRRFISDITIYLYPEYRSKKINDKMTTCSVWHMYSILPILKNFNFTNLAFLTLESIYNVPEDLHSKSAELGLSVSFRSTQPEESDGAFRVVPLCTYSGFISQIISDQNTIIVWENIKRDLHLNMNFSFNQMETNSRVKLPKLFRMLLWEQDVDFQIHKIDPVSDLALINNSLHRFVLNEQMRKILEEAVVHNDYELLLQLYQETPTNVLYEGVINPSIFGYPGVNYCRFACRLNPVFEPSIKLSLPRDTLVMGPMFCTFKICFFQPICERNEPLDQYNESLLKRAKLRRCFDMEFLKEDETDGDVLLELYRAFDDLITDTIEFIIKRDVQDINDRKEFFCCQLGNICNLVLKICGCDFNVRMPTKTNIEFREMLTHMYKELMDRIEGVFTACCWKNNCVTTSNQDQEEHGLNRMMNEMRLVSNTGQRDLAIHMYDEIDHSTTNRIVFDFVTLLNSVENLQFEQAARYFTKPRTTDWSGYYFTSTDEEVVSTVKSNMIESLRQFANKNSLESEIWILLYCYYKEHSYLPGMELTRWKFQNLTKITPKALNYTPTSLYELYLPVDFEMKSSSTPMNTQFYPVFKLFARLGAYAFAEVIFSEIEQCFTEAEVYLIRTTLKILQRQIDDKFQIIKMPTDNSVYGKLKELLSVVDPMDNLLFKLSFLRLGQLALQRKQYELAEKAFNICLPARRKNFIANYGMGLTLYHLNRLEEAIPYLSRCTEVDIFIPDVWGYLATINLRLSRNKTALECWKVAKLYPEVSISKSVYAELDKIQYSDVHLLVDDDGNPAEKMTKMDFIPL

SEQ ID NO: 14359 - DNA, 3668 bp, DROSOPHILA
caccatatacgaccaacacacctgttgcttctccgccaggcggtaattttgaggtgcttggattcagtataccaccagactataaacccacgcctagtgctccagccgcctcttccactggcggcattgggtggaaatagggaccataacttaaccattttgtattctacaccttaaggcatttttaaatatacaagaaagcccgcataagtggcaacgctgtgcatgtgacagctatattaatatcgatagttagtatcattttaatcctaaatggccttttattaactcgagtataaacatagtgatctggtttcaggaattatgcttactattaaaaaatatttatgttcccaattaagaaaaccctaaaactgaattttagcttctagctattttcttactattgttgtcaaccacgatagccgatagttgccatcgctgttcgctaaaagctcatcgccagcggctcgaacagctgattccgtgcacttggcgacgtaatttagtttgttttgttgttgttgcgtagaggtttgaagcagcgcgtcttgaattcggaaaaccagtttgtggaagtgggaagcggccaacttggacagcggcagcaggggattgacacaactgcaacggcatctcaacggcggcgctattacaagtctggcgaaaagaaagttttgacgcaatccacgggccgccgcctgtaatgaagaagcgtcggcgccgcagtcactgctgcactctgcccgcgaacggacgcatctgctccaggtgagctcagattgtagtgcgctgctctggacattcagcaacatcatcatcatcaccatcgagcgtgttgccaatgcctttgtctctttatctgagcagcagcatcggaattttgggaactggacaacggtcgccgagacatcgaacaacaaaagcggaaaaaagtgaaatcgctgataaacccgaataccaaccgagctattgtcaatcaatgaacggccgtttgaacctggagtcaacttgggagctctgcgaattggcgggcaattggccataaccgaccgagataatagtgaagtaatcgcagagacatacgcacgctccgtggagcatgatacttgtaagtctcatcctcagatgaattccactcctactatttcccaattcctgtctacgcacttgtacacaacaatttgtccatcgactttgatgaatgtgtgtaaacaagtcgaagtttgcgccctgccgcacctctaaaacgttttgaatgaaagctacaggcaagctttgctaagtcggattttcgaaaactccatctttgataccagtaaaacctagcatatttcatttttatcaagaaacaatcttaagctttctttttaacagcatctaccttgaatttcacaagagtcaagtaaattacaagtaaccttcaaaacaaattctttatgataatatataagctatacctattagatccagcctcatagaagttgctaagtccgagttaatagttgcatctacatagttccgactgtaataacgtctccacctgtctgcgtttctttattttcagaaatgccattgaaaagttggcagtcgcagcaataaaagtgaaatccgcacgagcaaacatacgcacacgaaaagcaaaaccaaaggtagctccgacgcagacatggcggtaaccacaggctccaccagtgaggcgaccacaaccacaactcccgttccgcgacgcaagcacagtacgcgggagcagctgcatcaaatgctggccggtggactttcggcggccattacgcgctccacctgccagccgctggacgtgctaaagatccgcttccagctgcaggtggagccgctgggcaagaacgccgccaaggagggaccaggagcccttacctccaaatacacatccatcggacaggcggtgaaaaccatataccgcgaggagggaatgttggccttctggaagggacacaatcctgcccaagtgctgagcataatgtacggcatttgtcagttctggacgtacgagcagctcagcctgatggccaaacagaccagctatctggcggatcatcagcatctatcgaacttcctgtgcggcgctgcggccggaggagcagcagtgatcatatccacgccgctggacgtcatccgcactcgtctgattgcccaggacaccagcaagggatacaggaatgcaacaagggctgtgtcggcgattgtccgccaggagggacctcgcggcatgtaccgcggtctgtcctccgccctgctgcaaataacgccgctgatgggcaccaactttatggcttaccgcctgttcagcgactgggcgtgtgccttcttggaggtgagcgatcgcagccaattgcccacgtggacgctgctgggattgggcgcctcctcgggcatgctatccaagacgatcgtgtatcccttcgatttgatcaaaaagcgactgcaaatccagggcttcgagtcgaatcgccagaccttcggacagacactgcagtgccacggagtctgggactgtttgcggctgaccgtgcgccaagagggcgttaggggcttgtacaagggcgtggcccccacactccttaagtcaagcatgacgacggccctgtacttcagcatttacgataagctcaagcaggtgcgcttctaggtcggacttggagtcggggttaatggcgtctgaaagcaattgtgcgcccaaacggaatctacactgtattttctatttttatatatatttaccgcagcgcgtaaataatattaagacttaggctaactctgttgattagttttcggttgtgcgtatcttttctgggggttctgtttatcatagaccaattgacttggtcagcgctttagtacacacacgaatagttggcgcaccagttaagttatagattgtatgtgctaggttgtagttcattattcggcagagcacctctattcacagacacattcaaatttttatttatcttttgtttgattcgcaaacgaaacgactgcgctggcagttcatttgatatttaattaatattattacacctaagtattcagggaatttaataaatttgactacatcacaacagtttaataacttttatttttaatgagtattgtccctgcctcctaagatttaattcttcatatttttctcataatctttaagcttaaatgtttcttccaattggaataattagttttatgaacatgttattgagttgcagctgttaaactccaaacataatcaatgttaagaaaagctcgctgctgtgagcttttttggttgtgaaatttaaacggtgatgcatgcagtgtataaaaggaaatgtatctttgggaacaacaatacagttacttcagcgatttcccgtccggagagaaaatggctcttgtgaagacgtacaccatcgacaataactccattccatggattctgtggctaccgccattaacggaagtggataggaaatcgccgggtgggaggttcacatttgatgggccaaaggtggtggcgtttcactttgttaagaaccggcacggagacacgttggacaagtggataagtctgctcgatgagttggcacaggagtacgccggtcgtatattgttcggattgcgtgacatctccaacatcggggagttcaatccga

SEQ ID NO: 14360 - DNA, 1212 bp, DROSOPHILA
ctggagtcaacttgggagctctgcgaattggcgggcaattggccataaccgaccgagataatagtgaagtaatcgcagagacatacgcacgctccgtggagcatgatacttaaatgccattgaaaagttggcagtcgcagcaataaaagtgaaatccgcacgagcaaacatacgcacacgaaaagcaaaaccaaaggtagctccgacgcagacatggcggtaaccacaggctccaccagtgaggcgaccacaaccacaactcccgttccgcgacgcaagcacagtacgcgggagcagctgcatcaaatgctggccggtggactttcggcggccattacgcgctccacctgccagccgctggacgtgctaaagatccgcttccagctgcaggtggagccgctgggcaagaacgccgccaaggagggaccaggagcccttacctccaaatacacatccatcggacaggcggtgaaaaccatataccgcgaggagggaatgttggccttctggaagggacacaatcctgcccaagtgctgagcataatgtacggcatttgtcagttctggacgtacgagcagctcagcctgatggccaaacagaccagctatctggcggatcatcagcatctatcgaacttcctgtgcggcgctgcggccggaggagcagcagtgatcatatccacgccgctggacgtcatccgcactcgtctgattgcccaggacaccagcaagggatacaggaatgcaacaagggctgtgtcggcgattgtccgccaggagggacctcgcggcatgtaccgcggtctgtcctccgccctgctgcaaataacgccgctgatgggcaccaactttatggcttaccgcctgttcagcgactgggcgtgtgccttcttggaggtgagcgatcgcagccaattgcccacgtggacgctgctgggattgggcgcctcctcgggcatgctatccaagacgatcgtgtatcccttcgatttgatcaaaaagcgactgcaaatccagggcttcgagtcgaatcgccagaccttcggacagacactgcagtgccacggagtctgggactgtttgcggctgaccgtgcgccaagagggcgttaggggcttgtacaagggcgtggcccccacactccttaagtcaagcatgacgacggccctgtacttcagcatttacgataagctcaagcaggtgcgcttctag

SEQ ID NO: 14361 - protein, 332 aa, DROSOPHILA
MAVTTGSTSEATTTTTPVPRRKHSTREQLHQMLAGGLSAAITRSTCQPLDVLKIRFQLQVEPLGKNAAKEGPGALTSKYTSIGQAVKTIYREEGMLAFWKGHNPAQVLSIMYGICQFWTYEQLSLMAKQTSYLADHQHLSNFLCGAAAGGAAVIISTPLDVIRTRLIAQDTSKGYRNATRAVSAIVRQEGPRGMYRGLSSALLQITPLMGTNFMAYRLFSDWACAFLEVSDRSQLPTWTLLGLGASSGMLSKTIVYPFDLIKKRLQIQGFESNRQTFGQTLQCHGVWDCLRLTVRQEGVRGLYKGVAPTLLKSSMTTALYFSIYDKLKQVRF

SEQ ID NO: 14362 - DNA, 7060 bp, DROSOPHILA
tcgccataatctaaatttcatgatcatatcctcttgaatataaaaaaatatagctttacaaataaaaatgtcttgactaatgcttatagatatactatgttttcaaatggacttctataatatgtactaagcgaattgtttaaaatatgttcttccctttaccgaaataaattcaaattgcatatacattttaaataaacttgtagttattttcgcactctttattcatgtttttagagcacagaaaaatttctcgagctcaaactaataaattcccaacgtcccattgcaataaccttgactcaaggtccatgtccttgcagataaataagaaaggaaaaacaacgggatgcaactgcagaaaaaaaacagagacataaaactcactcaaaacagaattgagtgagacacggaacgtgttggaaacgaaatggaacagacggaagatggaagaaaacgtcagaagaggagataacaggaaatggaatgcgacgacaacggcgaaaagttgtttaaaaaaaaagaccaagaaaaaccgcaagcaaaacgttggcacttcataaatgggcgagaaagagaggcaaaaataaaaagaaagagacctcgctatggagaaatagagaggtgcgagggagaaggccaaaagcgccgacatttttaattgtaaatgagttatgacgcgttcgtcagagagagaggtgaggcgaagaaaagagaggggcgcaagttgctgacagcgccgcctttctctctgtcgcacgttcactcccccgccgattttccaattggaaaacgagagagcgagtggcgttttcactcagagtgtgcggctatagggctatcccgcttgcactcgtactggcgcggctcgctgtagggtggtctcgcttgcacacatagggaccataagaggaataactggtttcccgagttttgcgcctgccgtcgtttttggcttctcagcggcaacattttcctgacacaattcagttcgtcgtcgcctgccttccgttgcgcacacactcagtccgcgagattctcagttcgcgtgcgccaaagataagcaaaagaaagcaagagagatataaagatacaagatacttacaccttgaaacatacacatacccctcgagttaccaaagctaaagatgcatctagctttataagtgccaagtgttgaaaagtgaccagatacaataccccaatacctttccaaggtattccctagttaaagccccattaagaacaacatcatacccttcaaaatgctggttggatctcatccgtatttgtgcaacggggtgcccgccgcccctgcagcaccaaatgccagtggacagacaacaacaacggctagcaaaagtgccgccggctcagcgacggacttttccatcgccgccatcatggctcgcgaagatgcctccagtcgggagtcctccattcgcagtgcaagtaagttcagatacatattgaaaatatccttaataagaaaggaattctgtgggaagcggcagaatcattaatcggttgataggaacaatttgttcttaaaaatatatttttatgcattagaaatttaatgccttgaatattaagcatttcgattatatagtgatttttaaacaagatttttttaggcttaacagacttacagcaagattcattgatgagatgtagaatatctttaagatactttcatttctgtagtctcaaataccatagggtacttttgtttagaacttcatttgacaagctataagttccctaattcaacaatctttaatcatagtaggtagttgtaactttagatattcacttatctcctagcagtgctttctgtacaaaaacttacttaacataccagcacacaataactagaaattgctaaaacaaaaatggaatttttatacgattaattcaaattaaacgtgattaacaactcaacgcccaagaagagaaccgcaaacttgaccagcgaatgcaaacattattagccacaagacaatcgctaattgattgcacaacaaatctattaaattactgttgtcgctttgggtgcgcagagttccatttaattgctaatgacaattagcaggcgttccggccacgttaaaaaagaaaaaactagttctctctggccgacggcattcgcaattaagtcgagccaaagatcgcgaatccagatatttgttagcaaacacttgcagcgctcttttgtggccgatattatgataatatgcaaattgtgcacagcatctaatcgcgcggaattcatatttaacaaaggctgctaattatgttaattaattttcaacaatgtgcttcattttattaattttacgaggcgcagaaaattagcgacggccgaaatcaaaacaaaaacgctacgaggtgttcgtattttacgatctctttatcaaatatgcagcttttttaatttcatattttgttttgttttttttgttttctgtggtcgctttccgttttccgtttgcttactttgcattttaacacctaccgtctgggctcacctgcaaaaaaaccgggctgcttagttctccccatcattttgttaccattttcggcttatggaaaatggaaagcgtatgtgagagttcgcccatggataagcccaaaaatattattcatcaacttttgcgcacacaccttgaacgaaagccctccgcttttgtttatgcaatggaaaagagcaatcgcagctagagtttcgggctgtttaattgccgatttgtgttcagtttgacaattaagccagcggtcgtcgtcgcactgtctcattgcaattgaaacgcgaagcgaagcggaaactccaagaatatgagacgactccacgctgtctgccgcgaaatcagctccaccactcaatgttgtcaacggaagcacggcctcggtttttggccaaatgcacaacggaaaaatcgttaataagacgcacaagttatgaaggaaaaagtgatgaaaaattcaggaaacattgtgatctttaaagtgtttagtgccaaatatattgaaggcttcaatttagagattttacttaacgctttttcccatgtgcattgcattttaatttgcattacctccaaaacgaacggtgtaattcagatttaattttcaattttcgctttttcctctcgtgtcatttaaggtcccatttcggtggaggatgaggttgacgttgatgtggtcgactgcagcgatgccgaggagccaccgactaaggcgcgtcgtttgaaccatcatcagcaccaccagcatcaccagcaccaccacaataacaacaataacaacaacaacaacaatgtggcacacaagagtcgcaacagcggtggcgccgtggcacaaacagcttccgccgaatcccaactgaacaccagctcgaccagcagccaaggacgctgctccacaccgccccaatccccgggaacggaggacagcgaggagcgtttaacaccggaaccggtgcagaaggcacccaaaattgtcggctcctgcaattgcgacgatctgaagccggtgcagtgccatctggagaccaaagagctgtgggatcgctttcacgatctcggcaccgagatgatcatcaccaaaacgggcaggtaagcatccaaaccagcaacaagccatccatccatccagccatccatccaaccatcagtcagtcagtcgagtttagtgcaaacaggcattagttttaaatggtggagcaacgtgggagattttgggaggtaaaagttgctgccaaatggcattacccaaacatatactcttttcacaaaatattttgcattcatcacttttccgcaaaacttctttattgaacaatcaagtgtctgcgtgttcaatcatcaaagatgttcaccctaagtcagttgcccataaattggctcgccaaatggtttttgcagtgtcaacaaaaatttcatgccatttgagtgaatgtgtggggtctatttcctccaaaagggaaactgtgcaaaaaaaaaggaaacatttgtgtacctgcgcaggaagaaaatgagaaaatcagagctatgggcgttgctgttgtcagcgggagaatgggaacaagttcaatccaaatgaccacgggttgtccacacctttgctcccacacacctgaccacacgcacacaggtcacacatatagatagatatatatacaccttaatgatattgtaaaaatcacacctcggagtcgcagacatcagggcggtccccgatgcccgcctttggcctttttggccggaggttatgtcaccgggttttggagggacattaaaccacaggatgtagacaagagggatacacaggtttgtgactcaaaaaatgaaggaagagtttcgcttttgtcttcattgtctgcacttgtcaaagcagggagaatcgaaaaggaaaatatgggaaaaaatcagcttgaagccccagtgtctgggccataaatagtcgacttaactagctgtgtggcaatagcaatccccaaaaaaagggagcattcaatgaaagcaaaaatctaatcgaattaatttaactttgttacctcttccagacgcatgttccccactgtgcgcgtcagtttctcgggtccgctgaggcaaatccagcccgccgatcgctacgccgtcctcatggacatcatccccatggactcgaagcggtatcggtacgcctaccatcgctccgcatggctggtggccggcaaggccgaccccgcccccccagcacgcctctacgcccatcctgacagtcccttcagctgcgaggcgctccgcaaacaagttatctccttcgagaaggtgaagctgactaataacgaaatggataagaacggacaggtgagttgacttgagataccgagacgctgtggtactgagatactcagatgcgcagatactcggctgctgagacattcagatgctgaggtagcgattagccgcgagtgctaaataattgataattttgcaacacgaagaaatattcgccaagttgcgagtctagagaccatcgttgattaatgttgctttgctgtgaaaatggaaaatgttcgtgttcaattcaagaagtgaattttaggacaatatacttctatctaatttatgaaaagttttaaagaatattaaagataactttcaatcatttaagcactttcctaattcccagctatgtaaatttcaatcgacttactacaatgaaaccttttccctcttttctattcccttccagatcgttttgaactcgatgcatcgctaccagcccagaattcatttggtgcgtttgagccatggacagagcattccgtcgaatcccaaggaattgcaggacttggatcacaagacctacgtattcccggaaaccgtattcaccgcggtgacggcctatcagaatcagctgatcaccaagctgaagatcgattcgaatccgttcgccaagggcttccgcgactcctcccgcctcaccgacttcgatcgcgatccgatggaggcgctgctcctggagcagcagctccgctcgccactgcgcctctttcccgatccgctgatgcaacagtttgccgctcagggtgatccctcctcgatggcgctgttcgagaaggcacgccagcatctgcaaatgtttggcggcaactccccctatgcccagctgatgatgccgcaaatgtaccaagcggcagcagcggcagccggaccacctccgccaccccccggcctgggcgccttccacatgttccagcagcagtggccccaacttaccgccggctttttggccagcgccaatcagcaagctgccgccgctcaagccgccgctcaggcccaagcgcaggcgcaggcggcagccgcagcgatggccgccaaccggacgcccccacccccgcccactgcatccacgccctcgtcgacgtcgtcgggatcgccgtcgcccgatatgcgaccgcgccagtatcagcggttcagtccgtaccaactgccaggcggtcaggggccaccctcctctgccgccggttcgccacccgcggtaaacgcctcacgcagccccgcccactaagttaacagcccacgccaccaagttcttgccacgagcagtattaaaaagtgaaagcactggggttaaaggtcgtctcttaaatgcaaaaaagttcctggaatactaagaaaatactttaaaaaaaaacgtaaaaaaaaaatcgtcaaaaagtttttaatacaatattttgctttccgatatgatttcttataaaaaagatcgtttctggcaaatattactgctgagtttcttttcagtcaatgaaattgcttaaactttagctttatttttcaatttagacgacctttaagcccagtgaaaactacacaaaaaaggttagccatctttttgaatgttgtaaattatttgttgtttatatgaaggcaaagaaaaacttttctctatttgttgtaaaaatcttaaattatgtataagctgtacagttcttctcactttcccctagacaatttttgtaatctagtttaacttattgtacaaatgtttaaatgttgttcgaaaactcatctcagtgtaaagttagaacgaaattcactcaaaaactaagcaaaacaaaaaaatatacatatacataaataaaacgctgcacgattgtaaactatatatagctatgtagtgtaagcataaatcgttagtaatgctattatatataatgatatattcatagtattaacagtaaattcatagacgcttcagttagttatatttatccggcgaaaacgtaaagatttatttagcataaattaaaggagagtaaaaccataatatgtattcaatgtgaacgctaaaaaaagtgaaaacacgaaaaatatttaaacaaaaattattaaacgaaaaatatgaagaaaaaaaaacacaaacatacaaaaaccaatcaaaaataaataaaaatatgtgaaccaaaactagcaacgtttttttaattggaatttttattcgatatttgaacagatagatctgaaacgtttcagttttcgttttaaaaagcattataagcttttgg

SEQ ID NO: 14363 - DNA, 2008 bp, DROSOPHILA
cctgccttccgttgcgcacacactcagtccgcgagattctcagttcgcgtgcgccaaagataagcaaaagaaagcaagagagatataaagatacaagatacttacaccttgaaacatacacatacccctcgagttaccaaagctaaagatgcatctagctttataagtgccaagtgttgaaaagtgaccagatacaataccccaatacctttccaaggtattccctagttaaagccccattaagaacaacatcatacccttcaaaatgctggttggatctcatccgtatttgtgcaacggggtgcccgccgcccctgcagcaccaaatgccagtggacagacaacaacaacggctagcaaaagtgccgccggctcagcgacggacttttccatcgccgccatcatggctcgcgaagatgcctccagtcgggagtcctccattcgcagtgcaagtcccatttcggtggaggatgaggttgacgttgatgtggtcgactgcagcgatgccgaggagccaccgactaaggcgcgtcgtttgaaccatcatcagcaccaccagcatcaccagcaccaccacaataacaacaataacaacaacaacaacaatgtggcacacaagagtcgcaacagcggtggcgccgtggcacaaacagcttccgccgaatcccaactgaacaccagctcgaccagcagccaaggacgctgctccacaccgccccaatccccgggaacggaggacagcgaggagcgtttaacaccggaaccggtgcagaaggcacccaaaattgtcggctcctgcaattgcgacgatctgaagccggtgcagtgccatctggagaccaaagagctgtgggatcgctttcacgatctcggcaccgagatgatcatcaccaaaacgggcagacgcatgttccccactgtgcgcgtcagtttctcgggtccgctgaggcaaatccagcccgccgatcgctacgccgtcctcatggacatcatccccatggactcgaagcggtatcggtacgcctaccatcgctccgcatggctggtggccggcaaggccgaccccgcccccccagcacgcctctacgcccatcctgacagtcccttcagctgcgaggcgctccgcaaacaagttatctccttcgagaaggtgaagctgactaataacgaaatggataagaacggacagatcgttttgaactcgatgcatcgctaccagcccagaattcatttggtgcgtttgagccatggacagagcattccgtcgaatcccaaggaattgcaggacttggatcacaagacctacgtattcccggaaaccgtattcaccgcggtgacggcctatcagaatcagctgatcaccaagctgaagatcgattcgaatccgttcgccaagggcttccgcgactcctcccgcctcaccgacttcgatcgcgatccgatggaggcgctgctcctggagcagcagctccgctcgccactgcgcctctttcccgatccgctgatgcaacagtttgccgctcagggtgatccctcctcgatggcgctgttcgagaaggcacgccagcatctgcaaatgtttggcggcaactccccctatgcccagctgatgatgccgcaaatgtaccaagcggcagcagcggcagccggaccacctccgccaccccccggcctgggcgccttccacatgttccagcagcagtggccccaacttaccgccggctttttggccagcgccaatcagcaagctgccgccgctcaagccgccgctcaggcccaagcgcaggcgcaggcggcagccgcagcgatggccgccaaccggacgcccccacccccgcccactgcatccacgccctcgtcgacgtcgtcgggatcgccgtcgcccgatatgcgaccgcgccagtatcagcggttcagtccgtaccaactgccaggcggtcaggggccaccctcctctgccgccggttcgccacccgcggtaaacgcctcacgcagccccgcccactaa

SEQ ID NO: 14364 - protein, 580 aa, DROSOPHILA
MLVGSHPYLCNGVPAAPAAPNASGQTTTTASKSAAGSATDFSIAAIMAREDASSRESSIRSASPISVEDEVDVDVVDCSDAEEPPTKARRLNHHQHHQHHQHHHNNNNNNNNNNVAHKSRNSGGAVAQTASAESQLNTSSTSSQGRCSTPPQSPGTEDSEERLTPEPVQKAPKIVGSCNCDDLKPVQCHLETKELWDRFHDLGTEMIITKTGRRMFPTVRVSFSGPLRQIQPADRYAVLMDIIPMDSKRYRYAYHRSAWLVAGKADPAPPARLYAHPDSPFSCEALRKQVISFEKVKLTNNEMDKNGQIVLNSMHRYQPRIHLVRLSHGQSIPSNPKELQDLDHKTYVFPETVFTAVTAYQNQLITKLKIDSNPFAKGFRDSSRLTDFDRDPMEALLLEQQLRSPLRLFPDPLMQQFAAQGDPSSMALFEKARQHLQMFGGNSPYAQLMMPQMYQAAAAAAGPPPPPPGLGAFHMFQQQWPQLTAGFLASANQQAAAAQAAAQAQAQAQAAAAAMAANRTPPPPPTASTPSSTSSGSPSPDMRPRQYQRFSPYQLPGGQGPPSSAAGSPPAVNASRSPAH

SEQ ID NO: 14365 - DNA, 3311 bp, DROSOPHILA
ggtgaggagtttggacgtggacaaagcatttgggacttcccctgtctggccaaacaggtggacgacgatgaggatgaaaagagaaacgccgacgtggaggaggtccgatctcaggcttttgtgaggggaacccagactggagcatccctgaatgcctcaacgggtggagaactgagatctagcatcctgcgcagatcgaccaagtcacgcaactccacaaagctctaagatgtacgactaggtaattaattgttacttatagcagccaatattctatagatctaccttgcatttttagcatcaaatagcctctaagtgttgttatagacttttgtgatactagaaataagaaattctatgcgcctctacaaacaataaataaattaaaaatattaaagaaccaaaagtccagttccccaattatcactcaacgagaaacgggtataatgagggtaagaagtaggtaaaatgcatgttaataacgaaatttgttacagaacccgggttctaaaccggaaatcaaattcggcttcgaaccttacaaactctagaaacattttacatttgctaaaattttaaaaataagcccaagaataaattaatagtattaaaacgattaacttataaaaaaaaaacaaattatactttattaattcaaataaaatactaataataaaaatggtaacactaataaaaataaacacctccataaatttgtttctaatttagatcaccatctctaagtacatcttttcggctattttaacgaaaagccccgataaagttatgcaatatatacacgcttaaccgtttatgatcattgtgtttatcagcttctctgcaagtgcaaaatgcaattaaacgttgtatgcatttattggcacaagggtcaacaaccaaatccccatgtaaatatccgattgaactacaaataagtaccgattctccacttacctatataagcgtcaccattcgagtgcatccaaccagtacagccaaaatggcatcttcatccgcttggctagtccttctcatgggcattggcctttctggcgccctggatttgaatttacaaaatagcagtagcaaactcttgacggttctcaacacatctgctccggttcaagagttgctataccacatcgatgtctggcgaaatgaggcagctgctgtggcccaggataatccaacttcttccaacctggaatcagtaattcgctctgaagttggaggtgactgggagcggggtaggctagtccttcaattagcgaatcaagccagaactttggagctcaagcaggctatttacacagcgttgtggaaggagctccagcagaccaagcagatttacgatcccctaaagattttagaattttatgaccagctggctgtgcacactgatgttccactccaacttatggatcatatttaccgggctttcatcagccgaagtgcccagttattggaagctccatttcacacagccagtcgattggccacttttccattggtaaactctctggtcaatcgtctaacattcagcactttggattatctgagagacattctggaagttctctacgatgctgttttggccctagaaacacctttaagtgtagtgcagcgcctgggaaatttaacggctagtttgaggcaattggctcaagctaatcttcaattacttagcagggaggaactcaaacgtggaaatcccgaagtgcaaaaggccctgcagagcaacatcagaaatttgctttcgcagcctgggtttgaaaaagaagttgcaaaatccctccaatcggaaatctatgcacaccttccgaaagacgagcaactgctgtacaccgctcgaaaagtatgcatccggaatgtgactgaagaaaattcgtacatttacgaatgcccgcagacgtacctcatctgcagtaacgctcgagatccaaagaaggctgcgtatttcatccaacgtggtcacagtaacgacagccggccgcaatttgctttttatagtgccttctggcgtagtcgctacatcctcatggaaccagccactgcaattgcgagcaatgcaaccaactcgattaccaaaaacgtttacagccgacccaacattaactggtggagagtggtatatggaaatggagggattgccttttacgatgctgccactgaaaactctgttctgtgcggtggcgatcctttgcactgggatggcgaggagcatcacgtctacacaagacatgcatcggagttctcagctcatcaggcagagtgcacctggagcctcgaagactgcagcgatgccgcttaactggaagtgagaagggatttcagaccataataactataaattattactatgtttattttgactaataaggcacatgagaaaatccaactacctctgcagaaaatcccagggtatgcacacaacgccgtcggtcagtaccgaatagtagtgggttatgtgaagcttgcatccctgcagttctttcaactgaagctggtataaatctctaagggatgttatcattttatccggggttatggcatcatctttggtcagcgattgcaactgtagctgctttatgcacgagtccatcagctcctgctcgatgtgcttgtcctgagcgtacttcttcatacgctccctggccagctccagatttacactgatgaagtctacgagtatggatcccggacaggtggctggtgtgataaactggcccgtagggcttaccatcagaggacctgcctctgattccaccactatggtaaactctttcagcgttttcggccattccggcggatatttttgtttgcccaggtaatcgctgagcgaagtggtgaccttcatgaggtagcttgcatagccacttgcctgttgtttgggcataaacttgcgacgacctatctggatgttcagtagaacctgagacagtgttcgttcatacacgggcaccacctttaaataggcatcgtggtgcggaatgttcttgatgaagtcaatccatgtgctgagaacatcaccagtaaaaagcatcacatggccttctaaactgatgcccgtaaagggagcaaaaaccactatgcgacctttcagggaagccatttccaacaaatgggtgttggatagtcgctcaagggtctttaaacagccacggtagtgctcaatgttccagccgcactcgtaacgagcatcttgcaactccagtttctctaccagcatttttttcagtttgtcgatttcggcctgcagatccgcagtttccttagagcgctgtttggctgtgccagcattctcttccagc

SEQ ID NO: 14366 - DNA, 1311 bp, DROSOPHILA
atggcatcttcatccgcttggctagtccttctcatgggcattggcctttctggcgccctggatttgaatttacaaaatagcagtagcaaactcttgacggttctcaacacatctgctccggttcaagagttgctataccacatcgatgtctggcgaaatgaggcagctgctgtggcccaggataatccaacttcttccaacctggaatcagtaattcgctctgaagttggaggtgactgggagcggggtaggctagtccttcaattagcgaatcaagccagaactttggagctcaagcaggctatttacacagcgttgtggaaggagctccagcagaccaagcagatttacgatcccctaaagattttagaattttatgaccagctggctgtgcacactgatgttccactccaacttatggatcatatttaccgggctttcatcagccgaagtgcccagttattggaagctccatttcacacagccagtcgattggccacttttccattggtaaactctctggtcaatcgtctaacattcagcactttggattatctgagagacattctggaagttctctacgatgctgttttggccctagaaacacctttaagtgtagtgcagcgcctgggaaatttaacggctagtttgaggcaattggctcaagctaatcttcaattacttagcagggaggaactcaaacgtggaaatcccgaagtgcaaaaggccctgcagagcaacatcagaaatttgctttcgcagcctgggtttgaaaaagaagttgcaaaatccctccaatcggaaatctatgcacaccttccgaaagacgagcaactgctgtacaccgctcgaaaagtatgcatccggaatgtgactgaagaaaattcgtacatttacgaatgcccgcagacgtacctcatctgcagtaacgctcgagatccaaagaaggctgcgtatttcatccaacgtggtcacagtaacgacagccggccgcaatttgctttttatagtgccttctggcgtagtcgctacatcctcatggaaccagccactgcaattgcgagcaatgcaaccaactcgattaccaaaaacgtttacagccgacccaacattaactggtggagagtggtatatggaaatggagggattgccttttacgatgctgccactgaaaactctgttctgtgcggtggcgatcctttgcactgggatggcgaggagcatcacgtctacacaagacatgcatcggagttctcagctcatcaggcagagtgcacctggagcctcgaagactgcagcgatgccgcttaa

SEQ ID NO: 14367 - protein, 436 aa, DROSOPHILA
MASSSAWLVLLMGIGLSGALDLNLQNSSSKLLTVLNTSAPVQELLYHIDVWRNEAAAVAQDNPTSSNLESVIRSEVGGDWERGRLVLQLANQARTLELKQAIYTALWKELQQTKQIYDPLKILEFYDQLAVHTDVPLQLMDHIYRAFISRSAQLLEAPFHTASRLATFPLVNSLVNRLTFSTLDYLRDILEVLYDAVLALETPLSVVQRLGNLTASLRQLAQANLQLLSREELKRGNPEVQKALQSNIRNLLSQPGFEKEVAKSLQSEIYAHLPKDEQLLYTARKVCIRNVTEENSYIYECPQTYLICSNARDPKKAAYFIQRGHSNDSRPQFAFYSAFWRSRYILMEPATAIASNATNSITKNVYSRPNINWWRVVYGNGGIAFYDAATENSVLCGGDPLHWDGEEHHVYTRHASEFSAHQAECTWSLEDCSDAA

SEQ ID NO: 14368 - DNA, 3740 bp, DROSOPHILA
ctttccatttactgttagctgcagagccatctgctctatcgatatatgtaataaattcgtatgtggggcagcatttacgcagtagaaatcgaaacaagtttgagcgtaaaatcaaacaacccaacgtctttaaaaattcctcccaagcggcagtgtgaccgtagatgaataattgaatgtactagaatttacatgcgtctaaaatataccagctggtaagtagcacgcactcaaggcacaatacaaattcggaaattaaatgatcgaaaaactacgtgtttttttttaaattataaaatttaatgaatgcaatttgaaagctacatgacaataaactcagtttgaaaacgaaaacatcacaacagcatgtacacaagcctagatggcccagttgggatgtatcgaactatcgacacctatcgttatcgtgcgaaatcagctgaaattgtttggattacgagatagtaaatagaaatattgaaattacattttttggctgtgaaatcgtaaaattatggcgttcctactgcgacaagtggccaggagcggattgcaaaggtgaaataagctaggaaaaattgcgtgacaaatcccacaataaatgcttgatcttccatagaaatctaatcctaatgcggcatgcaaccgcttccacatccgcgaatcccgaacttagtgtccaggtgagcgagagctgcttgaaacggctccgtgagatctgcgtggatggatctttcctgcgtgtgaccgtcgaaggaggcggatgctccggctttcagtacaaattcgatttggataagcagctgaacgaggatgaccgacagtttggcgaggctgaggccaaggtggtgatcgatacagtctcgctggagtactgcagcggcgccaccgtggactaccatagcgaactaatacgcgccggtttccggatggtggccaatccgctggcggaacagggctgctcctgcggctcctccttctcaatcaaattgtaaactttaaactttagagaattatttaatacacatagaatgttcagttatatacacgtcgagggtggacaataacaaaacagggtagagggggagcgggcgttcccagttagttattttacaacaatatacagtaaagcagctgggcgggatgcgcgccgctgtccatgctcatttgcaggcggccagctggtcactcaagctgatgacctgctccgtcagcacgctgatttgctcctcgtagttaatacgcgtcgtagtctaaggaaatccgagatgtcacttggttctaagagcacaaaactgcaggcacaactcaccaactcctcttcgagcatttgcagggctccacccaaactggccaactgatcgtccttggccttaagttcgtgcgttgcgttctccaggcagttttgcaggtgctgaacctccagctcgtaggatcgcaacttggattccgcttgcactttcagtcgcatcagatcctcgaacttcttgctgaacacactgtagatgagctgctccttggtgggcggttcggggggatcctgcagcgaatcccgcgcccgctggctgcctttcgcctccgactctgccggtcgaacggtgacgcccgccgccgccgtgctgcagctgcacgtgctgagatccttgctggggttcgagacaaatgcttgatgcagcttggccacttcgaattgagccctccaatgcgccgcctccttctcgagcagcgcaatgcgatcctcggaggtgagttggttgctattcgactgctgctggagattgtgtagaggagtagtatcgctgccggtggcgctcagtgcgtcctcgctgccaagctgaaagcacgcgaatctttgggtaaatatttaaagagagatctcaatattaccatgctggccgcatcaaccagctttgtttccagctcgctgttcctgtgctgcagcgtttccacctccttcctgagtcgcttctccagttcgttctgatcgccgatgcgtttctccagcttctgttccaacgatgctatgcgctccgtgtgcagcagcagatccctttgcttgtcgtcaatctgtgcatagtcattcgagccataactcatacccaattttaagtttcatcccccctggccttaccaatgacgtcagctgcgcattctccatgattttcttctgcagttcctcgaagatgagggcttcctgagcggcatccaatgatggatcggcatctgggcggctattgctctgcacgccccgcctgccgccagaatccttgtccttctttttgggctgctcgtgcaccgagatttcctgctgcagctgcgaaactcgcgactccagctgcttgttgcgaaagcccagcgagtccacctcctgctccgtacggcgcaacgaggtggcgtactgctgcagttgctcccgcagactggcctccttggactgctcctccagcaccgccttctttagcaccgtcgcttgtgcccgcagctatttggggttcatttttgggggattaattggattaatgggcgttaactgttgctgtcgatttggggcggaatcctacctttgagtattctgtggccaatttctggtacttggcctccggcaccgtgccatccatggctagcgatttctctgccatccaggctggctttaaggtctatgtggttgccggcggtggagttctttgcacggtttctaaattgttttaaacaaattgaccaacaaataaagctggcactgcagtgggcacagccacacactcgcagagaataccaaagcgctaaggtcgaaaatgcattcatttgtgctgctggtcacactacatacttaacggttattttaattaagaaagaagaagaaatttagttttgaaatattttttgattttttattgattaaaaatgcttatatatgttaagccttcaactgttttttttaaattaaccttaagctatttgtttgttttctcaaaactaaaaactgttgactatataatataaatttttacacccttgcattgcattaaagaatttcattgcaaccttgacttctcacttttcagataagcaaaccgatttttctgtttacaggcagcaaattcttcgaattatcttgtttacaagcaataaaaagggaagcgaataattaagaggtgtgaaaggttaaagccctaaacaaaccaactaaagtgttgttaatatatgttaaatatttactttgcccctgaataagttgatgactagttatcatagggtatatcgcaataaataaaacagatttgtatcgtttaagacctttattaactatgtagtaacataaattaagcattacctaataggtacgtaattgaaagctgtttaagcacttaacttaagaatatattatcgaagggcactttctcgaacagtttgttggacagctccctgaagatgatgccgaaactcttggcatatcccacctttagttcgttgaacaccgtctcccagttttcgttaaggaatcgattcataccatccgacagagttttgtcgttgaatagattctcgaagttcatgtacaccctcttgggatcgaaggacacccggtagtcctttagtcgcatgtacttgacgccatccttctcaaagggttcgccgatcaggcgatgctcgatcttggtgttgatcagcgtgacattggcctttccatgtcccgtgatgggcagcagaaggatgcggccggacatctcgtagtcgccaat

SEQ ID NO: 14369 - DNA, 1485 bp, DROSOPHILA
cagtgccagctttatttgttggtcaatttgtttaaaacaatttagaaaccgtgcaaagaactccaccgccggcaaccacatagaccttaaagccagcctggatggcagagaaatcgctagccatggatggcacggtgccggaggccaagtaccagaaattggccacagaatactcaaagctgcgggcacaagcgacggtgctaaagaaggcggtgctggaggagcagtccaaggaggccagtctgcgggagcaactgcagcagtacgccacctcgttgcgccgtacggagcaggaggtggactcgctgggctttcgcaacaagcagctggagtcgcgagtttcgcagctgcagcaggaaatctcggtgcacgagcagcccaaaaagaaggacaaggattctggcggcaggcggggcgtgcagagcaatagccgcccagatgccgatccatcattggatgccgctcaggaagccctcatcttcgaggaactgcagaagaaaatcatggagaatgcgcagctgacgtcattgattgacgacaagcaaagggatctgctgctgcacacggagcgcatagcatcgttggaacagaagctggagaaacgcatcggcgatcagaacgaactggagaagcgactcaggaaggaggtggaaacgctgcagcacaggaacagcgagctggaaacaaagctggttgatgcggccagcatgcttggcagcgaggacgcactgagcgccaccggcagcgatactactcctctacacaatctccagcagcagtcgaatagcaaccaactcacctccgaggatcgcattgcgctgctcgagaaggaggcggcgcattggagggctcaattcgaagtggccaagctgcatcaagcatttgtctcgaaccccagcaaggatctcagcacgtgcagctgcagcacggcggcggcgggcgtcaccgttcgaccggcagagtcggaggcgaaaggcagccagcgggcgcgggattcgctgcaggatccccccgaaccgcccaccaaggagcagctcatctacagtgtgttcagcaagaagttcgaggatctgatgcgactgaaagtgcaagcggaatccaagttgcgatcctacgagctggaggttcagcacctgcaaaactgcctggagaacgcaacgcacgaacttaaggccaaggacgatcagttggccagtttgggtggagccctgcaaatgctcgaagaggagttgactacgacgcgtattaactacgaggagcaaatcagcgtgctgacggagcaggtcatcagcttgagtgaccagctggccgcctgcaaatgagcatggacagcggcgcgcatcccgcccagctgctttactgtatattgttgtaaaataactaactgggaacgcccgctccccctctaccctgttttgttattgtccaccctcgacgtgtatataactgaacattctatgtgtattaaataattctctaaagttt

SEQ ID NO: 14370 - protein, 406 aa, DROSOPHILA
MAEKSLAMDGTVPEAKYQKLATEYSKLRAQATVLKKAVLEEQSKEASLREQLQQYATSLRRTEQEVDSLGFRNKQLESRVSQLQQEISVHEQPKKKDKDSGGRRGVQSNSRPDADPSLDAAQEALIFEELQKKIMENAQLTSLIDDKQRDLLLHTERIASLEQKLEKRIGDQNELEKRLRKEVETLQHRNSELETKLVDAASMLGSEDALSATGSDTTPLHNLQQQSNSNQLTSEDRIALLEKEAAHWRAQFEVAKLHQAFVSNPSKDLSTCSCSTAAAGVTVRPAESEAKGSQRARDSLQDPPEPPTKEQLIYSVFSKKFEDLMRLKVQAESKLRSYELEVQHLQNCLENATHELKAKDDQLASLGGALQMLEEELTTTRINYEEQISVLTEQVISLSDQLAACK

SEQ ID NO: 14371 - DNA, 4008 bp, DROSOPHILA
cgcattcggaaatcggcggtaaacctggccttttccatcaccttcgaaaacatggagcactctacgttggactttgtggcacccgacgaaagcatattcaactactggacggatggaataaacgcgctgctgggtcaaccgatggtcagcaagcaaaagaacgaggacttcgacactctgctgtcgatggagatcaaattgcgcctgctggacacggaaggtgtggacatcagcaaggacccaccgccaataccggaggatcccgaaaactatgatttttgctttgagagctaagcataacgagcacaattacttcacgaattattcgattcattctagactcccccatcacccaagatacatgccaaagtgtacacacaacataatcgtattctccgatctgatcttctactagtattacttgtgcaattccccgaacacaaaatgaacaaactggtgacggtcacgtccaagtgactaaccgctgcctagccatttagtgaactttacaccatttatgattataataggtatataatatatagagatcattaaataacacattttatacataacaattttgtacaaaaactaacaagagaagcgtattcttatccaagcctaaaaggtaattagttagttaaaaaaagcaaaaagcacggctggccgatgctttgaacaccattgcggaaggaattgatttggagccgttaacaataatggaatcttagcaatgtaatttattgatgctctgaattgcacttggaatttgctatcgatttgtccttccgcaaggatatgttgattgcaattgtaaatgataaaacacgcacttgacgacctttggttcgaactttaaagcattcgagtaagcagtaagcctgcggagcaaaaccaaactggcagcctacccgagtgggtctctggctgcctcctcgcaacattatccacgcacgggcagcttgcgccggcgagcaggggctcgatcctagatccttaatcaaatgttatcctccagcaggagatcgttgtcatcgccccggtccggcaggcagacaaagaattcgagtaaattcaggatgggaccacgcgagaagggattctgatatcgtccgcgtttgtcccgcaagtaaggataacgcttgtagttaaacatctcgtttgtggtgagattcatgcaggcgtgcaggatctgccagtgcaaatgatgtcaaaacgattaatatttttggaaaagaagcacttaccgaagtgcatgtgagtatccaacccaagccgcagaacacaaccgcctcgatgagtcccagcacatagagcatcgtgaagccctcgatcatcacgcaatagcaggcaaagtagatggtgaacgagcagttgacggccaccgagaggacgaacaggaagaaccacattctgttcctcagtcccacgcagttgtagataaagggacagtggtggtcaaagtacgagacacaccggttgcacacgcggcagtgtttggctcgcagcggccggaggcacctgcagctgtgacatagtcgggttagcatcacatttcgcttcttcagtttgtcgaagtacggaatctgcttgatggcccggtagtaggcatccgaactgagtggtatataccccggatcccggcgattggcaatggcccagcttatccacattacggcgttccagtatataaagcaatagtgcgagcgtctcaatatgttccacgtaatgggaatcgcacggatcatgtacatgggatagccccaaagtagcacagagaagagaaatagaaacagcggtcccttggagtctccagctccgccaaagagccagccccaactttccgagactgagggaatccaacgggacttcttcttcacctcgccgtacagcaggcgcaccacatcctggtgctgatgagcctgtgccaacatgatcggcgtctttccattcttgtccctcggttccagatccagctgggacttctcgcacagcaggcgaacgcacgtcatgttaccagacaggcaagccagatgcagtggagtcgatccaaagttgtccgtcttttgaagctcaacgccggaatacatgaggagtcgcataagatcggcatgtcccttgtacgctgcccagtggagtgccgtatcgccgtttatgtcagttaggttgttcagcgctcccattccaagaagataggccgccgttgcagtacggccgtacatgcaggcgagatggaggggtgtaagtcccttgaagtccgccgcattgacggcaactccagcctggaggaggacctgcaccacggacgcatgacccttcctgcacgcccagtgaatgggccgtggaccctgcgtacccaaacagggcagatcgatcggagccgtgcgttcgatgaggtatcgcatcagctggacattgccgttgagagctatccagtgggctggcgtgtagccatgacgatccctggccgacagacactccatgccgaacttgtccacgagattctccacctcgctgacctctccgttcttgataatatcgaagatgtcgtccaaactcacggtggtggcaccatcgagcccctcaaagaggagcacattttcgtggtcctcgacgccgctactgccgtgtccaccgtccgtgccgcgacccgttaatggcggcgaatgcggtcgatgatccaaatggatgtcgtcggcgtgggcatggccatcctcctccgcgacgaccatgttgcaggaggaggaggcggttaggggcaacgcccacacactgcgcgccgcccccggacttggatgcaccttcgaggccatgtagaactcgaagtccacgcccagacggtccgccgttccaccgttgccttgatgcagggggttttccagtaggtgtgcaatcttgtcgcctttttccgttacgctccgaccgaaatttgtactctgtttggccaatcttaggcgtggaatgctaggtaaacacgactgcactcgatggcgaggaaattatgtcagcactgtgagaaaatcaatatttgtcccgaatcgcaggactcgaattggggccactttcgaactcgacttggcgccaaacaaatcaacagctgaccgttattttcgcagttgggcgcgcagtgttgccaacacatactggtaattaagacttttctcagcgaggggtgatttaagatttaagtcaagaagtattaaagaaaaaatatatatatttaatttgttggaaggtcaattgttgaaaccgaggtatcatttagcttaacttaaatatactagaaatctcgtggcataagcaaactaaaaaaaaaaggtttatcaactgacttttatattagttttaacattattgggaaacatttgttttccgccgctagaaacctttaaaatgtatactactatattgcttggtacgaatgttgcattttgaactgatgctagcattgcattttgtaaggttcccatgtctctgttattttgccacctggtaacactgtgcccctttttgataaatttgtttcgtaaaaaatgggcgacaacgtggtgacggaactaaataacttggatttgaacaatcaaaaggcatgttaaactcttttcgaactgcattcgagtgtatgagaagtgctagttagccgaattatgttgaagttggcgccgcagggcggcagatattatagccaaataagccgcatttgccagtggattttgccgaaaattcagacgcagtcgaagccaccaaaacaacaacaacaacagcaaccacaattgaaagaacaacaacaacacagctacgcaactttggttggtgttttaagctaaaaagaattgacctaaacttcaatttaaacgcctgttactgctggcacgtgtaaatgttatgcttgtctgtgtgagtgtatgcgattctccaatgaatcagtgccgccggctgtgacgtcactaacaaccaaccaacttcatgagtgtctgtttttttttgctactctattgcatcagccat

SEQ ID NO: 14372 - DNA, 1953 bp, DROSOPHILA
ctgacataatttcctcgccatcgagtgcagtcgtgtttacctagcattccacgcctaagattggccaaacagagtacaaatttcggtcggagcgtaacggaaaaaggcgacaagattgcacacctactggaaaaccccctgcatcaaggcaacggtggaacggcggaccgtctgggcgtggacttcgagttctacatggcctcgaaggtgcatccaagtccgggggcggcgcgcagtgtgtgggcgttgcccctaaccgcctcctcctcctgcaacatggtcgtcgcggaggaggatggccatgcccacgccgacgacatccatttggatcatcgaccgcattcgccgccattaacgggtcgcggcacggacggtggacacggcagtagcggcgtcgaggaccacgaaaatgtgctcctctttgaggggctcgatggtgccaccaccgtgagtttggacgacatcttcgatattatcaagaacggagaggtcagcgaggtggagaatctcgtggacaagttcggcatggagtgtctgtcggccagggatcgtcatggctacacgccagcccactggatagctctcaacggcaatgtccagctgatgcgatacctcatcgaacgcacggctccgatcgatctgccctgtttgggtacgcagggtccacggcccattcactgggcgtgcaggaagggtcatgcgtccgtggtgcaggtcctcctccaggctggagttgccgtcaatgcggcggacttcaagggacttacacccctccatctcgcctgcatgtacggccgtactgcaacggcggcctatcttcttggaatgggagcgctgaacaacctaactgacataaacggcgatacggcactccactgggcagcgtacaagggacatgccgatcttatgcgactcctcatgtattccggcgttgagcttcaaaagacggacaactttggatcgactccactgcatctggcttgcctgtctggtaacatgacgtgcgttcgcctgctgtgcgagaagtcccagctggatctggaaccgagggacaagaatggaaagacgccgatcatgttggcacaggctcatcagcaccaggatgtggtgcgcctgctgtacggcgaggtgaagaagaagtcccgttggattccctcagtctcggaaagttggggctggctctttggcggagctggagactccaagggaccgctgtttctatttctcttctctgtgctactttggggctatcccatgtacatgatccgtgcgattcccattacgtggaacatattgagacgctcgcactattgctttatatactggaacgccgtaatgtggataagctgggccattgccaatcgccgggatccggggtatataccactcagttcggatgcctactaccgggccatcaagcagattccgtacttcgacaaactgaagaagcgaaatgtgatgctaacccgactatgtcacagctgcaggtgcctccggccgctgcgagccaaacactgccgcgtgtgcaaccggtgtgtctcgtactttgaccaccactgtccctttatctacaactgcgtgggactgaggaacagaatgtggttcttcctgttcgtcctctcggtggccgtcaactgctcgttcaccatctactttgcctgctattgcgtgatgatcgagggcttcacgatgctctatgtgctgggactcatcgaggcggttgtgttctgcggcttgggttggatactcacatgcacttcgatcctgcacgcctgcatgaatctcaccacaaacgagatgtttaactacaagcgttatccttacttgcgggacaaacgcggacgatatcagaatcccttctcgcgtggtcccatcctgaatttactcgaattctttgtctgcctgccggaccggggcgatgacaacgatctcctgctggaggataacatttga

SEQ ID NO: 14373 - protein, 585 aa, DROSOPHILA
MASKVHPSPGAARSVWALPLTASSSCNMVVAEEDGHAHADDIHLDHRPHSPPLTGRGTDGGHGSSGVEDHENVLLFEGLDGATTVSLDDIFDIIKNGEVSEVENLVDKFGMECLSARDRHGYTPAHWIALNGNVQLMRYLIERTAPIDLPCLGTQGPRPIHWACRKGHASVVQVLLQAGVAVNAADFKGLTPLHLACMYGRTATAAYLLGMGALNNLTDINGDTALHWAAYKGHADLMRLLMYSGVELQKTDNFGSTPLHLACLSGNMTCVRLLCEKSQLDLEPRDKNGKTPIMLAQAHQHQDVVRLLYGEVKKKSRWIPSVSESWGWLFGGAGDSKGPLFLFLFSVLLWGYPMYMIRAIPITWNILRRSHYCFIYWNAVMWISWAIANRRDPGYIPLSSDAYYRAIKQIPYFDKLKKRNVMLTRLCHSCRCLRPLRAKHCRVCNRCVSYFDHHCPFIYNCVGLRNRMWFFLFVLSVAVNCSFTIYFACYCVMIEGFTMLYVLGLIEAVVFCGLGWILTCTSILHACMNLTTNEMFNYKRYPYLRDKRGRYQNPFSRGPILNLLEFFVCLPDRGDDNDLLLEDNI

SEQ ID NO: 14374 - DNA, 2413 bp, DROSOPHILA
caggctgggccttaatgttcttcacatactccgtggacaagttgcatgactccagaagaccttgaataaaggttttgggatctcgggtactctgccagtccgtgcgtatttggatgagcttgaaggagtctcgcttgtcagcatctgaactggtgcgtacatagaacttgagcacttgggtgtccccgcttcgctgtctgcgttcatacaaagcctctagatgctcactcagcaatttcagtgagttctcgttggtgttcctctgctccggatgctgggcaaagaagtcaggatgcaccgcgaagtagaagggtctcagcgccgttgtcagatctgcaaaagcgcccaatcacatgatcatccaaaagttgtggcgcattcaaatcaactgaccttggttcagcgatcggcgcaaaagcaggaagtgccgtctgctggtgaccaatttccggatcttggagcccaacgacatggacattatgtaagcagtgggcggcagcacaacactgcaccgcgtcacagatggccaacatacgggagcactgccgcgagattaagattttggatatataactcctgatcttgaattatgaggtaaaattggtaggaccgcggcactgaatgccaaatatccattactatctgggtaatagtggtggctgtttgggtgggtgttttgaggtccctcatgttgacaaattgttctttaaattcttgcgataaaatagttaatcttgataagtttgtcataaaaaagttttaatgagtttgtaattaataaattaattagttttcaacgaaaacaaatgttttaattaattttaaacgtttagctatattcacgctaactctatccacaagattttgcagcactgacgctgacacttttgatgtggccagtttttgcgcagaattccgcattgtttacctcgctgctaaaaagtttttagcgcaattccaattattattgttaataatagtaaacaaatcatacgacaacatgactgccgttccacccccctccaacatctctaccctaatgccattgggtacgtaaatctgctacaggtctacaaatcgagagtttctaacttttgccggcttcccgtactaccctacagaattggtggacaaatgcatcggttcccgcatccacattatcatgaagaacgacaaggagatggtgggaactctcttaggattcgatgactttgtgaatatgctcttggacgacgtaacggagtatgaaaatacccccgacggccgccgcatcaccaaactggatcagattctgctcaacgggaacaatatcacaatggtgggtgctctttttcgaagttacatacgtttgtttattaaatttcatttataatttgatttcagttggtgcctggcggagagctggcggagtagcaaggttccatttgtaaacataaatacatttgtaaaatatcaaaacggtcgttttaatgtggataatattgtgtcgtatgtaaatgttcgaggtatgttagaagttagcagtggtcaagtgattaacagcaatgttaacagatttttggtcctaacagatacgaatttgaaaacgcttggcttaggaaatgaaaattatttgccctctaatctcagaataaaacactatataatattacctaatatacaaaacattgttaaattatcaattggaatagaattaattttacataaataagcatattttatgcttatagggaccggatacacttgaaatggaataccgaaaaaggtcgaccgctaataattctgtaaaatgacttccaagcttcaaaaattcaaacttcacattaaatatttagtgtctttccgttaacattcaaccgctacttgtgctctggctgccatgcaaagtaggcgcatgcgctccatccccaaaatgttgggtctcagcgatacagcagtcaacatgtgccataaatattaaccgcttttcccttctggccgtgcgtgtgggtgcagtgcactctccgcagtaccgctctgctctgcgtgcgttctcccgcttccgttcggcacctccagcgttcagtacggcagcaggcttcgacggaagtggaacaaaccaagcggaaacagactcacgcgacaacaaaaccgaaccgaactcgaatatggaaaacttttacccagaaccgatatagcactgataaacgcaactcggagtgaactttatgaatggccatgactaattgcagtcatctagcagcagccacagtcgatgtgtgaacttcagtggtgaaggttgtccggttttgcagcgaaagatacccgtgtttcggtatctgtatctgtcggtgtctcatttgagcggctcgaatgatccgcctgtaattatgactgcgtgaagaaatcaataagtggaggatggccagcaagc

SEQ ID NO: 14375 - DNA, 276 bp, DROSOPHILA
atgactgccgttccacccccctccaacatctctaccctaatgccattggaattggtggacaaatgcatcggttcccgcatccacattatcatgaagaacgacaaggagatggtgggaactctcttaggattcgatgactttgtgaatatgctcttggacgacgtaacggagtatgaaaatacccccgacggccgccgcatcaccaaactggatcagattctgctcaacgggaacaatatcacaatgttggtgcctggcggagagctggcggagtag

SEQ ID NO: 14376 - protein, 91 aa, DROSOPHILA
MTAVPPPSNISTLMPLELVDKCIGSRIHIIMKNDKEMVGTLLGFDDFVNMLLDDVTEYENTPDGRRITKLDQILLNGNNITMLVPGGELAE

SEQ ID NO: 14377 - DNA, 7480 bp, DROSOPHILA
tgtgcgagtcgaatgcgaagcgggataaattcgaggtggaactgaaggcttcaattgacaaaatcttcgtgctgcgggagatcatctcagagctggaaacccaagtccagacaaaggcactcaatgaggaagttttggccgagaaggcccaacaactggaggaatatgtgagtttgcagatgcgggacaacgatatactgcagcaggaggtgcacagcctgaagacagacattggagagggctatcaatcccgtatcagagtgctggaggagaaactgaaacagagtggaccaacggcagaacaaggtgtggtcttgagtcaggttgcggaaaagttaagagacattgaaaccacactggatcaaaaaaccaaagctctggaatctctgcataactccaacgcgacctccaattcggccagcttgagtgtcaccgaagatgtgtctattcatggcagcaaggaacccacggcagtgggttcaccctcgcatccatcgctcaccgtggaaggtgttcaacgggttaccgaaaagctggaccggcacactcgcgtcgaggaggcggccattaagaggattcgcgacctggagatgcaggttcatcaaatgcgcgccggttgcgtggtgagtacagcatatgattataggaaacttgtgatcctattgtgtatttattaattatctaaaaagtatcttgaaacaaggaattacaaatagtaacgaacggcttgaaacggtatggtttgtgtacccgcttaaccgcttacggttacgcatcaagttcaccaacctcgttaaattcgaactcgaaacgtataggtttgtgtctttgattaatcgctcatttcaaatccaacggttggccgcaaagtatatttagatgctgtctcttgattttttcactcacgcaagagagcatcaaaaagaactttcttgtgatagacccctcttagttttctcgatcgacagcatctctcagttgccttcagaatggcactctgaacagtcgaatcgggagaaatgcccgcatctatatcgacaattttgaatcgcaaactaaatattcgccagatatataattatatataattttcagtaaaaataaatatattattttgaatgcaaactgcggaagtttcgaaaatgtttcagggtccgaagatcccgctgcgagtgagtttttcaaatggagcttttaatatccgatcaaggtttctcagtgcgacaattgcgcggtgtgcggcagcgaatgtttatttattttgatgaattccgccgaaggcaatcataaactataaaaatatataattcaatttaatttaatttgttgtgccgtcgattgtcataatgttttcctcatgcattcgttgacggacattgtgcaatttttctgcttgagatatgtgatttatggcagaatttttttttttgaggcatttggcacacgctgtcaccaaaatatatcgctccctgtttcctttccacatgcccggtttgttccacttcaaaaatagatttcatatcttgtggccaccccaaattcacgcctcattttttaatccacttgaaaatcgaatgtaaaacaaatcatttggcgcctctggcacctgccacatttccatcacccaacccctctaagtgttgcacctcattgtcactgggaatacgattgaaccgaataaaaaaacagtagcccagcttgtttacaatatgcattctctcactgaagcccaattggaacactaatatgcggtaatgcctccataaatttctttatgctgtggcacgcatcccgctgagttgtttggagaaaggggaggctggacgattgagaaggggatggagattgctggggaagctgcatccacacccgtatgaatataaatggatcaaaccgagtaaacaacagcaaagagatgccagtactaaagcacagataccgagaacagtggaggaacttgtatatatgcattttgaagtgctttcttatccgcggtcaatttaactgaaaatatttaagatatgaatgatattaaaaaatcggtgctttaagttaaaatgaaattgtgcgtttaaatgtttatccaaagaaaacttgagaatttcattatgatatatatttatagcttagataaggaaatgacacatttcgtcatttccgttcctctttcgagctagataaaaaaattccattcaattgttttaaatttttcttatattacaaccacggtgcggagagatacgatagatacatctactttaattgaagttggaaagggttaaatgcagatgaagccaacggtcaaatggtcggccattgactcacccacgagcaccagagtctgcaaactgacagtcagataaaaccacttgactgagtatagtccaacaaatatgaaagaaatagaaagatcttgtggacttattacatacatcaaaccacaaattactctaaatttattaaaaaatacatatataatcttaatttgtgtctaaattgatctaatcttcccttgaaggagcttcaacatgagcgggatacgctgcagggtcgtatggaggaacagactcagcgtatttctaccctccaaaatcggctggaggagcagcgacagcgggcggagcaactccatcggactggcacatcagacttgaatacccgagtacatgaactccagggtgaggtccagaacctatacgagcaattggcggcgcgggacaagcagatggccaacatgcgacagcaactgcagcgcagcaaggaggagataactcgactggagacggaagtcgaagtacgaacacaaccagatcgcagtctggtgaacaaactgcaggctgaagtgcagcaaaagggagcagagatcgtgaagttaaaggataagatacgcacagagatgatcaaccgtctggctatcccggatctcatggagactatgctggcggacaagaacgatgagatagatcacctgcgcgatcaactggaggctaaggagaaggaactgcaggcatctcaacaggaagctagccagatttcatccccgtctggagcagcaggaaagcaggagggtagcggtggcaagttgagtgcccgaaccctaagcgatatcggatcgattacagagttccccgagccggatgtggagcgtcgagcggccatgcgaagtcttaccgctttacagatgagcgaaggtgcgggcggcttcctgcaccagacaatggtaggtgtttgctacttaaaggacttctaagtcctttattcccttctttaacattttgtgtatttaatttcttatttcattctattattttgtatcaggaaacttctaaggaagccgtggctaacttaacacacaagcgcaccgatgacctaagcggctttattgtcccttacccggttaacactttcgagcatccgcactacttccaggccctgggagtcactgcacagagcaccgatggtctaacgcctggtctggtgccgaggcagatcaacttctccaaccttacagaggattccaagctaaagacgaccagtcttctgatgcacacaccggagttgcccaggccaacaactcctccagagattcatcagctgcgagtaaagctttccgatttgcaaaccgaaaaacagagacagcagagtgaattggagaagaagttacaggatctgcaaaaagaactagagcaggagaaggagaagctgagtcgtcaagcgcaaactttgcaaagttacgaggagagtgaagctaagtataggcttcgcatagagaacctggagtccaaggtgctggaaacagctgcccaggcggcttctgatcgagaaaatctccgtaaggaactgaattgcgttagtgcggcccatgaacaatgtgaaaatgcagctgctgctcgcaaacgggaattggagaaactgaatagtgaagtcaaggtaaaggccgatcagctgcatgctgctttacgacgatgtgcagatctcgaactgcaggttctaacactagaacgcgatttggagcgcctaaagaacagtgataatagttcgaagcaatattcggtggacgaaattgcccagcaggtggaaaaggaattaaactactctgctcagctggattcaaacatccttaaagcaattgaaagcgaggaggaaaacaatctggacaagaagctgcagaaaggtgtccaaacggaggaggagactttacctggaactggcaatggaaccgacgacgagaacttcactggcgagcgggaactactaaatcagttggaagccctgcgtgctcaattggccgtggagcgtgagcaatgcgaagcaatgagcaaggagctactgggagagaaacagcattcgcaggatattcaagagcaggatgtgattatcatagaagccatgaggaaacgactggagacagctcttgatgccgaggacgagctccacaaacagctcgatcaggaacgggaacgttgtgagcgtcttcaaacgcaattgacatcgctgcaacgagcggaaagtagaagaaacagttccctgctactgaagtcgccgggcgactcgcccaggaaatctccacgggctgattttgaatccgaactcggagatcgtctgcgcagtgagattaaactgctggttgctcaaaatgaaagggaacgggagagatctgcggatgctcaacggagcagtgagcgggaacgtcagcggtatgaaaaagagctccaggagcgagtggcatactgtgagcggctgaaacaggaaatggagaagctatctcgggataaggagtccgccgaaacagagttggaacacttcaatgaacgtttaaccctgcaagccagtgaaatcgaaagtttggaggctaggttagtcaccctccaggaggcggaaacgcgaagggccaacacacgcacccgtcagcatcaggagaacgtcaagctccaggccgagatccatgaactaaagtccaaacttctggcggccgaagcagcacgggattgcctggaccaaaaagtcacccaactgcgtttcgatgtgagtcgttctggtcagagggaggccaaactagctgaggccttagctcaggccaatgatcgattggctcatagcaccgatgacaatgtgccggcgcagttcatgcagaagatgaaggagatcaacgccctgctggcggagaacactcaggaaaaccggcaaatggctgagacggtccagtttttggtgggcgaacgtattgctctgcagaagaaatgcgaagagttgggtggagctggtaacaccaatgtcaccgagctggaggagcgctgccggcagttgatcggtcgctatttacgagtggagtcccatcggaaggcgctggtctaccagaagaggtatttgaagctcacactggaaggttaccaggccagtgagcaattggctctgcagaatctgagaggtggtgctgaacagcctccacagcgaaacatcaaaaagaagtttaagtaagtttgtgatttattgaaattggctaaatcatttgtattaacggtctatcttttctttttaggacggtagcccttgcgatcattgccatccagcgaattaaatacattggacgcatctggcacacgggaaagcggattgttagcaagtcagtcttcacaattactcagcagaggtgagatttgcaaaaggtttatttgctatttattgctgtacatagaatgccttgccataatccccattttctcgttcctctaagctctaagacgcccatagtaaccgtcaatatgaaagttaaactaaaaaaaggcgattcagccaagaactagcgtccacaaggtctggtttctcaaataaatgcacttgaattatagtaactttagtcactgcagtagtagtaattaatctatccagtaatcaaggtgccttatccacagtttatccaaaattttctaaaactgcaaatttgtacttttgcctattgtttaaatactacaaactatgatgttctcgatcaggaataatattagactttaatttatagtagagttcaatatggaataacttaattgaccaaattgtagttttactaactatgcaatctttctttaaattcacttcgaacttgattaaaatcaaccagtcactcaaccaaccttttgtatacgactgaagactaatgtgattcatctttttagaagtcctggactaaacctcaatgtggcgcctccccaatccccactgcctggacccaactcaaatctacccaccaataacaacaacctcatgggccgccttagttatgcgcccctctcaccgccaatggttaacttcagcaccgtgcagccaataatgctgccatcggatttcacccttcaagcgccaacaacttcgttgcagaccaccattgccaataacaatagcgaaaacaccctgccatcattggcaagattggactggccgacgatgcaaaaaccaaaaagagcgcatgcgcggcatcattaagcccaggatagcagagttgagttccatcaagaagaacttaactgaatgccctaactttaagtgaagccatatcgaagacactctgcaagcatgaaagcatcaaggatgttggacaagcgatccattttagagttaatcacctgtaccatttcccctcattattagatcttaagctgttgtaacctattttaagcgttcgcgcaaccacaacaaacctagaaatgtaatcgtctgtaagtgttatttgtatttaccgcccaaatgtagccataagcataatgctaatccatgtcccagtattttgattggttcgactgactattggctgacaaatcccagagtcacttacatatatttagttttatttcatttgggttctgactgtataagtttcctgctaagttgattaaaccaaatttatttcacattcgaaaagtttatgttcattattttcctgtttctaactcgaatgttttctgtacataaacggaatgtgccttaagggtgagaattcactggacaattaagaattaaattcatcaaattattcaaataaaatgtaccacctgaaaaaggtatcgaaagcagtagattaaatgtaatgtgcgtacacaaatcatatatttcagctctatacgttggacttgatgcgcaatagggttccgcattttcacataaaaggtaggtataaaaaggcattttataaacacagcgataaaattacaaaaaggaagtcagcaagcaagcgaaaccctcgttcacaacatttaaattttaccttacctagtcataagagcaagcttaaaatcaactgcgtatacttgatattttccaattcaaattacaaaggatgtaaataaggacttccagcatcaagaatggatataaaaaaaagtgttctttaacaatatgctaaggggccaaatggatgcagctgttccattttccaattgccggttaagctcaacaggttgaggggttgcttgggcaaatgtcaagt

SEQ ID NO: 14378 - DNA, 3448 bp, DROSOPHILA
aacagtcgaatcgggagaaatgcccgcatctatatcgacaattttgaatcgcaaactaaatattcgccagatatataattatatataattttcagtaaaaataaatatattattttgaatgcaaactgcggaagtttcgaaaatgtttcagggtccgaagatcccgctgcgagagcttcaacatgagcgggatacgctgcagggtcgtatggaggaacagactcagcgtatttctaccctccaaaatcggctggaggagcagcgacagcgggcggagcaactccatcggactggcacatcagacttgaatacccgagtacatgaactccagggtgaggtccagaacctatacgagcaattggcggcgcgggacaagcagatggccaacatgcgacagcaactgcagcgcagcaaggaggagataactcgactggagacggaagtcgaagtacgaacacaaccagatcgcagtctggtgaacaaactgcaggctgaagtgcagcaaaagggagcagagatcgtgaagttaaaggataagatacgcacagagatgatcaaccgtctggctatcccggatctcatggagactatgctggcggacaagaacgatgagatagatcacctgcgcgatcaactggaggctaaggagaaggaactgcaggcatctcaacaggaagctagccagatttcatccccgtctggagcagcaggaaagcaggagggtagcggtggcaagttgagtgcccgaaccctaagcgatatcggatcgattacagagttccccgagccggatgtggagcgtcgagcggccatgcgaagtcttaccgctttacagatgagcgaaggtgcgggcggcttcctgcaccagacaatggaaacttctaaggaagccgtggctaacttaacacacaagcgcaccgatgacctaagcggctttattgtcccttacccggttaacactttcgagcatccgcactacttccaggccctgggagtcactgcacagagcaccgatggtctaacgcctggtctggtgccgaggcagatcaacttctccaaccttacagaggattccaagctaaagacgaccagtcttctgatgcacacaccggagttgcccaggccaacaactcctccagagattcatcagctgcgagtaaagctttccgatttgcaaaccgaaaaacagagacagcagagtgaattggagaagaagttacaggatctgcaaaaagaactagagcaggagaaggagaagctgagtcgtcaagcgcaaactttgcaaagttacgaggagagtgaagctaagtataggcttcgcatagagaacctggagtccaaggtgctggaaacagctgcccaggcggcttctgatcgagaaaatctccgtaaggaactgaattgcgttagtgcggcccatgaacaatgtgaaaatgcagctgctgctcgcaaacgggaattggagaaactgaatagtgaagtcaaggtaaaggccgatcagctgcatgctgctttacgacgatgtgcagatctcgaactgcaggttctaacactagaacgcgatttggagcgcctaaagaacagtgataatagttcgaagcaatattcggtggacgaaattgcccagcaggtggaaaaggaattaaactactctgctcagctggattcaaacatccttaaagcaattgaaagcgaggaggaaaacaatctggacaagaagctgcagaaaggtgtccaaacggaggaggagactttacctggaactggcaatggaaccgacgacgagaacttcactggcgagcgggaactactaaatcagttggaagccctgcgtgctcaattggccgtggagcgtgagcaatgcgaagcaatgagcaaggagctactgggagagaaacagcattcgcaggatattcaagagcaggatgtgattatcatagaagccatgaggaaacgactggagacagctcttgatgccgaggacgagctccacaaacagctcgatcaggaacgggaacgttgtgagcgtcttcaaacgcaattgacatcgctgcaacgagcggaaagtagaagaaacagttccctgctactgaagtcgccgggcgactcgcccaggaaatctccacgggctgattttgaatccgaactcggagatcgtctgcgcagtgagattaaactgctggttgctcaaaatgaaagggaacgggagagatctgcggatgctcaacggagcagtgagcgggaacgtcagcggtatgaaaaagagctccaggagcgagtggcatactgtgagcggctgaaacaggaaatggagaagctatctcgggataaggagtccgccgaaacagagttggaacacttcaatgaacgtttaaccctgcaagccagtgaaatcgaaagtttggaggctaggttagtcaccctccaggaggcggaaacgcgaagggccaacacacgcacccgtcagcatcaggagaacgtcaagctccaggccgagatccatgaactaaagtccaaacttctggcggccgaagcagcacgggattgcctggaccaaaaagtcacccaactgcgtttcgatgtgagtcgttctggtcagagggaggccaaactagctgaggccttagctcaggccaatgatcgattggctcatagcaccgatgacaatgtgccggcgcagttcatgcagaagatgaaggagatcaacgccctgctggcggagaacactcaggaaaaccggcaaatggctgagacggtccagtttttggtgggcgaacgtattgctctgcagaagaaatgcgaagagttgggtggagctggtaacaccaatgtcaccgagctggaggagcgctgccggcagttgatcggtcgctatttacgagtggagtcccatcggaaggcgctggtctaccagaagaggtatttgaagctcacactggaaggttaccaggccagtgagcaattggctctgcagaatctgagaggtggtgctgaacagcctccacagcgaaacatcaaaaagaagtttaagacggtagcccttgcgatcattgccatccagcgaattaaatacattggacgcatctggcacacgggaaagcggattgttagcaagtcagtcttcacaattactcagcagagaagtcctggactaaacctcaatgtggcgcctccccaatccccactgcctggacccaactcaaatctacccaccaataacaacaacctcatgggccgccttagttatgcgcccctctcaccgccaatggttaacttcagcaccgtgcagccaataatgctgccatcggatttcacccttcaagcgccaacaacttcgttgcagaccaccattgccaataacaatagcgaaaacaccctgccatcattggcaagattggactggccgacgatgcaaaaaccaaaaagagcgcatgcgcggcatcattaa

SEQ ID NO: 14379 - protein, 1109 aa, DROSOPHILA
MQTAEVSKMFQGPKIPLRELQHERDTLQGRMEEQTQRISTLQNRLEEQRQRAEQLHRTGTSDLNTRVHELQGEVQNLYEQLAARDKQMANMRQQLQRSKEEITRLETEVEVRTQPDRSLVNKLQAEVQQKGAEIVKLKDKIRTEMINRLAIPDLMETMLADKNDEIDHLRDQLEAKEKELQASQQEASQISSPSGAAGKQEGSGGKLSARTLSDIGSITEFPEPDVERRAAMRSLTALQMSEGAGGFLHQTMETSKEAVANLTHKRTDDLSGFIVPYPVNTFEHPHYFQALGVTAQSTDGLTPGLVPRQINFSNLTEDSKLKTTSLLMHTPELPRPTTPPEIHQLRVKLSDLQTEKQRQQSELEKKLQDLQKELEQEKEKLSRQAQTLQSYEESEAKYRLRIENLESKVLETAAQAASDRENLRKELNCVSAAHEQCENAAAARKRELEKLNSEVKVKADQLHAALRRCADLELQVLTLERDLERLKNSDNSSKQYSVDEIAQQVEKELNYSAQLDSNILKAIESEEENNLDKKLQKGVQTEEETLPGTGNGTDDENFTGERELLNQLEALRAQLAVEREQCEAMSKELLGEKQHSQDIQEQDVIIIEAMRKRLETALDAEDELHKQLDQERERCERLQTQLTSLQRAESRRNSSLLLKSPGDSPRKSPRADFESELGDRLRSEIKLLVAQNERERERSADAQRSSERERQRYEKELQERVAYCERLKQEMEKLSRDKESAETELEHFNERLTLQASEIESLEARLVTLQEAETRRANTRTRQHQENVKLQAEIHELKSKLLAAEAARDCLDQKVTQLRFDVSRSGQREAKLAEALAQANDRLAHSTDDNVPAQFMQKMKEINALLAENTQENRQMAETVQFLVGERIALQKKCEELGGAGNTNVTELEERCRQLIGRYLRVESHRKALVYQKRYLKLTLEGYQASEQLALQNLRGGAEQPPQRNIKKKFKTVALAIIAIQRIKYIGRIWHTGKRIVSKSVFTITQQRSPGLNLNVAPPQSPLPGPNSNLPTNNNNLMGRLSYAPLSPPMVNFSTVQPIMLPSDFTLQAPTTSLQTTIANNNSENTLPSLARLDWPTMQKPKRAHARHH

SEQ ID NO: 14380 - DNA, 3454 bp, DROSOPHILA
tcggagtcctcgacgctttcagtctcgctacatgccgagggatcgtggctccgtgaatcgaagcaggtactcctggcacaatccccataaacgcagtgtatcacgcaccgtggagccaaatggcaaagatgaaagggcagctactccgccgaaaaagggtgttgctgatgatagatctggacgagaagaaagggcgtaaacagggcctcgcctacgagtcttaagtttccttttagctgatagggtacatttgatttgatattcaaatttgtaaaacgctccctttgggaattgttcattggtcactaaataaagaagcttgcgaagcgaatttattacaaactataacaatcaatcgattattggttcttttcagacaacacgtagcgtaaagtaaaatcaggaaattgtcggtatttaaaatttgaatatagcgtacaaacatataaaaatgtaagtatatgaatcgcatatctatgcaaaattaatcaatgttaggataagtacttcaaaactaaacacaatagtttgtcatttttgtatttcagatatcagattctgattttgcacatggaatgaactgaaagtccaacgcgtagtgagagtgtaagagagccccaatagagagcgcaatatcccggagagtgtatcccccgccgtgccccttatcaacacttcacgctgcactttcgcagtgagagacggagagtaagagaaaaagtggttaaagaggggacgaacacccggctgttagtgttagttggggctcctaagagagagctaaagcgagagagacaagtctggaagctaaacaacaagcaccaagcaaacacgaaagataacgacttgtttcatttgatattcgccagccggcagaagcggaacaaacaaaaaaaaagaaaaaacaaacttcggacgccgcagctgcggacacgaaattagaatacttacggcgacaagttatcgcacaaattagtacgcgaacgagaattgctaccgagatacgtcggcggacacccgaaatttttcccaaaaaccaaggtgccgtgtaagtgtgaaaggaggtggtttttaccagctgctaatttatataactatgaaagccagtaaaagtgcaaggccgcgtgcagtgcagaaatgcagaattgcagaaaaacaacacaacacgcgcgacattaacactaaacacgtacatatatacatgtctacatatattctctataattttccgtgcggactttggacgataagcggggcgacaacaatatctggttatacatgaagacaaagaacataaggctgaaaagccacgcttgtctcttctgtttgttgtttttgctggtggcgctcttttaagtgtttgcgctacacttgttaccaagcggcatgttggttcacgagcacaaaagctgacaagtgatttagtgttatatttacccactctttattgccgtgttcgctcacaaattgaatggaatcattggttggattcccgtgattagtcacacataaaacacataagctttagcgaaaactatgaccttcatcacctctgtatcaaacaattgtggcgtgcttgatagtcttatcgcccataaaagtagtcgagtatggtcaactgaaataattttggttttactgccaagattatatgttattgaccctaaatcaaaatataaaaacagatcctatattaaatagataaaccgaatttttttatcatatcatattaaatttaaccatgtatcaattcaattttttgtcttgcagctcaaggagaggttgaagaactagagcttagacatgtttacgaaaatctttcgcgctgtgataatcggagcccccggctcgggcaaaggaactatttcggaattgatctgcaagaaccatggatgtgtgcacatctccacgggggacattctgcgccagaacatcataaaaaacacagaacttggaaaaaaggccaagcagtacattgctgaaggtaaactggtgcccgacgcgattgtgaccaagacgatgctggcccggataaccgaggtaggcaacaggtcgtacatcctagacggattcccgcgcaatatagcccaggccgaggcactggctgcacgcgagcaaatcgatgccgtgatcacgctggacgttccacatagtgtgattatcgaccgggtcaagaatcgctggatccatgcgccctccggcagggtgtacaatattggcttcaagaatcccaaagtgcctggcaaagatgatgtgacgggggagccgctgatgcaacgcgaagatgataaaccccatgtggtggccaagcgactggagctctacgatgaggtgatgagcccggtaatagcctggtacgaaaagaagggtctggttgccactttcaagggaaaacagacaaaggagatctggccgatgatggagcttttcctcaacgaccgcataaatgcgtaatggagcaaccccgaaattacatccaatgtgcacaaactaacgataaactgctgtgttcaattaagtgcataatatatttagatatatataaatgaatacgtatgaaatatgtatgtttgtgggccggttaagaggaacaggcgtataattaatgtaattgcgaagccttacacagtagcagctgtcatgtattccttcttccacagatatcattcccctcatgagcatgtcttgcagctccccccttttttgtataaacatatttttgtactcgtattctgtgctctgataataaatcgcgttttttatatatataaatatatatatatatgcgctgataacagccgactttgacttttgggcagttaacggacagccgtcgatctatttttaggcaatgtccacaaacccttggccccatgcgtgaagccaacacttttagcttcacctcatgacacccaaatgcccttcattttatcgcgtagcgcattaatttctaaaaaatatgggatagtgtggcgctcccgtttagtctcgcgctctcttactcacacatgcacggaccagctgctgttctcacgcacacctgtatagtggcaaatcacaacagagaggcgcttgtacagtcaagggcgcccaattatgtcagatttaaaattctttaagtcatttataaaaaattcaataaaccacttattgttttaaaggtatacttcataataaaatggagatagctgtttgccttttaaacactatacttcggaatataccattactgggaatcttatttctggataattaaaaaaaaaaacctatataaacccctttgtggccaccactgtgctgcgagcgccctctcacctctctctcatttagacccgacttgcgcttggcccaatattacggctttttcggcacgccaactgagtgtgcctctcttcgcacatgcccccaccgtctacactcccctctcgcgcgatgcgtttgggttggcatttcc

SEQ ID NO: 14381 - DNA, 699 bp, DROSOPHILA
gatacgtcggcggacacccgaaatttttcccaaaaaccaaggtgccgtatgtttacgaaaatctttcgcgctgtgataatcggagcccccggctcgggcaaaggaactatttcggaattgatctgcaagaaccatggatgtgtgcacatctccacgggggacattctgcgccagaacatcataaaaaacacagaacttggaaaaaaggccaagcagtacattgctgaaggtaaactggtgcccgacgcgattgtgaccaagacgatgctggcccggataaccgaggtaggcaacaggtcgtacatcctagacggattcccgcgcaatatagcccaggccgaggcactggctgcacgcgagcaaatcgatgccgtgatcacgctggacgttccacatagtgtgattatcgaccgggtcaagaatcgctggatccatgcgccctccggcagggtgtacaatattggcttcaagaatcccaaagtgcctggcaaagatgatgtgacgggggagccgctgatgcaacgcgaagatgataaaccccatgtggtggccaagcgactggagctctacgatgaggtgatgagcccggtaatagcctggtacgaaaagaagggtctggttgccactttcaagggaaaacagacaaaggagatctggccgatgatggagcttttcctcaacgaccgcataaatgcgtaa

SEQ ID NO: 14382 - protein, 216 aa, DROSOPHILA
MFTKIFRAVIIGAPGSGKGTISELICKNHGCVHISTGDILRQNIIKNTELGKKAKQYIAEGKLVPDAIVTKTMLARITEVGNRSYILDGFPRNIAQAEALAAREQIDAVITLDVPHSVIIDRVKNRWIHAPSGRVYNIGFKNPKVPGKDDVTGEPLMQREDDKPHVVAKRLELYDEVMSPVIAWYEKKGLVATFKGKQTKEIWPMMELFLNDRINA

SEQ ID NO: 14383 - DNA, 6079 bp, DROSOPHILA
gaagagtattaaataatctaattttatggcgataagtgcattgaaataaaattatttcaaatgtgaatcgtatatatacaagaatctgggcttattcttgtttcatctaatttttttacttattaacaacaaataattcttttcccaatcgatattgagttatattaaattgtgatcacgagagttcggctcatctctatagattagaattgtttcgacaaaagataagctcttttgaccataatcagaaaaacacaggttataaagatttcccactatgtcgaaatccggagagtttacattccggcgtgctctagctgaagatattaaagatgtgctctccatgattcaagttgagttttataagattcctattttaataccaatttgagatacttttgaattgatctgcaggaactggctgactttgagaagatgagcaatggtccccagctaacagaggaaggtaagagatggcgaaacccttaccatagtaatgaaataatggtaaagtaatggattgtaatatgacagatcttaaacgagacgcaggactcactggtggccaggagtattgtgaagtctatgtgcttgtagacaacgatactgagtaagtgctgtagttcttggcatgacctgattaacttgtgggcttgttctcctattctagtcaggcgattgggtactccatttgctacaaggcatactcaacgtggcagggacggtacttcttcgtcgaggacatctatgtccgccccgagcaccgtaaacgcggcgccggaaagcgaatcttcttggaggttgcatcgcgggctgtagagcttcagtgccctcgcctggagtttaatgtactggaatggaatcctgcacgcaagttctacgaaagtcttggtgccgtggatttgacagataaagagggctggcactactaccgcgtggaggagcaacaactggccaaattggccgcggatctgagggcaaaaaaatcttaacttgatttgattttcaatttttactactttatagtagggcgataaataattaataatacttggccatgggccatatgtgctatgagtacattgcaattaattcgtttggcttctcattgatcccccgccacacttgcgatgacatggatctgcatgctcttcgtggagttgtagacttgaccgggcggaaagggatgcaccttggagtggccatcggttttacttttgccaccggcagtatacttggataatcgaatgctgggcattggtagaaagccggtgctcagcggcattacatccagcgatatggaatgactgtcgacgtccttcatggatacgacacctaaaaggttaagtaaaaattagttagtcaacaagtacagactgttggttcatcgaagtaagccaattttctttttcagtgttaaatgtttccaatcaaaagcaagggcaaatctagttagtgctacgtgtgtcctattccaaggaacttacccatatcttaaaatgcaaaagtgaatcgtgtgtagagaaacagaattaaatcataagcaaagaaagagagagagtagtaaagagaatccaacttacccgctgagcgaccgcaaacggcccacagattctgatcgttgagcacctcgtacatgagatccgtgtagggattctcatgcaccttggtgatcttcaagttcatgttgcacacggtgcgcagacggcacagttcattgggttccagctgcgcctgcaacttaaagagcgttgtgtagtccaccagatcaaaagcgcagccatacgttctccacacatcaggctgcgacagtgatgcgtatttgattacaaaatgcacttttacgacgggcagctcgtgctccgttttgaggggctcaacttgaatctcgtacagataagttacagtcagggatttgtagatttcctagaagacgagctcaggagatcagcaattttagatattaaattacattgctatttagttacaatgggctgctgggattccggattaagatccaacaattgcacaccgggcacatcgcacttgacttgagcgtgctgcaaaaggagatgtgcttccatgcccttcatgatcacctgcaggaacttctgagtgccacacgtgtgaagccggcaagtggcctccatggctggttgaaaatcgacggcgattgggagctcagttcgagaccatggacaattgagggcgatgtgatgctcatggtgtttagacacctttcggcccggcatatcagtgagaacctccagtgggatcctacgttcctcgaacgatttgaattgcactagtggcacttgaagcgtactctcaaatgattggtcatcattataggctgcttcatcatccgtatttcgcgcctgtcgaatgcgaagattcttggagcaacgcagtgtgatttttgcatcgggcggaaagatgaaactgccaccggagacatttaggctaatcggctgcactatgccagctatcagagtcttgaattccagcgtggcacttgccggcttggtgctaatctcaaaggtggcaggcataaatggcagctgttccgacaagaactccaggctggacatgctaatacatagcttaaaaacaaaaacgattgaagataggccaagaaaactgatgcaacgtgatcacccacctgtttgaattgccagcagcccactcgagtggcctttgccttcatctcaattaggtttacgcccggctgaagggcaatgttttccgcttgaacaaaattggtgaagtccgcctggacacttggtgaaagtttgcgcttggtgctgcttgttcgtcgcacgggttgcttgctttttggcaagtcgcaggccacagcggcagagtgcaggcgattgtcctgtttgtagactagctgaagcgagacctttaatcgtgatgaggtgtccttggcctttaccgtcgacggggaggcagttaggctgacattctccatggccagctccagagaggaagcttccaattcgtaacaaagcttaacattttcagctacgaccccgcgcggatagagactttctacttttagctgcactagaatataatcatcctgtataataggtttctggttaacaacctcgatgtccagaatgcgaaagtgatcctccagtacacaatagttggcattctctatcgacggctgtgccgaaagcgtcgtcttaagtgttttcagtgacttgagaaactcgtcgaaataaaatgttcgcactaaggtctctagttctgcgcaacacgagatggagctacatgtcttggtgtaggccagcgagtcgcccatcttgcggtagcagttagctagttcaagcagcgtctgcgagctcagcatgtgccagttctctgccttcagctccctgagaagatccgtaaagaatccaacagctttatgtggctcatttagagcgcagtagaagtttcccaggtccaggccaaccaaacgggccgatcgcaagcgtgtcacatgcttgtacgtactgatggccaactctgccagctccaggtagagcttctggaaggcttgattcgagcccagggcttccttaagctgctcagcccccgatttcttgggcttacgattgggagaccggtctcgtagctgaggtgtcgcctggaggaactgatgctgctcggacggcgcatctccaattcccgacgatagctgcaccactatgtgcaactgctccgaagttggcgtgcagccgggcaagaggccacacagtttgccgagctcgtagagcttatccttggccaagttccagatgggagcacagtgctggaaacatgttagctcgttgggttccatagcctgttcgcacagctgcaggacttccagagcacaaacaaactcccaacagcaaagagcgccctcctgacactccagctttatgagctccacctcgcgcagtgtggaaaacaaaaagttcagaagcctcttcgcgatttctgggatgtcattgcaagtaagcagcaaataggcttgacgttcgaaaagatagttgcggaattccaacagagaaacgccttcatcgcggattttgttcctcatttcgaacttgtccgctcgggtcagacatataccatggaaagcgtccaggggcttgcgaaaatggttcaaccactgctgcttctcgttgagaccagtgtgagttatgaactgcgagaacatggcgtccagttcatcgtactgtatcaacgcctcggtgggcaattccagcttttcaaagatcaacgcaaggtcttcctgcataaagaagtattggcggaaatcccagccttcaatgtttctcttttcgcgcttgctccgtattagttcctcgtacttaactatgttccgattgtagctggtgagcataaggaagcgaatacgctgcactaggcagcggaaggactcggtggatttctgttcaaacttggccgggttcagaactgagatgcagcggtcgtcgttcttcgtgccaaaatccaaccgtatcttatctagcacagtggtgcgtggcatgaagttctttgtcttccgcatgtccagtgtttcgaccaacagaatcatccaatccgagacgccataactggttaatgtttttaaccaaatgtcgattgcctccctgatcgtggctttgtaggtgtccacatcctgaaagatagttaatggaggtggatttagagattcctacaggatcagttaactcacattgcactcggtgacgaaaatgtgcagtatggggtgctccaagatgctccagtcaccctgcttgtacttctccaaggccgcaacattgaactgctgtgcctgggcttccaagcgaacatgtttcgtggggcgttggaaagtgcgtcgccactcgcaagtgtccagtggaatcgcgttcaggatctgggactccagcgatcggaacagcgggcacgagccagagtctgtaagtaaaggtttgatatgggatttattgtgttaattttttacaactcacatgttattatgggctttatctgcattgtttttgtaaatttcgtatgtttttcatttggcaaacgaaagccacacaacaatctcaaccaaacagctgataaggcgagggcgggggaatcgattgttcgttgctatcaataatcggttgaccaatttaaaaaatattttaattcctaatgcaatgaaccattaaatgctagcctaatacaagaaattaataatctaattaagcagctttaactattcgctcaacaggtgtgctttcagcagccctggtcaagggcgtagagaaaaagtagaaggatatgcagaataaaatatggttagatgaaccaaactaaatggtttttaattggtagagaaagccttcttttattaaaaaatattaacaaaaaatgttttcacttaaatttgttaaggggtatatgaggggtatatcccttttgcaccacacctcagttttttatggcttggctaaaaatcgataccacccacagtcgcctatcgaacagctgatagtgaaatcagattcggtagctaattgaaaacgaaacaatgaagaaataatatttgtttttcacacgccacaaagagacacttaagagaaactttcactgaatgcgcggccaggtctcgactggaaattagccagccccagcatggacatggccaggagcatttttggccgcgaccatgagggttacgtgggccgtgaagagcatacggtgcgtctaaattgaccagaaaagattgcttatcatggtaattaatatttatcgttccactgccaacagcgcaaactgcagaacctgggctcggaagacgatctgggagagctgccgcctatgatggaggaactaagtgtggccgatggcctgcgaccaaatcccggtgggccattctccgctcttaccgcctccatgtggccacaggaaatcctagccaagctgggcggtggcgcggaattggcttccggcccaaacgaccagccggagtaccgttttgacgaatttggcttccgggtggaggaggaggacggtccggagcagagctccaacaaattgctgagcataccctttgtag

SEQ ID NO: 14384 - DNA, 3600 bp, DROSOPHILA
agattgttgtgtggctttcgtttgccaaatgaaaaacatacgaaatttacaaaaacaatgcagataaagcccataataacatactctggctcgtgcccgctgttccgatcgctggagtcccagatcctgaacgcgattccactggacacttgcgagtggcgacgcactttccaacgccccacgaaacatgttcgcttggaagcccaggcacagcagttcaatgttgcggccttggagaagtacaagcagggtgactggagcatcttggagcaccccatactgcacattttcgtcaccgagtgcaatgatgtggacacctacaaagccacgatcagggaggcaatcgacatttggttaaaaacattaaccagttatggcgtctcggattggatgattctgttggtcgaaacactggacatgcggaagacaaagaacttcatgccacgcaccactgtgctagataagatacggttggattttggcacgaagaacgacgaccgctgcatctcagttctgaacccggccaagtttgaacagaaatccaccgagtccttccgctgcctagtgcagcgtattcgcttccttatgctcaccagctacaatcggaacatagttaagtacgaggaactaatacggagcaagcgcgaaaagagaaacattgaaggctgggatttccgccaatacttctttatgcaggaagaccttgcgttgatctttgaaaagctggaattgcccaccgaggcgttgatacagtacgatgaactggacgccatgttctcgcagttcataactcacactggtctcaacgagaagcagcagtggttgaaccattttcgcaagcccctggacgctttccatggtatatgtctgacccgagcggacaagttcgaaatgaggaacaaaatccgcgatgaaggcgtttctctgttggaattccgcaactatcttttcgaacgtcaagcctatttgctgcttacttgcaatgacatcccagaaatcgcgaagaggcttctgaactttttgttttccacactgcgcgaggtggagctcataaagctggagtgtcaggagggcgctctttgctgttgggagtttgtttgtgctctggaagtcctgcagctgtgcgaacaggctatggaacccaacgagctaacatgtttccagcactgtgctcccatctggaacttggccaaggataagctctacgagctcggcaaactgtgtggcctcttgcccggctgcacgccaacttcggagcagttgcacatagtggtgcagctatcgtcgggaattggagatgcgccgtccgagcagcatcagttcctccaggcgacacctcagctacgagaccggtctcccaatcgtaagcccaagaaatcgggggctgagcagcttaaggaagccctgggctcgaatcaagccttccagaagctctacctggagctggcagagttggccatcagtacgtacaagcatgtgacacgcttgcgatcggcccgtttggttggcctggacctgggaaacttctactgcgctctaaatgagccacataaagctgttggattctttacggatcttctcagggagctgaaggcagagaactggcacatgctgagctcgcagacgctgcttgaactagctaactgctaccgcaagatgggcgactcgctggcctacaccaagacatgtagctccatctcgtgttgcgcagaactagagaccttagtgcgaacattttatttcgacgagtttctcaagtcactgaaaacacttaagacgacgctttcggcacagccgtcgatagagaatgccaactattgtgtactggaggatcactttcgcattctggacatcgaggttgttaaccagaaacctattatacaggatgattatattctagtgcagctaaaagtagaaagtctctatccgcgcggggtcgtagctgaaaatgttaagctttgttacgaattggaagcttcctctctggagctggccatggagaatgtcagcctaactgcctccccgtcgacggtaaaggccaaggacacctcatcacgattaaaggtctcgcttcagctagtctacaaacaggacaatcgcctgcactctgccgctgtggcctgcgacttgccaaaaagcaagcaacccgtgcgacgaacaagcagcaccaagcgcaaactttcaccaagtgtccaggcggacttcaccaattttgttcaagcggaaaacattgcccttcagccgggcgtaaacctaattgagatgaaggcaaaggccactcgagtgggctgctggcaattcaaacagctatgtattagcatgtccagcctggagttcttgtcggaacagctgccatttatgcctgccacctttgagattagcaccaagccggcaagtgccacgctggaattcaagactctgatagctggcatagtgcagccgattagcctaaatgtctccggtggcagtttcatctttccgcccgatgcaaaaatcacactgcgttgctccaagaatcttcgcattcgacaggcgcgaaatacggatgatgaagcagcctataatgatgaccaatcatttgagagtacgcttcaagtgccactagtgcaattcaaatcgttcgaggaacgtaggatcccactggaggttctcactgatatgccgggccgaaaggtgtctaaacaccatgagcatcacatcgccctcaattgtccatggtctcgaactgagctcccaatcgccgtcgattttcaaccagccatggaggccacttgccggcttcacacgtgtggcactcagaagttcctgcaggtgatcatgaagggcatggaagcacatctccttttgcagcacgctcaagtcaagtgcgatgtgcccggtgtgcaattgttggatcttaatccggaatcccagcagcccattgaaatctacaaatccctgactgtaacttatctgtacgagattcaagttgagcccctcaaaacggagcacgagctgcccgtcgtaaaagtgcattttgtaatcaaatacgcatcactgtcgcagcctgatgtgtggagaacgtatggctgcgcttttgatctggtggactacacaacgctctttaagttgcaggcgcagctggaacccaatgaactgtgccgtctgcgcaccgtgtgcaacatgaacttgaagatcaccaaggtgcatgagaatccctacacggatctcatgtacgaggtgctcaacgatcagaatctgtgggccgtttgcggtcgctcagcgggtgtcgtatccatgaaggacgtcgacagtcattccatatcgctggatgtaatgccgctgagcaccggctttctaccaatgcccagcattcgattatccaagtatactgccggtggcaaaagtaaaaccgatggccactccaaggtgcatccctttccgcccggtcaagtctacaactccacgaagagcatgcagatccatgtcatcgcaagtgtggcgggggatcaatgagaagccaaacgaattaattgcaatgtactcatagcacatatggcccatggccaagtattattaattatttatcgccctactataaagtagtaaaaattgaaaatc

SEQ ID NO: 14385 - protein, 1145 aa, DROSOPHILA
MQIKPIITYSGSCPLFRSLESQILNAIPLDTCEWRRTFQRPTKHVRLEAQAQQFNVAALEKYKQGDWSILEHPILHIFVTECNDVDTYKATIREAIDIWLKTLTSYGVSDWMILLVETLDMRKTKNFMPRTTVLDKIRLDFGTKNDDRCISVLNPAKFEQKSTESFRCLVQRIRFLMLTSYNRNIVKYEELIRSKREKRNIEGWDFRQYFFMQEDLALIFEKLELPTEALIQYDELDAMFSQFITHTGLNEKQQWLNHFRKPLDAFHGICLTRADKFEMRNKIRDEGVSLLEFRNYLFERQAYLLLTCNDIPEIAKRLLNFLFSTLREVELIKLECQEGALCCWEFVCALEVLQLCEQAMEPNELTCFQHCAPIWNLAKDKLYELGKLCGLLPGCTPTSEQLHIVVQLSSGIGDAPSEQHQFLQATPQLRDRSPNRKPKKSGAEQLKEALGSNQAFQKLYLELAELAISTYKHVTRLRSARLVGLDLGNFYCALNEPHKAVGFFTDLLRELKAENWHMLSSQTLLELANCYRKMGDSLAYTKTCSSISCCAELETLVRTFYFDEFLKSLKTLKTTLSAQPSIENANYCVLEDHFRILDIEVVNQKPIIQDDYILVQLKVESLYPRGVVAENVKLCYELEASSLELAMENVSLTASPSTVKAKDTSSRLKVSLQLVYKQDNRLHSAAVACDLPKSKQPVRRTSSTKRKLSPSVQADFTNFVQAENIALQPGVNLIEMKAKATRVGCWQFKQLCISMSSLEFLSEQLPFMPATFEISTKPASATLEFKTLIAGIVQPISLNVSGGSFIFPPDAKITLRCSKNLRIRQARNTDDEAAYNDDQSFESTLQVPLVQFKSFEERRIPLEVLTDMPGRKVSKHHEHHIALNCPWSRTELPIAVDFQPAMEATCRLHTCGTQKFLQVIMKGMEAHLLLQHAQVKCDVPGVQLLDLNPESQQPIEIYKSLTVTYLYEIQVEPLKTEHELPVVKVHFVIKYASLSQPDVWRTYGCAFDLVDYTTLFKLQAQLEPNELCRLRTVCNMNLKITKVHENPYTDLMYEVLNDQNLWAVCGRSAGVVSMKDVDSHSISLDVMPLSTGFLPMPSIRLSKYTAGGKSKTDGHSKVHPFPPGQVYNSTKSMQIHVIASVAGDQ

SEQ ID NO: 14386 - DNA, 3269 bp, DROSOPHILA
tgcgctcgcccacacagttgttgatccaggggcagtggtgatccatgcgccggatgcaccgcttgcagatgcgacaatgatgggcgcgtggcggcctatacgtttcgcagcgggtgcacacggtccattcgctgctgtgtccattaccgggcggaggattgtttttgttggtcgtgtgcaggtcggagaagtccagacgattggcgggcagcggcacagtgcctggatcggagaacacggccttggagtgggacatggccaacaggaagacgacggtgttaaagagcaccacatggaaggacatccagaggctgtcgccaagtgggtagatatatatataatgacgtcatggtgcgtacagtatgcattactcacctgcccggcatggtggtcagaatgatccaacggatgaccacatagtccgcgtacagaactgctccgtaggtgactaccaagcaggcgatgccacagggatctcggataaaaaccattgctctgctgcctgcgtcttgttggactgacctgggtgatattgcctctccgccccttctatttaattcaattagaaaccgaaggggctgatgttcctagcccccctccccctgaaaatcgagggccgaaaaataacaattgttgctgtagttcctcggctcgtctggcgaccaccgatccactgctgggcgggatacgaggctcctggtggcggtctcgtcggctgccgcactttgcccactcactgctgggtgcacgattcacaaatcgagcgtttcatcgaaattttagggcttattttacgcttgaaattgtcatttatttatttagggtgaccgtttgcgggaagcgcgaaaatatagcatggcccacgaactggaactaagtaaggcatgggcttagaaaaattaatttaaaaggggttaaattagaaaaaggtaatttaagtaagttactaccaatagatttttatttttaagcagttttcagatttcaaaaatatactccaaacttcattaaatcttataaaccgtttattaaacataaaagtaaaatctgaaataagtcgttacacaatgcaaactcgaaaccagtcaatttctggccgtgttctccttgccgcgctcccgtttctgcagctgcagctccctttcggccattcccgccttcacccaataatgggtcatcacatccaccaaggtgatgcggcccttgctttccttgcgaagcagctgcaaagatgaaatccctgttcaataaatggatctcaaaggaaacatcttccaactcaccccgccaatcaattccttgcagcccttggacaaatgcgatgggtaggagatctccatgcgccggatcttgctgtaggtgctctccgtgctgttcgactcgaagggcggacagccgacgacgaactcgtagcacagaatgcccaggcaccactggtccaccgagtcgtcgtaggagttcccatccaccatctccggcggcagatagtccagggtgccgcacagagtcctgcgcttgttgttcggcgtgtgcgccgaccaaccaaagtcggccagcttaaggtcgtccgtgctggttagcagaatgttctccggcttcagatcccgatggatcacgttgttcaggtgacagtagttgagggcattcgccacttggtaggtgtacttcgcagaccgcggttcatcgaatcgatgattgggtgcgccacgcaggtgcttgaacagctcgccctcggacgcaatttccagggccagatagatgcggctctcgtcgtggaaccaagtgagcaggcgcaggatgtgcgggtgcttcagtcgcgactggatctcgatctcgcgtagaacctgacgctgcacgcagcccttgcgcagctcctctttgaacatcaccttcatggccaccagatagtgcgagtggcgctcccgcgccaagtagacacgtccaaatttgccgcgtcccaagtgggcgcccatctcaaagtcccggggactccaatcgtatctggagggagcagattaagtacggattgatacattagcttattgcttgtacgtacggctgtccgtatgcgtcgtgggacatcatcttgaggcacatattcttgatcggctcctggtgctcctcgggcaccttggccagcaggtgcggcaggtggttgcggttggcgtgcttcgcgcgggaaagcgtcatggcgctgacttgtttataatattatgatttttaagtaaattaattattttaagttgtattttctataagcgtcccttttgtttgcgcgtttttttcgaatgctgagattagtgtgaccgcatgctagaatcgagttattctgtgactctcagtgaagcagttaagtcactgtatttttaaattcggtcaacgtataataaaatattttcatgtttcttaaataaaaattaatcttctagttttgttcttatattgtgcatagttattataatatacgcttctcacccgtaggagaatagtttgagtgaagggcatagaaaactgtttaattattataaaccatagctaccagtgctcaaatcatatcagatgtttaatagatttatattattagttgtctaaatttatttaaatatacaatatcaataatatttatatgtatatataaataaaaatgttttgcataatataagtctcgaatacctctaactaaccattgaaaatgagctgcaaaaaatcctttggatttcccgactattcgcaatctggccacactcgccattagtcattttttacacaataaacgtaaattaagcgaatttgcaagcgctattcggaagtttttaggctaatcgaaaagatataagcagcccaaaagagatttggaaaaaagcgaaaaggtctacgcaggaggaagtacaccaaaagcgtgctttcagtcgccgtgacgcaccgaaaatcgattggagaggaaaaacaatagggaaaacagacaaagatcaactgatttggatttattgaccccagggcagcgcagattattggcagatagccgagcgagcggtttggtcataaagatgggaatctttgggcagtcgtcgccattcgacgccgacgtgggtgagttaccacttatcgttaagctgttgtgttggccgattggacaagccgatgttccaattggactgcacaacggtccaatatgcgtttcatagttttctattcttatctggggtctaaaaacccgcacaccacaccattttcccctgttttccctatgaacccgatcccccgattga

SEQ ID NO: 14387 - DNA, 1154 bp, DROSOPHILA
aaaagggacgcttatagaaaatacaacttaaaataattaatttacttaaaaatcataatattataaacaagtcagcgccatgacgctttcccgcgcgaagcacgccaaccgcaaccacctgccgcacctgctggccaaggtgcccgaggagcaccaggagccgatcaagaatatgtgcctcaagatgatgtcccacgacgcatacggacagccatacgattggagtccccgggactttgagatgggcgcccacttgggacgcggcaaatttggacgtgtctacttggcgcgggagcgccactcgcactatctggtggccatgaaggtgatgttcaaagaggagctgcgcaagggctgcgtgcagcgtcaggttctacgcgagatcgagatccagtcgcgactgaagcacccgcacatcctgcgcctgctcacttggttccacgacgagagccgcatctatctggccctggaaattgcgtccgagggcgagctgttcaagcacctgcgtggcgcacccaatcatcgattcgatgaaccgcggtctgcgaagtacacctaccaagtggcgaatgccctcaactactgtcacctgaacaacgtgatccatcgggatctgaagccggagaacattctgctaaccagcacggacgaccttaagctggccgactttggttggtcggcgcacacgccgaacaacaagcgcaggactctgtgcggcaccctggactatctgccgccggagatggtggatgggaactcctacgacgactcggtggaccagtggtgcctgggcattctgtgctacgagttcgtcgtcggctgtccgcccttcgagtcgaacagcacggagagcacctacagcaagatccggcgcatggagatctcctacccatcgcatttgtccaagggctgcaaggaattgattggcgggctgcttcgcaaggaaagcaagggccgcatcaccttggtggatgtgatgacccattattgggtgaaggcgggaatggccgaaagggagctgcagctgcagaaacgggagcgcggcaaggagaacacggccagaaattgactggtttcgagtttgcattgtgtaacgacttatttcagattttacttttatgtttaataaacggtttataagatttaatgaagtt

SEQ ID NO: 14388 - protein, 329 aa, DROSOPHILA
MTLSRAKHANRNHLPHLLAKVPEEHQEPIKNMCLKMMSHDAYGQPYDWSPRDFEMGAHLGRGKFGRVYLARERHSHYLVAMKVMFKEELRKGCVQRQVLREIEIQSRLKHPHILRLLTWFHDESRIYLALEIASEGELFKHLRGAPNHRFDEPRSAKYTYQVANALNYCHLNNVIHRDLKPENILLTSTDDLKLADFGWSAHTPNNKRRTLCGTLDYLPPEMVDGNSYDDSVDQWCLGILCYEFVVGCPPFESNSTESTYSKIRRMEISYPSHLSKGCKELIGGLLRKESKGRITLVDVMTHYWVKAGMAERELQLQKRERGKENTARN

SEQ ID NO: 14389 - DNA, 3449 bp, DROSOPHILA
ggcggcgggcacagcagccaccaccaggagaagaagcaaaagaagaagctaaccacagcgctgacgttgcccacagtgcagccgacggccggctcctcgtcgggcaactcgattggctcgtcgtcgtcgattagtctggaatcggtgaacaagctcaccacgtcggcggccctggcggcggcatcggccacgacaacctacatgtctgtgggtggacaggcgctgctcgccatgacccccggaggtggaggcggaggcaacttggcggagagttccgctgagggcgtgcccgccggaatgattgccatgaacctgcccaccaccacggtaacgcccggctccagcctgaccatcggcgagaacggactcgtggtggagcagacgaacgagggcgaatggtcgtacgatcccaacgagccgcgctactgcacctgcaaccaggtgtcctacggcgacatggtggcctgcgacaacgacgcctgtccctacgagtggttccactacccctgcgtgggcatcacccagccgcccaagggcaagtggtactgccccaagtgcaccgcctccatgcggcgccgtggcaaccgaaagaactgaggctgactgcgcctgctggcgcccctcttccgtggcgggggcggcggcgtaggcacctggtcgcgtcgctagcggctcttatacttgtaaagtgacaaataaacaaattcaaagtattcaataaagttagatcagcaatagagcagctctttatattcagttcggaacgcaaaggcgaatagtggattgggattgcactaatatatcttaactaaagtagtttaagccagcttctagcttaaataacaaatttagggtgttttcgctacaataataataaacaataaaatatagttcattcgatagtttgatttcaaaattcgcgccctcttggcaatcaaacagcgtgaccatgctgcgcttgctaaagcactctggtcacgctgaacagaagaaaagaaaatttccagcgtcatttgtgcattgcaagttagtaaacaataaaagcgcataaacagggctaggaaaagcgggaagacgattaggtaaacagaattcgacgcaaatcggttggaaaaacggcctcaagattggcaagatacgcaagagcaagaaaatgagctacaacgagaaatcggaggccatcatcaaggaggagtggctgcagcgcctggagcagtttcccttcaagcaggcggacatgaatcgcctgatcatgaactacttggtcacaggtgagtccgggtcaccagcccgcagccacagcaagcagctaatcaagggctaatccacagagggcttcaaggaggccgccgagaagttccagcacgaggcggatctggagcccagcgtggagctgagcagcctcgatgggcgcatactcatccgcgaagccgtgcaggcgggccgcatcgaggaggccacccagctggtgaaccagctgcatcctgagctgctcggcagcgatcgctatctgttcttccacctgcagcagctgcagctcatcgagctgatacgcgccggcaaggtggaggaggccctgtcctttgcccaaagcaagctgtccgagtccggcgaggaggccatgtttgagctggagcgcaccctggccctgctcgccttcgagaagccgcaggagagccccttcgccgacctgctggagcagtcgtaccgccagaagatcgctagcgagctcaactcggccatcctgcgctgcgagcagagcgaggactccacgcccaaaatgatgttcctgctcaagctgatcttgtgggcccagtccaagctggacagccgctccattagctatcccaagatgaagaacctagagacggcgcacctggagcccaagtagaagggcagcgccacccccttcgacttcttttgctaatgctattgctaatatatctccatttaataagtatgtatatgtatgtatgctggatgtaggcagtgaattattaaataagtagccggaaactccatcactccatctatccatccatccgacttgccatcagcccttcttaccagccgaatatcaggtccatggccttgtccatcagaccggagctcttttgcggcacatccttctgcggcgatatgatgttatctttgcgggccagcttgtacgactgctgggaaaacggtcgaatcgcactggggctggtggggggatctcctatctctgcattgggcacagagccgatgttctccttatcgatcaccgacctatccgtgcagcgcgacacgcccaccatcacattgccggcgatgattttttcgttgtagttcagcgccttgtcgctctcgatgcgcgaggagtagcgcacatacatccagttgccgttctgcggggcatgcaccacgtccacaatggtgccgcagacggtgaagtgctgcagcaccatggagccggcccccggcgggaacccgaagatggtaacccaaaagtcggataggcgcgagttgccgcccgtcgtcacggatgtgcccaggcctccagctggcgaggcagtggctccaagtggcgagcacagtgctcgcatcgaggcattgatggcattgggcgccccgggtgcgaacgagtcattcgtgtgatagctgctctggtagctctggttcggtgactgcaactgcagcatgccaagatggttcttcttcttcggggtgacggactgttcgcgcagcgagtcgaagagtccctgggtgggcggtcccgtctggtggtggctgtgcgtctggccgtgcgcggtcgttgagctgttggcgcccacagccgtgtgggcgcctccttgggcggcgaacagagtgcgtgtgctcagagcggagcggttgagctcgtgcggactgctgccgccgggcgaggtggctgcggggcatgtgttcatatagccaatgcgtacgagctgcttgatgccggctacttaccgaaacttatattagagcgcccggttttcggggacagcgtgttcttgtgcggcgttataccttgcggatcgccgagcagaaaaggtggcagatactgggtctggttggagccaggactgttgaccgggctgcccagattcattggctccatatcgaatgcgaatattaattataataattataacggcgaaaaacgaaaaagcgttgcattaacaaggacgccacagctgtaatcggttagtgcgaccaggctgggctggggtcgaaatgctagaggtggatgccaacatcgatgtcatcgatgttttcgaaaaatcacaaacatcgatgtttttcaaagaatcatcgatgtttttccatctttactgcgcatcgtaggttaaaagtgtttaaattgtgagtataaattaaatttccaaattttccaatttccatttattaatagcatattgcaaattttcagtgacttgctggtggtcttg

SEQ ID NO: 14390 - DNA, 1389 bp, DROSOPHILA
tttccagcgtcatttgtgcattgcaagttagtaaacaataaaagcgcataaacagggctaggaaaagcgggaagacgattaggtaaacagaattcgacgcaaatcggttggaaaaacggcctcaagattggcaagatacgcaagagcaagaaaatgagctacaacgagaaatcggaggccatcatcaaggaggagtggctgcagcgcctggagcagtttcccttcaagcaggcggacatgaatcgcctgatcatgaactacttggtcacagagggcttcaaggaggccgccgagaagttccagcacgaggcggatctggagcccagcgtggagctgagcagcctcgatgggcgcatactcatccgcgaagccgtgcaggcgggccgcatcgaggaggccacccagctggtgaaccagctgcatcctgagctgctcggcagcgatcgctatctgttcttccacctgcagcagctgcagctcatcgagctgatacgcgccggcaaggtggaggaggccctgtcctttgcccaaagcaagctgtccgagtccggcgaggaggccatgtttgagctggagcgcaccctggccctgctcgccttcgagaagccgcaggagagccccttcgccgacctgctggagcagtcgtaccgccagaagatcgctagcgagctcaactcggccatcctgcgctgcgagcagagcgaggactccacgcccaaaatgatgttcctgctcaagctgatcttgtgggcccagtccaagctggacagccgctccattagctatcccaagatgaagaacctagagacggcgcacctggagcccaagtagaagggcagcgccacccccttcgacttcttttgctaatgctattgctaatatatctccatttaataagtatgtatatgtatgtatgctggatgtaggcagtgaattattaaataagtagccggaaactccatcactccatctatccatccatccgacttgccatcagcccttcttaccagccgaatatcaggtccatggccttgtccatcagaccggagctcttttgcggcacatccttctgcggcgatatgatgttatctttgcgggccagcttgtacgactgctgggaaaacggtcgaatcgcactggggctggtggggggatctcctatctctgcattgggcacagagccgatgttctccttatcgatcaccgacctatccgtgcagcgcgacacgcccaccatcacattgccggcgatgattttttcgttgtagttcagcgccttgtcgctctcgatgcgcgaggagtagcgcacatacatccagttgccgttctgcggggcatgcaccacgtccacaatggtgccgcagacggtgaagtgctgcagcaccatgg

SEQ ID NO: 14391 - protein, 225 aa, DROSOPHILA
MSYNEKSEAIIKEEWLQRLEQFPFKQADMNRLIMNYLVTEGFKEAAEKFQHEADLEPSVELSSLDGRILIREAVQAGRIEEATQLVNQLHPELLGSDRYLFFHLQQLQLIELIRAGKVEEALSFAQSKLSESGEEAMFELERTLALLAFEKPQESPFADLLEQSYRQKIASELNSAILRCEQSEDSTPKMMFLLKLILWAQSKLDSRSISYPKMKNLETAHLEPK

SEQ ID NO: 14392 - DNA, 6552 bp, DROSOPHILA
agtttctaacttttgccggcttcccgtactaccctacagaattggtggacaaatgcatcggttcccgcatccacattatcatgaagaacgacaaggagatggtgggaactctcttaggattcgatgactttgtgaatatgctcttggacgacgtaacggagtatgaaaatacccccgacggccgccgcatcaccaaactggatcagattctgctcaacgggaacaatatcacaatggtgggtgctctttttcgaagttacatacgtttgtttattaaatttcatttataatttgatttcagttggtgcctggcggagagctggcggagtagcaaggttccatttgtaaacataaatacatttgtaaaatatcaaaacggtcgttttaatgtggataatattgtgtcgtatgtaaatgttcgaggtatgttagaagttagcagtggtcaagtgattaacagcaatgttaacagatttttggtcctaacagatacgaatttgaaaacgcttggcttaggaaatgaaaattatttgccctctaatctcagaataaaacactatataatattacctaatatacaaaacattgttaaattatcaattggaatagaattaattttacataaataagcatattttatgcttatagggaccggatacacttgaaatggaataccgaaaaaggtcgaccgctaataattctgtaaaatgacttccaagcttcaaaaattcaaacttcacattaaatatttagtgtctttccgttaacattcaaccgctacttgtgctctggctgccatgcaaagtaggcgcatgcgctccatccccaaaatgttgggtctcagcgatacagcagtcaacatgtgccataaatattaaccgcttttcccttctggccgtgcgtgtgggtgcagtgcactctccgcagtaccgctctgctctgcgtgcgttctcccgcttccgttcggcacctccagcgttcagtacggcagcaggcttcgacggaagtggaacaaaccaagcggaaacagactcacgcgacaacaaaaccgaaccgaactcgaatatggaaaacttttacccagaaccgatatagcactgataaacgcaactcggagtgaactttatgaatggccatgactaattgcagtcatctagcagcagccacagtcgatgtgtgaacttcagtggtgaaggttgtccggttttgcagcgaaagatacccgtgtttcggtatctgtatctgtcggtgtctcatttgagcggctcgaatgatccgcctgtaattatgactgcgtgaagaaatcaataagtggaggatggccagcaagcccatgagcaccagctgccaaagcattgcgacggcggccagcagtgcggccaccacggcggcagcggtgtccatctcggcctccaatgccacctctgtaggctccctcatcgccgccgcctgccagcaggagcagccacatccccaccagcactattcccagtcccagcagcaacacctctatcatcagagccatcagcaagcgtcgcactatgtcaatggcaccggcagcttgggcaggctcaagttccacaagagtctcgatgccagcgacgaggaaatcgagtatgcgcaggtatgtccaagtggccaagtatccaactgctagtcggaatcgtctccaactgaattcaattgtgccccacactgagtcataataatgcgacaaggtcctgcactgctggctcaattgaatttgtcttgtgggtggtggcggtgttgggtggtgtgtgatggatggtggttgcttgctgccttgttgagtgggtgtacttgggggtggtttgcgcaacctagctcccatcccagtgcatttgctgcccccacagctgtttaacccaccagccgggtcgttatgcatagtttacgcttcgccaggcaacctcaacagccgccaacaaccgccgtcgtcgatcaagtgttaataattcaatgccccggaaatagtcatatattgaaatatatcgtacaccctgcgagcagcttagtccctgcaagggccttgactttggccaaggcaatttgaaaaattaaccagttggattaatttatgggtcactaaatgaaaggggcatgtttgcgagcatgccatatttacagcaccattaatggggagctcggtcaaaatttctactaaagtcacgatatgagccacaatataaaaatgaatgcagttaatacagctttaatttgaggactacacctaaacacagtttttactagaattaatggaattaaacttacatactcaaatgaattaaaccgttcataaggcagaaacgatgaattcgtgcaccattttttttatagttttctaactcattttctccgcgttttcttttttaatgaaaatctttacaatttcatttaaaacgggcactgtatttctgtacataatgccatacaatttgctcttccttgccgatggcattatagtcggcgggaggtctgttctaaagcctttcaagccagttattacgcccgcacaaaaaagcgttaatgaaagaactgtgctgtgtctctatacttagcatgttgtatctaaaaataggtgtcatcgatataaatataaaaatattattagtacacttgtttataccatgaacttttccgaaactttaagcttgactatcttacaaatattgttttttgttttattctactaccaacttgttaatccgtggaaatggcttgcatggtattattttgtccgtacctgtattctgggttggtttgcttttccctatctaacccgctttcctttcgggggggcagtgaaagtgttgcctgctgggggcttcatcctgtattcatagaaatgctttcaataaaagcaggaagaacagtagggacgaaggaatgggcttggcaaacatcattttgatggtttgcaccaccacacctggcggctatttggtgtgccacattgcctagacgtgcaaatacccggaagtgccaacgatagtttagcatataagcttttcactttcaccgcaaatcaacacattcctttcacagatagagagcacagctctccaatggccaatgtggtttgaattgctatagagaattgcgttcttgctaaaggaattccatattattgtacaatattacatattatgcacgtttaatatttaatgacattccagttatcccgttctacccatatccttgggcgccacaaatccgagcgatatctggcctccaatccggacgaggaccgaagacgtcgcaccataatcgttgagaaaaagaacaactcgtatggattcacgctgcagagctacgggatccactacaaacgggatgaggagctggaaatgatcacatacgtggactacgtggagtacggaggtccggcctatcgagctggcatgcgtgagggagacgtaatcctctccattaacggaaaagatatggagaaggcggaccacaagaccatcgtcgagttcatcaagcaatgcgacaccaggatgagaatggtagtgcttttcgaggactgtgtgaggaaggtaaagtatttaaaggatagaaaactaaaacgtatttctgataaacgtgtgattccccaggtggatctccacatgcgctacatccaactgcagagcatgttgcagcaaaagatgaacgaactggagagggtacacctcagagagcgtgagttattggagggcaagtggaaaacgcacagtttgccagcgcgtaagaaggccaatgcgaatacttcgcccagtgatggagaaggagtatcacccacagaggtggctggtgaagctggcttctaccgacccgctttgtccaccgaggatgtgcccaatattgccgcccgccagcatggggtcggtggcccaggaatcatacctcctcccgctcaatttatgctcacctaccactacctggatcccacataccgctacgtcctgcgacccacgcacggcagctcagaggaattcgttgacggattgggtcttcagcggagcagtagtgatcaccagccgccggcacagcgctatgtcctccagcaaaccgaatctgtggatgcaaattcgatgactcaacccacaacaacggctcctacccaatatcacagcaccacgggtggatcggtgaagccacccgcaccacctcctcgcacctgtgaaaagcacaagccacctgctaagccaccaaagccagagaaagaaaagtcatcgggcaagcattgccatgtgggacactcgtgcaatccctgcttgggtcactttcgctggaagtcggcggagaagtcagctgttccggcgccggataacgtgagcttggatgcctatgatctggccagtccgtgctgcgatacacattgtgtgccatcaagaagacgtcatcggcagcataaggagcacacgcataagcacaaacatcgtgacagggaacgggtggagagcaaggagcagagggtcagacccaagtccacatcccatgcctcacccaatgccaacgggggtgcaggatctggacatcaccaccatcatcatcatcaccatcatagccatgagcagcagcagcaacaacagcaacaacaacagcagcagcagcagcaacaacagcagcagcaacaacaacagcccattcagactgttccgcaccaccaccactatccccaccagatgcacaatccctgccaggtgcaatcccaaagtggtagcacccgatcccgctacttcgacttggcatccggcttagccagccactgtagcttacattcctgcacctcaagtgagtttgctacaggagacacagcttcatataccacatccataagtacggatactttgttttgggatcccacaagtgagacggctcagtcccgacagcactccacaaaatccaggcagtcctacgagcagcagccacaacagcagcagccaactcaccagggacaccaccaccatcatcatcaccagggggattaccaccaacgatatcatgtgaccaccacacaaatgcaaccgcagcagatctatcccaacactatagcctatgtccagaaaccaaaatcctgggacaatctagccaacaaggcgggctttaatgtgggttacggttaccttgacactgtggccgttaagccagccataaaaatgcaaattgcccagcagcgtcactcgatgccgcgaaggaacccgtacggcagatactccacttacggcgatgtggagaactatgccccaccgcccaccgagtttgtgggcgagctgaccaccaccacaaccaccacaattacggccaagtccacggaggagctgttggccgcctgcgattgcttgacgcctcagcaacaggctgccattaaggcggcccagtaccaactcagtcaaaatcagaagctgtcccaccagaactcctgccagttgggatactactcgcatctgccgcgacctaccactgatgtgggcacctccaccactagtcagcaggtgcatggtgcaggagatgtccagacgacttcggaggccaccagattgtaggtcaaagttgtctagaccgtaacgagatccgtctcaagaataatatgagtgcaccatgggtagagggtgatgatcaaatagttttgaagtttgataggcgtgttcagttaatagaggtttaaaactaaatgttattttaaatgagaaagaattgaatgagtatgaaaaaaaatattgaatagaataaaagtcgaatcaatcattttgattagtctggtaattaaattattatttaaaaataaaaatagaattttctttctaaactgatatctgtatattcaatgttgtgtaatttttgaacaaaattatattaggtatttaaggaatagataatttaatattttgtagcttgactaaaaaatgtagaaaattatttgtttggtatccaaatgtagtcaatggtgaaaaaaaccttcttaaaaaagataagaatttagtactcattccaaacttacctcattcaaatcaactcacacgcctaacctgtgcatgattcacttagttgaaccgctcatgagtgcactcatattctgatccattcgcgtcttcgaaaaccgaacatcgaactcatttgaaatggtaactagagccaaattttaaacatataactcagacaaaaatcaacatgtagcttaactattcaataatatgttaagtgagttttataaatgtaagataaatatttagcatccaaaaaccgcaggacaatacacagagataagcccaaaagaagatacttctaagagtagatgattcagaaattagaacaccttaagacctataaaaactaaacttatagctatcttctgtttgtgaaactcacttaatatataggcgatataactaggacgctttgacgtttagatttttggatttattgaaagactgaaaagccacgcgcatattccaaatgagagaaaaatctggcgtcttgtaatgatagatagaggattatatatgtatctgtatttgccatataatatggttaacctatcatgcg

SEQ ID NO: 14393 - DNA, 2919 bp, DROSOPHILA
acggaagtggaacaaaccaagcggaaacagactcacgcgacaacaaaaccgaaccgaactcgaatatggaaaacttttacccagaaccgatatagcactgataaacgcaactcggagtgaactttatgaatggccatgactaattgcagtcatctagcagcagccacagtcgatgtgtgaacttcagtggtgaaggttgtccggttttgcagcgaaagatacccgtgtttcggtatctgtatctgtcggtgtctcatttgagcggctcgaatgatccgcctgtaattatgactgcgtgaagaaatcaataagtggaggatggccagcaagcccatgagcaccagctgccaaagcattgcgacggcggccagcagtgcggccaccacggcggcagcggtgtccatctcggcctccaatgccacctctgtaggctccctcatcgccgccgcctgccagcaggagcagccacatccccaccagcactattcccagtcccagcagcaacacctctatcatcagagccatcagcaagcgtcgcactatgtcaatggcaccggcagcttgggcaggctcaagttccacaagagtctcgatgccagcgacgaggaaatcgagtatgcgcagttatcccgttctacccatatccttgggcgccacaaatccgagcgatatctggcctccaatccggacgaggaccgaagacgtcgcaccataatcgttgagaaaaagaacaactcgtatggattcacgctgcagagctacgggatccactacaaacgggatgaggagctggaaatgatcacatacgtggactacgtggagtacggaggtccggcctatcgagctggcatgcgtgagggagacgtaatcctctccattaacggaaaagatatggagaaggcggaccacaagaccatcgtcgagttcatcaagcaatgcgacaccaggatgagaatggtagtgcttttcgaggactgtgtgaggaaggtggatctccacatgcgctacatccaactgcagagcatgttgcagcaaaagatgaacgaactggagagggtacacctcagagagcgtgagttattggagggcaagtggaaaacgcacagtttgccagcgcgtaagaaggccaatgcgaatacttcgcccagtgatggagaaggagtatcacccacagaggtggctggtgaagctggcttctaccgacccgctttgtccaccgaggatgtgcccaatattgccgcccgccagcatggggtcggtggcccaggaatcatacctcctcccgctcaatttatgctcacctaccactacctggatcccacataccgctacgtcctgcgacccacgcacggcagctcagaggaattcgttgacggattgggtcttcagcggagcagtagtgatcaccagccgccggcacagcgctatgtcctccagcaaaccgaatctgtggatgcaaattcgatgactcaacccacaacaacggctcctacccaatatcacagcaccacgggtggatcggtgaagccacccgcaccacctcctcgcacctgtgaaaagcacaagccacctgctaagccaccaaagccagagaaagaaaagtcatcgggcaagcattgccatgtgggacactcgtgcaatccctgcttgggtcactttcgctggaagtcggcggagaagtcagctgttccggcgccggataacgtgagcttggatgcctatgatctggccagtccgtgctgcgatacacattgtgtgccatcaagaagacgtcatcggcagcataaggagcacacgcataagcacaaacatcgtgacagggaacgggtggagagcaaggagcagagggtcagacccaagtccacatcccatgcctcacccaatgccaacgggggtgcaggatctggacatcaccaccatcatcatcatcaccatcatagccatgagcagcagcagcaacaacagcaacaacaacagcagcagcagcagcaacaacagcagcagcaacaacaacagcccattcagactgttccgcaccaccaccactatccccaccagatgcacaatccctgccaggtgcaatcccaaagtggtagcacccgatcccgctacttcgacttggcatccggcttagccagccactgtagcttacattcctgcacctcaagtgagtttgctacaggagacacagcttcatataccacatccataagtacggatactttgttttgggatcccacaagtgagacggctcagtcccgacagcactccacaaaatccaggcagtcctacgagcagcagccacaacagcagcagccaactcaccagggacaccaccaccatcatcatcaccagggggattaccaccaacgatatcatgtgaccaccacacaaatgcaaccgcagcagatctatcccaacactatagcctatgtccagaaaccaaaatcctgggacaatctagccaacaaggcgggctttaatgtgggttacggttaccttgacactgtggccgttaagccagccataaaaatgcaaattgcccagcagcgtcactcgatgccgcgaaggaacccgtacggcagatactccacttacggcgatgtggagaactatgccccaccgcccaccgagtttgtgggcgagctgaccaccaccacaaccaccacaattacggccaagtccacggaggagctgttggccgcctgcgattgcttgacgcctcagcaacaggctgccattaaggcggcccagtaccaactcagtcaaaatcagaagctgtcccaccagaactcctgccagttgggatactactcgcatctgccgcgacctaccactgatgtgggcacctccaccactagtcagcaggtgcatggtgcaggagatgtccagacgacttcggaggccaccagattgtag

SEQ ID NO: 14394 - protein, 861 aa, DROSOPHILA
MSTSCQSIATAASSAATTAAAVSISASNATSVGSLIAAACQQEQPHPHQHYSQSQQQHLYHQSHQQASHYVNGTGSLGRLKFHKSLDASDEEIEYAQLSRSTHILGRHKSERYLASNPDEDRRRRTIIVEKKNNSYGFTLQSYGIHYKRDEELEMITYVDYVEYGGPAYRAGMREGDVILSINGKDMEKADHKTIVEFIKQCDTRMRMVVLFEDCVRKVDLHMRYIQLQSMLQQKMNELERVHLRERELLEGKWKTHSLPARKKANANTSPSDGEGVSPTEVAGEAGFYRPALSTEDVPNIAARQHGVGGPGIIPPPAQFMLTYHYLDPTYRYVLRPTHGSSEEFVDGLGLQRSSSDHQPPAQRYVLQQTESVDANSMTQPTTTAPTQYHSTTGGSVKPPAPPPRTCEKHKPPAKPPKPEKEKSSGKHCHVGHSCNPCLGHFRWKSAEKSAVPAPDNVSLDAYDLASPCCDTHCVPSRRRHRQHKEHTHKHKHRDRERVESKEQRVRPKSTSHASPNANGGAGSGHHHHHHHHHHSHEQQQQQQQQQQQQQQQQQQQQQQQPIQTVPHHHHYPHQMHNPCQVQSQSGSTRSRYFDLASGLASHCSLHSCTSSEFATGDTASYTTSISTDTLFWDPTSETAQSRQHSTKSRQSYEQQPQQQQPTHQGHHHHHHHQGDYHQRYHVTTTQMQPQQIYPNTIAYVQKPKSWDNLANKAGFNVGYGYLDTVAVKPAIKMQIAQQRHSMPRRNPYGRYSTYGDVENYAPPPTEFVGELTTTTTTTITAKSTEELLAACDCLTPQQQAAIKAAQYQLSQNQKLSHQNSCQLGYYSHLPRPTTDVGTSTTSQQVHGAGDVQTTSEATRL

SEQ ID NO: 14395 - DNA, 5588 bp, DROSOPHILA
gatcaagttcttaaagaatccccgcagcaccgcctccacacgcagctcgtatacaatggtgatgacgccgctcatctgttcatccgtcggctgggctccatcgggcaggagcagctcgtgcgcaaaactccgctcggtcttcttctgcaccgagcccgtctccttggtggccaccgctatgcactccaccttctgcacccgcagtggtacatggctgtagtaggtcacgtactgcaggacggtaaagcgcagcttctccacagcggtggtgctgttgttgatcacagtagcgcaaatcctaagcggctctccgcgcaccgcaaaatcttcgggcagaagggccaacagggtgatcggtctagtgccaaacaaactgatcgtcttggtcacctgcttctccagcgaactgggtatgctgcgttgcatcggttggagcggcatgttcttcaccacggtgaaaggaatcgtgtggcgctcgtcgaaggtccatggtcgctggatgagcacgcgcatcttgtacttgatggcgccatagctgcccttgaaactcgaaggtagctggcgacccagcgccacctcgaagatgaacgtgtgctccccagccgaaagttccaggccacgcggctcaaaatccggcagaggcgtctcgctatgctcgtacacctctttgctggtgtagaacagactgcgggagtactcgttgttgttcgagttcttgcgcaggatctccatccatttgcattttcccttgccggtgacctgcaccttgatggctgaaattaaagttaagcttatattaaacaaacttatttaattacaaattcaaacgtcttaaaatttaaattagctaagtttttatccatgctagcgttgccagccatttcacttagcgagtgcaaccaccacagcagcagagttgccaagtctcgatattagcgatagtagtgtgattgcattttctttacatttttcagacgccgtatggtattataagcgttagcaaagacgggcctattaatattttcacgtacttttcacattttggcagaaattcaatcaggaaatccttttgttaatgcctgctatactcataacaagaccattaattgtgtagcgtttaaggaaaaccgaaagagtgagctgcttcacttgccccgagtgactggaaatctaatttgcgtttattttgacgcaaaaccggtgccgacattttctcgcccaattaaattgagtgtggattttgccgcatcccgttccctttgccctttaaaaaaccttgatctttaaatgttgtaaagcaaagtggtgcgcgctgccaagatgaacttcgattacatcggccaggccctgggctaccacgggcagccgctccagaagatctgggacgacgagcgcggcgtggacgacctgcggctgatgggactcacccaggtgaactacggggtctaccaggagcggcagaagtacttcaccttccaggagcgggctaagcgattgaagatgcaccagtttctggccaggaaggccaccgatttgtatgatcgcacgctggtggccaatgttatggaggattccctgctggcacaaggtgggtttagggtctatgagtttgagtggtcaatggataactccagtgctatgttctttgcaggcaacacatacatgactcagatggcccccttcgagttcttcctcaatgtgaaggacaaacgcaagggatgggcgcaccgattgtctgcactgaagcagggcgacatcatctacacgcaggtgacacggctggccagcggcaaccggctcatagtgaagccactctgcactgctgagcccaaacacgcctacttggctgacattcccataaaggtaacagccaagacctttatttgcgtcatatttcgcatactaatcatatctattctacgtcgtaggccgtgatcctgcaggacttctggggtcccttgcccctggacaagcagggcaatccgcgcagctttgtccagaatgacatcttgcgctgtgagataaacaacatatccgcggataccgagcggctctctctgaacatgatcggcatgttcaataaggtgccggatttaaagtttggtctctgcgactttaaggagttgcccaagtattataggtaaagcatcgtttttaaggcatattttcaatcgtgtttaacgaatgcttcttctgtagtaaaatacataacctggatcatccatctgcgtctcactacgaggatgagctaaacaaagccttagagtttgaaaatcccaactacgatttgctgttccaaatgaacggactgcagccaaacgagaatctgtcactgatgtcatatttaagggcgggattcccggaggaggagaacgccgcggagttgcgacagaagcaggcctcccagtgggccttccggtaagtctatatactgaccttaagccttgagagtgtttgtcattccatcattcgcacaccctatcgcacccaacacccaacttcattgattggccgctgatcagctccgtggctgatggcatcgaacactttaagaacggccaacaggtcgaggcctttcagtgcctgaacaaggccttaaacattgatccgcgcaatgttgaggcgctggtggcccgcggtgccctctacgcgaatcgcggcagctttcttaaagggctgcaggactttgagaaggctctgcacctgaacaagtatcacgtgaacgcgcgcaaatacatgggcgaaacgctggtggctctgggtcgcagctacgaagaggagaatcgcatagccgaagccgtcaaggcctatagcgattgcctaaatctgttgccgctgcacgaagaagcacgccagtccctggacgcactgcatcgaagtggagacggtaagcgtagaataagcactgagccgtcgaacatgaccggtggccagtcctcggacgagtcctcctcatcgagtgccagtgatagtgaatgcgaagattcgggtgagtacatgtggtggggtcagtgcatgggggctttgctagctagctagctaagcactgatccaccgtttattattccctcatgaacactattcaaaccgataactcatttccaattttagctggtaagcccaagtcaaacattagtcagcccttttatgcccaacacaagctaaagcaatcgggagatgaaaagttggccgtcattgatgcccataaggccaatgagttccgtttggacgacgacgagaccgtgtcgagtgtgcggaagcttttgcgcgaggcgagcaaacacaagaaggccaagaagaagggaaagaagaaaaaggacaagaaggagcgaaggaggtccaggaccaagtccgaaacggaggatcccattgaattgcttaagaagatcgacttccaggaggccctcaggtgagttttgcagctaaagaggcttattgcacaataagtatacattttcttgagattctccctgcctaaccaactgggatagacaagacaacaagtatgtaccaggaattatttagcttgacttccgaactgcaattgcatcctaaacgatgttccttcaaatctgggatgaacaatgcggttttgttgtcaatgctgttgaatattttacaatacgcagttaatgccacagtttgtgtttcttttaggctcatgaacagcaccaggagcgatgaggaacgcaaggccaagatcaagagctatctaaaagaaggaggaaaagagtcaccacctcccccgccaccaatgaaaaaaacagcagtctcatctagaaagtcaagctttgacaatgtgggacccagcacatcgcgtcatgcggcctccgttgttggctttggaggcgcccagccaccaccagcgcccaagtttctggggcaaaagaaacatccggagccggcacccaagctctcctttcagattaagaaacgaccgctgcagatggacaagctgggaatgctgcgtctagcagcgccagcggagccactcaagggaggacggagcagcagctcccgcagccggagtaggagtagaagccgctcgcgaagtcgctcacgtaatcgtcggcttggaaggagcacgcgttcgtcgctcaggagccggcgttctggctcgaggtccagatcgattagccgatcacggtcgcgtcgccgacgtacctactcccgttcgcgcagcccctcgccacgcagttacggaaatcgctttgtgattggacgctaccgtaatcgccgaactcggcgttcgcgctcctttcatcgtcggcgttctccatcgcccattttgaaacgccgatcgccttcaccatttgtgccccgtcgcacaccatcgccggcatcccgctatcgacgcagccgatcccgcagtcgctcccgctcacgcagtcggagtcctcgacgctttcagtctcgctacatgccgagggatcgtggctccgtgaatcgaagcaggtactcctggcacaatccccataaacgcagtgtatcacgcaccgtggagccaaatggcaaagatgaaagggcagctactccgccgaaaaagggtgttgctgatgatagatctggacgagaagaaagggcgtaaacagggcctcgcctacgagtcttaagtttccttttagctgatagggtacatttgatttgatattcaaatttgtaaaacgctccctttgggaattgttcattggtcactaaataaagaagcttgcgaagcgaatttattacaaactataacaatcaatcgattattggttcttttcagacaacacgtagcgtaaagtaaaatcaggaaattgtcggtatttaaaatttgaatatagcgtacaaacatataaaaatgtaagtatatgaatcgcatatctatgcaaaattaatcaatgttaggataagtacttcaaaactaaacacaatagtttgtcatttttgtatttcagatatcagattctgattttgcacatggaatgaactgaaagtccaacgcgtagtgagagtgtaagagagccccaatagagagcgcaatatcccggagagtgtatcccccgccgtgccccttatcaacacttcacgctgcactttcgcagtgagagacggagagtaagagaaaaagtggttaaagaggggacgaacacccggctgttagtgttagttggggctcctaagagagagctaaagcgagagagacaagtctggaagctaaacaacaagcaccaagcaaacacgaaagataacgacttgtttcatttgatattcgccagccggcagaagcggaacaaacaaaaaaaaagaaaaaacaaacttcggacgccgcagctgcggacacgaaattagaatacttacggcgacaagttatcgcacaaattagtacgcgaacgagaattgctaccgagatacgtcggcggacacccgaaatttttcccaaaaaccaaggtgccgtgtaagtgtgaaaggaggtggtttttaccagctgctaatttatataactatgaaagccagtaaaagtgcaaggccgcgtgcagtgcagaaatgcagaattgcagaaaaacaacacaacacgcgcgacattaacactaaacacgtacatatat

SEQ ID NO: 14396 - DNA, 2927 bp, DROSOPHILA
caaagacgggcctattaatattttcacgtacttttcacattttggcagaaattcaatcaggaaatccttttgttaatgcctgctatactcataacaagaccattaattgtgtagcgtttaaggaaaaccgaaagagtgagctgcttcacttgccccgagtgactggaaatctaatttgcgtttattttgacgcaaaaccggtgccgacattttctcgcccaattaaattgagtgtggattttgccgcatcccgttccctttgccctttaaaaaaccttgatctttaaatgttgtaaagcaaagtggtgcgcgctgccaagatgaacttcgattacatcggccaggccctgggctaccacgggcagccgctccagaagatctgggacgacgagcgcggcgtggacgacctgcggctgatgggactcacccaggtgaactacggggtctaccaggagcggcagaagtacttcaccttccaggagcgggctaagcgattgaagatgcaccagtttctggccaggaaggccaccgatttgtatgatcgcacgctggtggccaatgttatggaggattccctgctggcacaaggcaacacatacatgactcagatggcccccttcgagttcttcctcaatgtgaaggacaaacgcaagggatgggcgcaccgattgtctgcactgaagcagggcgacatcatctacacgcaggtgacacggctggccagcggcaaccggctcatagtgaagccactctgcactgctgagcccaaacacgcctacttggctgacattcccataaaggccgtgatcctgcaggacttctggggtcccttgcccctggacaagcagggcaatccgcgcagctttgtccagaatgacatcttgcgctgtgagataaacaacatatccgcggataccgagcggctctctctgaacatgatcggcatgttcaataaggtgccggatttaaagtttggtctctgcgactttaaggagttgcccaagtattatagtaaaatacataacctggatcatccatctgcgtctcactacgaggatgagctaaacaaagccttagagtttgaaaatcccaactacgatttgctgttccaaatgaacggactgcagccaaacgagaatctgtcactgatgtcatatttaagggcgggattcccggaggaggagaacgccgcggagttgcgacagaagcaggcctcccagtgggccttccgctccgtggctgatggcatcgaacactttaagaacggccaacaggtcgaggcctttcagtgcctgaacaaggccttaaacattgatccgcgcaatgttgaggcgctggtggcccgcggtgccctctacgcgaatcgcggcagctttcttaaagggctgcaggactttgagaaggctctgcacctgaacaagtatcacgtgaacgcgcgcaaatacatgggcgaaacgctggtggctctgggtcgcagctacgaagaggagaatcgcatagccgaagccgtcaaggcctatagcgattgcctaaatctgttgccgctgcacgaagaagcacgccagtccctggacgcactgcatcgaagtggagacggtaagcgtagaataagcactgagccgtcgaacatgaccggtggccagtcctcggacgagtcctcctcatcgagtgccagtgatagtgaatgcgaagattcggctggtaagcccaagtcaaacattagtcagcccttttatgcccaacacaagctaaagcaatcgggagatgaaaagttggccgtcattgatgcccataaggccaatgagttccgtttggacgacgacgagaccgtgtcgagtgtgcggaagcttttgcgcgaggcgagcaaacacaagaaggccaagaagaagggaaagaagaaaaaggacaagaaggagcgaaggaggtccaggaccaagtccgaaacggaggatcccattgaattgcttaagaagatcgacttccaggaggccctcaggctcatgaacagcaccaggagcgatgaggaacgcaaggccaagatcaagagctatctaaaagaaggaggaaaagagtcaccacctcccccgccaccaatgaaaaaaacagcagtctcatctagaaagtcaagctttgacaatgtgggacccagcacatcgcgtcatgcggcctccgttgttggctttggaggcgcccagccaccaccagcgcccaagtttctggggcaaaagaaacatccggagccggcacccaagctctcctttcagattaagaaacgaccgctgcagatggacaagctgggaatgctgcgtctagcagcgccagcggagccactcaagggaggacggagcagcagctcccgcagccggagtaggagtagaagccgctcgcgaagtcgctcacgtaatcgtcggcttggaaggagcacgcgttcgtcgctcaggagccggcgttctggctcgaggtccagatcgattagccgatcacggtcgcgtcgccgacgtacctactcccgttcgcgcagcccctcgccacgcagttacggaaatcgctttgtgattggacgctaccgtaatcgccgaactcggcgttcgcgctcctttcatcgtcggcgttctccatcgcccattttgaaacgccgatcgccttcaccatttgtgccccgtcgcacaccatcgccggcatcccgctatcgacgcagccgatcccgcagtcgctcccgctcacgcagtcggagtcctcgacgctttcagtctcgctacatgccgagggatcgtggctccgtgaatcgaagcaggtactcctggcacaatccccataaacgcagtgtatcacgcaccgtggagccaaatggcaaagatgaaagggcagctactccgccgaaaaagggtgttgctgatgatagatctggacgagaagaaagggcgtaa

SEQ ID NO: 14397 - protein, 868 aa, DROSOPHILA
MNFDYIGQALGYHGQPLQKIWDDERGVDDLRLMGLTQVNYGVYQERQKYFTFQERAKRLKMHQFLARKATDLYDRTLVANVMEDSLLAQGNTYMTQMAPFEFFLNVKDKRKGWAHRLSALKQGDIIYTQVTRLASGNRLIVKPLCTAEPKHAYLADIPIKAVILQDFWGPLPLDKQGNPRSFVQNDILRCEINNISADTERLSLNMIGMFNKVPDLKFGLCDFKELPKYYSKIHNLDHPSASHYEDELNKALEFENPNYDLLFQMNGLQPNENLSLMSYLRAGFPEEENAAELRQKQASQWAFRSVADGIEHFKNGQQVEAFQCLNKALNIDPRNVEALVARGALYANRGSFLKGLQDFEKALHLNKYHVNARKYMGETLVALGRSYEEENRIAEAVKAYSDCLNLLPLHEEARQSLDALHRSGDGKRRISTEPSNMTGGQSSDESSSSSASDSECEDSAGKPKSNISQPFYAQHKLKQSGDEKLAVIDAHKANEFRLDDDETVSSVRKLLREASKHKKAKKKGKKKKDKKERRRSRTKSETEDPIELLKKIDFQEALRLMNSTRSDEERKAKIKSYLKEGGKESPPPPPPMKKTAVSSRKSSFDNVGPSTSRHAASVVGFGGAQPPPAPKFLGQKKHPEPAPKLSFQIKKRPLQMDKLGMLRLAAPAEPLKGGRSSSSRSRSRSRSRSRSRSRNRRLGRSTRSSLRSRRSGSRSRSISRSRSRRRRTYSRSRSPSPRSYGNRFVIGRYRNRRTRRSRSFHRRRSPSPILKRRSPSPFVPRRTPSPASRYRRSRSRSRSRSRSRSPRRFQSRYMPRDRGSVNRSRYSWHNPHKRSVSRTVEPNGKDERAATPPKKGVADDRSGREERA

SEQ ID NO: 14398 - DNA, 3066 bp, DROSOPHILA
aaaaaacacaaataccaaaaagaaagaagatttactaacaaaaatcattatacttgcacaacaagtacttttggcaatgttgttgtgcatacagagaactagaaaaatatgtttttcgtttgttaatttatttttagggctttggtcaatggttcaacgtttcagcaaaaattgcatcttatatatttagttaatgatatactccatcactggtaagttcgcccagtcaattattagtatagtatagtatttaagggccatagacctcaataactaacccactgagcagtaagactactttgtgggttagtttctgcggacgactacgctgacagaattggactgaacctgaccgaccaccggacttcggacatcataccttgacatttagagtagctaggagatgagacctaagtccaacgatatatttacagcatgcgcaagaacatcaatgacttgaagaacagcctcgagaacgtcgtcattccgatgttctgcagcgccgacttgagtatgtatttccacttcgatccattcctttacggatttctaatagtgttatcctcgcccacagttggcaaccccgaccagcgccagaagctagccaagctgctgtctctgtgggagtccaaggcgaagttcttcgatgcctgcgtcatctcgaagcttcagtcaccggactcgtcaatgcaggagtacaaaaccaatctgcagaacacacatcatgatataactgctaaattcacgcagaataccaaggcgactttggataagtaagtataaaagtccaagaacataatagagcacataataaaccataactcttatgcttcagctatcagaaacagcatcatgtatttatccaacatgctagccagcaaattgtgcagctggagaaacaggcgcagcacctggagcagcagattgtggcccagaagtcccagcagcaacacatgcttcagcatcagcagaagaacataccatcgctgatgtcccaccgaatagcaatgccgggtgaccatgagcacatgaatagccaggggccgcatgatcagcagcatccgcaggcgggaaataatatgtatccaggtggtaacttccaacagcagcagccaccaccggggaatcactttgcggatccacgcggaccgaacttcttcattccggacatgtccaaaccaccaccaggcttccccggacccatgcatcataatcagggcccagcaatgggccagcagcagccacaaccgggacagtttccgcccatgcaggcgccgggttctggcaatgaaccacctgttgatcttggcgttctcagtgcagcgattcaggcgtgcttacagatgcagcagcaacaccatcctgacgaccctcagcaacaaggacagcaccaactgcagcagcagcagcagcaacaaccgcagcagcaaaagcagccgccgccaatggctgcctatccccagaatattgttagacctggccagcaaaatgctgatagcagcgaagtggatctggatgtgctcaatgcagccattcgcgcggttataaccaacaaacccgaagacggaacattggaagatggccagcaaccacagaaattggtcgacggagaatctggagaacctgttgtgatcggagagccacaaatacccacagcgccttactacgacctgccagcgggcctcatggtgccgctcattcgtctggaggattacaactacaaagccctcgatccggcggacattcgactgccagctccagcgccacaaagcgagcgattaacaaatgcattgaacgccttctattccgcaccctcacacgatcgtccaagggataagtaagtatttcaatttgatgttattgagcgttccttataaatgggcttatcttgcagtgagggttgggagaagcttggtctctatgagtactataaggtgaagaatgcggcgcgaaagcaaaaagaagaggaaatcaaggacggcattcgagaaaagtcgcggtcgccaagtccgattgtgctcgagaaacccctacccaaaaagagcaacaagcgagtttatcggtgagtgttggttttccatcaaaaattttcacacaaaaactagaaatatttgcacttattttcttgcgcagatccaagagtcgcagtcgctcccgctcaaaaacgccgccccatcgagatagatcgttgtctcgctcccgatcccgctcgcgatccatggagcgctctttaacgccgccaccgatgaatcggagcaggttgggcggtggtaacaaccgcaagggtcgcaatcgatctcctcgccacgaacgggacaacaacagcggcagcacaaataccagagagggccgtggtgatcgtggcaattccaatagccgagacaatggcaacagcaccaacctaagacgagtggaccgcgacagatctctaacacctccgagctttctgtaaatcatggctatagtacaatttcatgacagtcggaccaatgagctatctttgtttttccaggggaagcacatttgccaagccagcggatttcatcgaggaatcgaacaagggccaccaaatgctcatgaaaatgggttgggcgggcacgggaactggactgggctcaaagaatcaaggcatcgacacgcccatttcgggaggcgaggtgcgcgatcgtcgagagatgtacaaggtgaagtggcaagagtgcgcaagaaaggacaacttataattttctatccacagggagtgggcgctaatatgcacgatcccttcgagagctttcggaagaacaaaggagctgccttcgcgcaccggatgcgatcgcgagacgacaagagttaggatctgccaacggtcataacttcccagttttttgtttcctttagcccagaaaatatacatttttataaaagcgaactgaatttttatacaagattaggctataacattaaagctggattgagcggccttggcatttactttttccaggacctggaccaggcccttgccaggaccgcattcgaaggtgcgtggaaagtcgacgccctgcttgcgctcgtacatctcgtgga

SEQ ID NO: 14399 - DNA, 1009 bp, DROSOPHILA
aatagcaatgccgggtgaccatgagcacatgaatagccaggggccgcatgatcagcagcatccgcaggcgggaaataatatgtatccaggtggtaacttccaacagcagcagccaccaccggggaatcactttgcggatccacgcggaccgaacttcttcattccggacatgtccaaaccaccaccaggcttccccggacccatgcatcataatcagggcccagcaatgggccagcagcagccacaaccgggacagtttccgcccatgcaggcgccgggttctggcaatgaaccacctgttgatcttggcgttctcagtgcagcgattcaggcgtgcttacagatgcagcagcaacaccatcctgacgaccctcagcaacaaggacagcaccaactgcagcagcagcagcagcaacaaccgcagcagcaaaagcagccgccgccaatggctgcctatccccagaatattgttagacctggccagcaaaatgctgatagcagcgaagtggatctggatgtgctcaatgcagccattcgcgcggttataaccaacaaacccgaagacggaacattggaagatggccagcaaccacagaaattggtcgacggagaatctggagaacctgttgtgatcggagagccacaaatacccacagcgccttactacgacctgccagcgggcctcatggtgccgctcattcgtctggaggattacaactacaaagccctcgatccggcggacattcgactgccagctccagcgccacaaagcgagcgattaacaaatgcattgaacgccttctattccgcaccctcacacgatcgtccaagggataatgagggttgggagaagcttggtctctatgagtactataaggtgaagaatgcggcgcgaaagcaaaaagaagaggaaatcaaggacggcattcgagaaaagtcgcggtcgccaagtccgattgtgctcgagaaacccctacccaaaaagagcaacaagcgagtttatcggtga

SEQ ID NO: 14400 - protein, 333 aa, DROSOPHILA
MPGDHEHMNSQGPHDQQHPQAGNNMYPGGNFQQQQPPPGNHFADPRGPNFFIPDMSKPPPGFPGPMHHNQGPAMGQQQPQPGQFPPMQAPGSGNEPPVDLGVLSAAIQACLQMQQQHHPDDPQQQGQHQLQQQQQQQPQQQKQPPPMAAYPQNIVRPGQQNADSSEVDLDVLNAAIRAVITNKPEDGTLEDGQQPQKLVDGESGEPVVIGEPQIPTAPYYDLPAGLMVPLIRLEDYNYKALDPADIRLPAPAPQSERLTNALNAFYSAPSHDRPRDNEGWEKLGLYEYYKVKNAARKQKEEEIKDGIREKSRSPSPIVLEKPLPKKSNKRVYR

SEQ ID NO: 14401 - DNA, 4202 bp, DROSOPHILA
gagggatacaagtgagttgtaaatagatttgtaaattcagttctctagttcaagatgtctagaattacatttccgctgttgcacatctaaaataagtcctcctatatttgtttctcttccaaagaatccgactgcgcgccatggtggacttggaggagggtcagcccctgcaccacagctacacctacacattggatggcactgcccagagacagaagcacctgaagcagggcaagttcttcacctgccaatgcgaacgctgtctggatcccaccgaattgggaacgcacttctccagcctgaagtgtggtcagtgcgccgagggattccaagtgcccaggcagccaacaggtgagcgaaaaagatcctctagaaagtgataagctgaccttatccactacgcagaaccggacactagttggaactgcgcgaactgtggctccgacaccagcaatgcggatgcactggcgatgctccaatccctgcaatccgaggtgaatgccgtgcaagcgctgcccatggcagccaagcggctggaggagatcgaacgactgttgcgcaagtacaaatcactgctgcatccgctgcactttatagccaccgggctgaggcagttgctcatcgagatgtacgggcgagtacagggctacgagatggtgcaactgccggaccaccaattggagcgcaaggcggagctatgccgccaagtgctgagagtgctgaacaccttcgaaccgggtctgagtcgaacacgcgccatgaatctttacgagctgcacgtgccactggtgctgctggccaaaagtggcttcatagccggcaagctgaagggcggcgagctgcgtgcccgcctcgtcgacgccatagatctgctgaaggagtgtgtggagatcctggagttcgaggacaagagctcccaggagggagtgctgtgcgttgtggccaaacaggcgctgaaacagctcacactgagcgtcgagggactgggaagcgaactcgattgattgacttatgcatatcggttagctttattgggaacagttctgggtttctagggacacaaactgctgatgttggtgttacatttaaaatcttattggtgcgctggtcgatggtcgtaaatgtcaaaagaacaataaactacaaaactaaacagtgattacaattattacaaactaatgatgcacagtattttctatttgagtgtttaatctccgttttatttcctttttggtatatgcgtcattcttcgggtatatcgtaaatgcttttgataaggacttagtttctagctcggtacatattgctatgtagtattgtatacagttgagatttttctacgtctcaaactagaaggtgctgcttacttggatactggtaaaaaatacaccgggtggccaaagaatgcatcggtgtacaaataatcaacgcaacattcgctggcattctaaagcaagcagctgcaaaaagttacttacaaaatagccgtgttcattttgagtatgctcctgttggccgccacgctgctgctttctatgtatttataattttaaaacattataaactaaagcataaattaagttggaatctgcatataatacacaaaacgaaatacgattcaatttgactggctgcgggcagggggataggtcgtttaaaaataatcacacacacattgattaaaaactaaaaacactcgggggctcttttagccgcacagcaaacgcaaggacaaaatataaagaatatttcctgaccctagacctcgtggctcagtagaggcgtatcatggtagcgggaggcatgattgagactggtgcagggcagcagccacagcgccggatgtccgcgtccgaacacatccgccagcagctggtacttgcgccgatttggacgataggtgcccttctgctgtatcgcctccacggccgtctcgtcgtacagaatcgcatgcagctggtccaccatgatggccgtaacgaacaggccgaacagcgccgacaccagcataaggataaccgagtgaatcctgcaacggagggatataagttatatatgactcataatacactttaaaattgcgtggccaagtaacgcattcattgtttaagaactaacaaagcactacttttccatcttgcattgcattccgcttagcattcgattaaggcaaacccaaataaggctctagcttctgctattgttgctgtggcatacgaaacttacattcgcaactgggtttcgatcacgttctggctgcactcctcgcagggccacacccaggaaccgacgataagggcaatggagtagagcgacagcagcgccacgtagatgaggaactgcaggaagtacttctgattgcgctcgcccacacagttgttgatccaggggcagtggtgatccatgcgccggatgcaccgcttgcagatgcgacaatgatgggcgcgtggcggcctatacgtttcgcagcgggtgcacacggtccattcgctgctgtgtccattaccgggcggaggattgtttttgttggtcgtgtgcaggtcggagaagtccagacgattggcgggcagcggcacagtgcctggatcggagaacacggccttggagtgggacatggccaacaggaagacgacggtgttaaagagcaccacatggaaggacatccagaggctgtcgccaagtgggtagatatatatataatgacgtcatggtgcgtacagtatgcattactcacctgcccggcatggtggtcagaatgatccaacggatgaccacatagtccgcgtacagaactgctccgtaggtgactaccaagcaggcgatgccacagggatctcggataaaaaccattgctctgctgcctgcgtcttgttggactgacctgggtgatattgcctctccgccccttctatttaattcaattagaaaccgaaggggctgatgttcctagcccccctccccctgaaaatcgagggccgaaaaataacaattgttgctgtagttcctcggctcgtctggcgaccaccgatccactgctgggcgggatacgaggctcctggtggcggtctcgtcggctgccgcactttgcccactcactgctgggtgcacgattcacaaatcgagcgtttcatcgaaattttagggcttattttacgcttgaaattgtcatttatttatttagggtgaccgtttgcgggaagcgcgaaaatatagcatggcccacgaactggaactaagtaaggcatgggcttagaaaaattaatttaaaaggggttaaattagaaaaaggtaatttaagtaagttactaccaatagatttttatttttaagcagttttcagatttcaaaaatatactccaaacttcattaaatcttataaaccgtttattaaacataaaagtaaaatctgaaataagtcgttacacaatgcaaactcgaaaccagtcaatttctggccgtgttctccttgccgcgctcccgtttctgcagctgcagctccctttcggccattcccgccttcacccaataatgggtcatcacatccaccaaggtgatgcggcccttgctttccttgcgaagcagctgcaaagatgaaatccctgttcaataaatggatctcaaaggaaacatcttccaactcaccccgccaatcaattccttgcagcccttggacaaatgcgatgggtaggagatctccatgcgccggatcttgctgtaggtgctctccgtgctgttcgactcgaagggcggacagccgacgacgaactcgtagcacagaatgcccaggcaccactggtccaccgagtcgtcgtaggagttcccatccaccatctccggcggcagatagtccagggtgccgcacagagtcctgcgcttgttgttcggcgtgtgcgccgaccaaccaaagtcggccagcttaaggtcgtccgtgctggttagcagaatgttctccggcttcagatcccgatggatcacgttgttcaggtgacagtagttgagggcattcgccacttggtaggtgtacttcgcagaccgcggttcatcgaatcgatgattgggtgcgccacgcaggtgcttgaacagctcgccctcggacgcaatttccagggccagatagatgcggctctcgtcgtggaaccaagtgagcaggcgcaggatgtgcgggtgcttcagtcgcgactggatctcgatctcgcgtagaa

SEQ ID NO: 14402 - DNA, 1941 bp, DROSOPHILA
cgcttcccgcaaacggtcaccctaaataaataaatgacaatttcaagcgtaaaataagccctaaaatttcgatgaaacgctcgatttgtgaatcgtgcacccagcagtgagtgggcaaagtgcggcagccgacgagaccgccaccaggagcctcgtatcccgcccagcagtggatcggtggtcgccagacgagccgaggaactacagcaacaattgttatttttcggccctcgattttcagggggaggggggctaggaacatcagccccttcggtttctaattgaattaaatagaaggggcggagaggcaatatcacccaggtcagtccaacaagacgcaggcagcagagcaatggtttttatccgagatccctgtggcatcgcctgcttggtagtcacctacggagcagttctgtacgcggactatgtggtcatccgttggatcattctgaccaccatgccgggcagcctctggatgtccttccatgtggtgctctttaacaccgtcgtcttcctgttggccatgtcccactccaaggccgtgttctccgatccaggcactgtgccgctgcccgccaatcgtctggacttctccgacctgcacacgaccaacaaaaacaatcctccgcccggtaatggacacagcagcgaatggaccgtgtgcacccgctgcgaaacgtataggccgccacgcgcccatcattgtcgcatctgcaagcggtgcatccggcgcatggatcaccactgcccctggatcaacaactgtgtgggcgagcgcaatcagaagtacttcctgcagttcctcatctacgtggcgctgctgtcgctctactccattgcccttatcgtcggttcctgggtgtggccctgcgaggagtgcagccagaacgtgatcgaaacccagttgcgaatgattcactcggttatccttatgctggtgtcggcgctgttcggcctgttcgttacggccatcatggtggaccagctgcatgcgattctgtacgacgagacggccgtggaggcgatacagcagaagggcacctatcgtccaaatcggcgcaagtaccagctgctggcggatgtgttcggacgcggacatccggcgctgtggctgctgccctgcaccagtctcaatcatgcctcccgctaccatgatacgcctctactgagccacgaggtctagggtcaggaaatattctttatattttgtccttgcgtttgctgtgcggctaaaagagcccccgagtgtttttagtttttaatcaatgtgtgtgtgattatttttaaacgacctatccccctgcccgcagccagtcaaattgaatcgtatttcgttttgtgtattatatgcagattccaacttaatttatgctttagtttataatgttttaaaattataaatacatagaaagcagcagcgtggcggccaacaggagcatactcaaaatgaacacggctattttgtaagtaactttttgcagctgcttgctttagaatgccagcgaatgttgcgttgattatttgtacaccgatgcattctttggccacccggtgtattttttaccagtatccaagtaagcagcaccttctagtttgagacgtagaaaaatctcaactgtatacaatactacatagcaatatgtaccgagctagaaactaagtccttatcaaaagcatttacgatatacccgaagaatgacgcatataccaaaaaggaaataaaacggagattaaacactcaaatagaaaatactgtgcatcattagtttgtaataattgtaatcactgtttagttttgtagtttattgttcttttgacatttacgaccatcgaccagcgcaccaataagattttaaatgtaacaccaacatcagcagtttgtgtccctagaaacccagaactgttcccaataaagctaaccgatatgcataagtcaatcaa

SEQ ID NO: 14403 - protein, 276 aa, DROSOPHILA
MVFIRDPCGIACLVVTYGAVLYADYVVIRWIILTTMPGSLWMSFHVVLFNTVVFLLAMSHSKAVFSDPGTVPLPANRLDFSDLHTTNKNNPPPGNGHSSEWTVCTRCETYRPPRAHHCRICKRCIRRMDHHCPWINNCVGERNQKYFLQFLIYVALLSLYSIALIVGSWVWPCEECSQNVIETQLRMIHSVILMLVSALFGLFVTAIMVDQLHAILYDETAVEAIQQKGTYRPNRRKYQLLADVFGRGHPALWLLPCTSLNHASRYHDTPLLSHEV

SEQ ID NO: 14404 - DNA, 7611 bp, DROSOPHILA
ggcggcaatttcagcgtgggccaacgtcaattgctctgcctggccagggcgattctgcgaaacaacaaggtgctggtactggatgaggccacggccaatgtggatccacagtgagtcctagaacgaaagttactatatctccagaactaacttctaacccatctattctcgcagaaccgatgccctgatccagcgcaccatacgcatcaagttcaagcagtgcacagtgctcaccgttgcccatcgattgcacacagtcatggattcggatcggattatagtaatggatgctggtgtcgccgtggaattcgatgtgccgtacttgctgttgaagaagtcacagggacatctccggcaaatggtagaggccacaggcggggaatcggaagcactgaagaagacggccagtgacagccacaaaagaatgcaaagagaacgggacgagcgagatcgcgatcaggatgagagccaggagtgagaaacggtggcccaaaaaaatatccatcggaaatcgcatttaaccaaatctggtgcttataatggctcaaggttacaactcttgggctcccaatggaagaggaatcttgtccaaaacaaaaaccgtaccaaaatgattttcttgtgcacatacacatattatgttatcaatgtttcatttccttagtttagttaagtttgttaacgaaaagtctagaatgtgtactgccttatacgtattgtacttagatgtaatctccaccagggactacgttgtaatatttgtccaccaacctattgtagaccgccagtgaatcggatgtttacttacaacatgacaaaagctacttacattctggtaccggaccagaactgaaacaccgaggtcctcaaaggatcagtgggttaatctactcactagttagaccatcaaatatatatattgtttataaattgtgtacattactgcaagtctatattcatacaaccgaaatattgtacttgaaactctagatagaaatttaataaataatcgtcgggtttattaaaatataaataagtttcacacaaattggtaataaaattgtacatttaacttattgagtaaattttatacaatctttttcgatagtcattttttgacacaaaattgcaaagtaagtaaaatataaataattgtcataaaatggataatataatctaaaacctaaacaaacgaattaaaagttcggcgatcattttcggggcgactttcgatgcgttgtcctgacacctgatcctatttgacctgaggattggcgagtttgatttgtactaagtttgctttgttgttcaaaaggaatgggtggagttccatctggatagttaaccagggagatgcgactctccccggagaacagttgagagccggtgttactcatggacccggccttctctggaatggagaggaacgatcccactggtgtggatgtcttttgtctgtcgtttgttgctccggtggcatggcttacacccactcctggcgtttgcgtgttgttgctgggcgagagcgaatgtaggaccgacttcagaaagtgcccccttaaggactcatctgaactctcactggcaacgtcgtcgtgcactcgatgtttgaggagctctctcgtaaggaattccctcagattaagggatcttcctatctggcttgcatcctgcacagtggaatcgtccttagacctattgttgtgctcgtggcctccacgaagccgagactttcgtggccgccgttctggcgacgaggctgtggtactgctgcacaactcatccacctgctgttgcctctcatgcattgtggcatgccagcacggacttctctgatccgcgtcgctggaaaagttgctgccggagaggggatctatgccactctcgttgggttgatcgttggtcactggggcgacgctttcccgccgcgtactgctagccacctcctgagccgtcaatgtggtctcagttgcgtttcctcgacgaaatgagttctttagaattttccgctggcggagttcttcctctacgttaaatgaatccgtggaatcattctctaagctagcactgtctattagatccctctgatcgggtggttgcttggccataagtttttcaaagtattccctgcgcttgggaaagtcttggatactatgagtgatcacgcgcagctgtcgcatcagttcacccggtgacagagtggcctgatctgcatcctgacctatctccacatggattcgggtgctagtcatgttatgaagataggcattaatgctaggaaactcacggtagtcagttccttgattgcgttgcctgatcgcgagtattaagtcattaaattcgccctgcagccgttggctctgatcagcatccaaccgcgacagatctaagtgcagttccttggcatactgatcgaaactagggaatggcttgggcaccggtgtggcggccacaatatgtgattgtcctggcgtttccacttctgtaatggtcgacagctcgtgcgccagatcctcggcgtttagttgaggactataccgacgaatcgtggccggaggtgcccttactcgtccgcgtgctgtattattctgcgttgatgacccaagcgagatgggttccacatcgatacaaacctgaccctgtgccgtaattggacgtgagtccgcaatgccactatccctgctggccgctgtcggcttgtgcttctgcaacggcaaggcttccgaggtcgaaggtgtttgagaatcgctgcgatcggaaattgtccggcatctggtttgctgttgtcctgttggaagctcaagatattcagtggactgccgctcgccatcgctgttcgatgtgagggtgacctccaccagtcgctgcttctcctcgcgcactttcgtgatcagctctgtaagttcggcgatccgctgggtgcagttctccgtgagctgtgcatagcgttccatgtttcgggcagatgactcctcactggtggatagtgctttcgatttttcgggggcaaagcggtttgtgcttttatcggcgcctgaaccttgttttacagtcttttgctcccttttttgttgcactgcaccgtttgtttgctgctgccggtccccttcttgagttctacgaattttgccgctttcctgtggaggtgctgcatttttcctatctccttgtggagtcggcctttcccttggcatcttttctcttgtttgctctttctctttgttggtttgctgacaatcttcaggattcttggccaaacgcttgttccatatttgatcgaatgcgcgcatacttttctctgcatccagcgattgttgctccctttgcagctgctgctggcaacgtattgattcttccaagtcattgattaagctgcgattgtcggcaataaaggtttgcacccgctccatgcgatgctcgttcatctccgtattttcatcctgatccctttcagctcttcccgcttcaggctcgggacaaggggttacgtttctcaatgagttgatcaccgacgttgatggtgtggtcacacacgaggaactcacacccatctcatcgatattttggcgtgtcattcctagcagacgatttatatattgaaccaccatgggatgtaatggagcagaagggggagcggccgtggtcatatttttatagctcactggcggcagactgcgataggcagtggagttggaatcaatggatatctgacgctgatcctgtaagaatggtcgctttccgtgatcctgttccgtcggctttggctcatcgtctcttggtgtgctgtcagttgagcccaggggcacatccttttcattgtcgatagccgacggcttggttttggctttcgattttgttctcggtacatattgcttaacagtaccgtcactcctcaccttaataatgatctcaactggcccatcttcttttgcgtttgattttggcttatcactctcactggattttgcgttttttgtctccttgtagaactttcttagacgctgctcgagaatagcctccttctgttgcaaatcagattctcgttcgtttaaagttctcgttcgctcggatagaatatcagctcgctcctgacgtatattattcaattcctgtgcattgtcaccctttgatgcacctgactcacccgccttcagttcctccaacagctggactcgaattttctcaatgcgctcaagcaaactctttagcctcatcgatttcagtgagtttgactgctcggcctgcaggtccgacttgagttgcttgctttgatcattaacgtagtcgagaagaatggagctgcagctctccgagctgccaagattatcccggccgatttgaacaggaggttcgcccaaattaactgccacagaagctttggatttgctgcgcgataagtttggaggagtaggtttggtgcgcacttccgggcaggtgataatggctggtcgaagcagcatttcttccattgcatcgttcatcttttgctctcgcctggcagctgcatccgcgtaccgatggctaggtataatgttagcctggtgggaaaatgagtttgtattatttaaagaggaaaaatatttgatttccttacatcggttggcaagagctgcggttgctgttgcgttagagcatctagcttttccgttaattcagcacaatcccgacgcacttgctcgcgttcaagagccttttgaccacgatcgtcactaattttcctattgaaatacgttattgatttcaatttgattcattaagataagttctgtgttctgtttcttttactggctactacctcagtttgtccagttcctgttcccgcagatccctcagctggttctcgatgcgagcatgatccatagcggtcaattgggtggcatccttctcattgcactgcaccgactgtgttggtgcttcgtacgttctatggtacttattgctatgatcatagaactgaacacgcccacattgagtcgtccttgggtcctgtcgcgaggacatggtaattgtggtggtggacacagtggattgcgtagcagtgctcggtggagcagtaatagcgggaccgagtacagctggctgattcggcatcatttgctgcggtgcatacatcggatgaggttgtggaaactgggcttgcacgggaaatggcattgaatatggcatcgcatatggttgcatcggaagttgagcatacggatgcatgtatggttgattctgcggcatgggataacaatgggtcatcgacggatttggcacagctggcatagcctgttctggaatcggtggaaggtttcgaggaggttccactgctggtttctgtatagctgttactttgggcagcgtagctggagctttggccttctgacctctgtgtattcccgcatctatcaccttggcaggagctggatttaattttaaacccgttcttttgactgatggctggttacgtggtgccgtcacagttttcttcggcgatcctttagctgttttagtgggtgattttctgggtgctggagcaggaacgggctcctcacgctctacacattttctgggcgatcttggcggggatttggtgggactaggcggggcagatactggtggagtaggatctgcttcccttcgttgacttggcccagctcgtacggtggtctcggtttttcttaccaaatcgctgatctgagtgaatctcggccggcgttggggttcatcatcactgggtcgcacgacatggctgaatttccggttggtttgcatgaacctatcatttatatccataccctcgggattcttgtcggtttcagaaatggtttcctcgatttctacgtctaggattacgggggtagttttttggagacgccggttgctgctcggactctcgatgatcaggatggatgagtcgtcatcggacgatgcgtcatcctccttctcatcctctgcatcggtgctggcacatccacagctggttttccttttgcgcttgcccttgcaacagggtttgttacacccgctctccattcggttttctttgtcctccactatgggcgtttgtgttcccgccgaggcacgtccctccgcatttaaattcattgtgtttgtggtccgcaactcaacgctggctttagccgatcttttcaaggcctgcttgcgacaccttcggattttgtcgattctctcttgcctctgctgctcgatgcgttcgttctcctcctttgcggcgcgatgggcggcgcccacctggaaaatggccgaacggtagtcctggtgctttttgaccaaaacatgctcacgccacgcatttagctccctttgcttgacctgctctaatttgtggatttgacgcctcttttcggcagccacatcctcgcgtatctggcgtgccaggtggtttgacttctcccgcacctggttataaaattaagtggtcacgctttgtgttacaattactgcgcaatgggctcggaacccaagggacaagttacctgcttcaaacgggttatgcgacgctcactttcgagatctttgcgtacttgctctggatcgtccagtggtcctatggtcctcctcaggttggccccgaactttccatttactgttagctgcagagccatctgctctatcgatatatgtaataaattcgtatgtggggcagcatttacgcagtagaaatcgaaacaagtttgagcgtaaaatcaaacaacccaacgtctttaaaaattcctcccaagcggcagtgtgaccgtagatgaataattgaatgtactagaatttacatgcgtctaaaatataccagctggtaagtagcacgcactcaaggcacaatacaaattcggaaattaaatgatcgaaaaactacgtgtttttttttaaattataaaatttaatgaatgcaatttgaaagctacatgacaataaactcagtttgaaaacgaaaacatcacaacagcatgtacacaagcctagatggcccagttgggatgtatcgaactatcgacacctatcgttatcgtgcgaaatcagctgaaattgtttggattacgagatagtaaatagaaatattgaaattacattttttggctgtgaaatcgtaaaattatggcgttcctactgcgacaagtggccaggagcggattgcaaaggtgaaataagctaggaaaaattgcgtgacaaatcccacaataaatgcttgatcttccatagaaatctaatcctaatgcggcatgcaaccgcttccacatccgcgaatcccgaacttagtgtccaggtgagcgagagctgcttgaaacggctccgtgagatctgcgtggatggatctttcctgcgtgtgaccgtcgaaggaggcggatgctccggctttcagtacaaattcgatttggataagcagctgaacgaggatgaccgacagtttggcgaggctgaggccaaggtggtgatcgatacagtctcgctggagtactgcagcggcgccaccgtggactaccatagcgaactaatacgcgccggtttccggatggtggccaatccgctggcggaacagggctgctcctgcggctcctccttctcaatcaaattgtaaactttaaactttagagaattatttaatacacatag

SEQ ID NO: 14405 - DNA, 5401 bp, DROSOPHILA
atggctctgcagctaacagtaaatggaaagttcggggccaacctgaggaggaccataggaccactggacgatccagagcaagtacgcaaagatctcgaaagtgagcgtcgcataacccgtttgaagcaggtgcgggagaagtcaaaccacctggcacgccagatacgcgaggatgtggctgccgaaaagaggcgtcaaatccacaaattagagcaggtcaagcaaagggagctaaatgcgtggcgtgagcatgttttggtcaaaaagcaccaggactaccgttcggccattttccaggtgggcgccgcccatcgcgccgcaaaggaggagaacgaacgcatcgagcagcagaggcaagagagaatcgacaaaatccgaaggtgtcgcaagcaggccttgaaaagatcggctaaagccagcgttgagttgcggaccacaaacacaatgaatttaaatgcggagggacgtgcctcggcgggaacacaaacgcccatagtggaggacaaagaaaaccgaatggagagcgggtgtaacaaaccctgttgcaagggcaagcgcaaaaggaaaaccagctgtggatgtgccagcaccgatgcagaggatgagaaggaggatgacgcatcgtccgatgacgactcatccatcctgatcatcgagagtccgagcagcaaccggcgtctccaaaaaactacccccgtaatcctagacgtagaaatcgaggaaaccatttctgaaaccgacaagaatcccgagggtatggatataaatgataggttcatgcaaaccaaccggaaattcagccatgtcgtgcgacccagtgatgatgaaccccaacgccggccgagattcactcagatcagcgatttggtaagaaaaaccgagaccaccgtacgagctgggccaagtcaacgaagggaagcagatcctactccaccagtatctgccccgcctagtcccaccaaatccccgccaagatcgcccagaaaatgtgtagagcgtgaggagcccgttcctgctccagcacccagaaaatcacccactaaaacagctaaaggatcgccgaagaaaactgtgacggcaccacgtaaccagccatcagtcaaaagaacgggtttaaaattaaatccagctcctgccaaggtgatagatgcgggaatacacagaggtcagaaggccaaagctccagctacgctgcccaaagtaacagctatacagaaaccagcagtggaacctcctcgaaaccttccaccgattccagaacaggctatgccagctgtgccaaatccgtcgatgacccattgttatcccatgccgcagaatcaaccatacatgcatccgtatgctcaacttccgatgcaaccatatgcgatgccatattcaatgccatttcccgtgcaagcccagtttccacaacctcatccgatgtatgcaccgcagcaaatgatgccgaatcagccagctgtactcggtcccgctattactgctccaccgagcactgctacgcaatccactgtgtccaccaccacaattaccatgtcctcgcgacaggacccaaggacgactcaatgtgggcgtgttcagttctatgatcatagcaataagtaccatagaacgtacgaagcaccaacacagtcggtgcagtgcaatgagaaggatgccacccaattgaccgctatggatcatgctcgcatcgagaaccagctgagggatctgcgggaacaggaactggacaaactgaggaaaattagtgacgatcgtggtcaaaaggctcttgaacgcgagcaagtgcgtcgggattgtgctgaattaacggaaaagctagatgctctaacgcaacagcaaccgcagctcttgccaaccgatgctaacattatacctagccatcggtacgcggatgcagctgccaggcgagagcaaaagatgaacgatgcaatggaagaaatgctgcttcgaccagccattatcacctgcccggaagtgcgcaccaaacctactcctccaaacttatcgcgcagcaaatccaaagcttctgtggcagttaatttgggcgaacctcctgttcaaatcggccgggataatcttggcagctcggagagctgcagctccattcttctcgactacgttaatgatcaaagcaagcaactcaagtcggacctgcaggccgagcagtcaaactcactgaaatcgatgaggctaaagagtttgcttgagcgcattgagaaaattcgagtccagctgttggaggaactgaaggcgggtgagtcaggtgcatcaaagggtgacaatgcacaggaattgaataatatacgtcaggagcgagctgatattctatccgagcgaacgagaactttaaacgaacgagaatctgatttgcaacagaaggaggctattctcgagcagcgtctaagaaagttctacaaggagacaaaaaacgcaaaatccagtgagagtgataagccaaaatcaaacgcaaaagaagatgggccagttgagatcattattaaggtgaggagtgacggtactgttaagcaatatgtaccgagaacaaaatcgaaagccaaaaccaagccgtcggctatcgacaatgaaaaggatgtgcccctgggctcaactgacagcacaccaagagacgatgagccaaagccgacggaacaggatcacggaaagcgaccattcttacaggatcagcgtcagatatccattgattccaactccactgcctatcgcagtctgccgccagtgagctataaaaatatgaccacggccgctcccccttctgctccattacatcccatggtggttcaatatataaatcgtctgctaggaatgacacgccaaaatatcgatgagatgggtgtgagttcctcgtgtgtgaccacaccatcaacgtcggtgatcaactcattgagaaacgtaaccccttgtcccgagcctgaagcgggaagagctgaaagggatcaggatgaaaatacggagatgaacgagcatcgcatggagcgggtgcaaacctttattgccgacaatcgcagcttaatcaatgacttggaagaatcaatacgttgccagcagcagctgcaaagggagcaacaatcgctggatgcagagaaaagtatgcgcgcattcgatcaaatatggaacaagcgtttggccaagaatcctgaagattgtcagcaaaccaacaaagagaaagagcaaacaagagaaaagatgccaagggaaaggccgactccacaaggagataggaaaaatgcagcacctccacaggaaagcggcaaaattcgtagaactcaagaaggggaccggcagcagcaaacaaacggtgcagtgcaacaaaaaagggagcaaaagactgtaaaacaaggttcaggcgccgataaaagcacaaaccgctttgcccccgaaaaatcgaaagcactatccaccagtgaggagtcatctgcccgaaacatggaacgctatgcacagctcacggagaactgcacccagcggatcgccgaacttacagagctgatcacgaaagtgcgcgaggagaagcagcgactggtggaggtcaccctcacatcgaacagcgatggcgagcggcagtccactgaatatcttgagcttccaacaggacaacagcaaaccagatgccggacaatttccgatcgcagcgattctcaaacaccttcgacctcggaagccttgccgttgcagaagcacaagccgacagcggccagcagggatagtggcattgcggactcacgtccaattacggcacagggtcaggtttgtatcgatgtggaacccatctcgcttgggtcatcaacgcagaataatacagcacgcggacgagtaagggcacctccggccacgattcgtcggtatagtcctcaactaaacgccgaggatctggcgcacgagctgtcgaccattacagaagtggaaacgccaggacaatcacatattgtggccgccacaccggtgcccaagccattccctagtttcgatcagtatgccaaggaactgcacttagatctgtcgcggttggatgctgatcagagccaacggctgcagggcgaatttaatgacttaatactcgcgatcaggcaacgcaatcaaggaactgactaccgtgagtttcctagcattaatgcctatcttcataacatgactagcacccgaatccatgtggagataggtcaggatgcagatcaggccactctgtcaccgggtgaactgatgcgacagctgcgcgtgatcactcatagtatccaagactttcccaagcgcagggaatactttgaaaaacttatggccaagcaaccacccgatcagagggatctaatagacagtgctagcttagagaatgattccacggattcatttaacgtagaggaagaactccgccagcggaaaattctaaagaactcatttcgtcgaggaaacgcaactgagaccacattgacggctcaggaggtggctagcagtacgcggcgggaaagcgtcgccccagtgaccaacgatcaacccaacgagagtggcatagatcccctctccggcagcaacttttccagcgacgcggatcagagaagtccgtgctggcatgccacaatgcatgagaggcaacagcaggtggatgagttgtgcagcagtaccacagcctcgtcgccagaacggcggccacgaaagtctcggcttcgtggaggccacgagcacaacaataggtctaaggacgattccactgtgcaggatgcaagccagataggaagatcccttaatctgagggaattccttacgagagagctcctcaaacatcgagtgcacgacgacgttgccagtgagagttcagatgagtccttaagggggcactttctgaagtcggtcctacattcgctctcgcccagcaacaacacgcaaacgccaggagtgggtgtaagccatgccaccggagcaacaaacgacagacaaaagacatccacaccagtgggatcgttcctctccattccagagaaggccgggtccatgagtaacaccggctctcaactgttctccggggagagtcgcatctccctggttaactatccagatggaactccacccattccttttgaacaacaaagcaaacttagtacaaatcaaactcgccaatcctcaggtcaaataggatcaggtgtcaggacaacgcatcgaaagtcgccccgaaaatgatcgccgaacttttaattcgtttgtttaggttttagattatattatccattttatgacaattatttatattttacttactttgcaattttgtgtcaaaaaatgactatcgaaaaagattgtataaaatttactcaataagttaaatgtacaattttattaccaatttgtgtgaaacttatttatattttaataaacccgacgattatttatt

SEQ ID NO: 14406 - protein, 1729 aa, DROSOPHILA
MALQLTVNGKFGANLRRTIGPLDDPEQVRKDLESERRITRLKQVREKSNHLARQIREDVAAEKRRQIHKLEQVKQRELNAWREHVLVKKHQDYRSAIFQVGAAHRAAKEENERIEQQRQERIDKIRRCRKQALKRSAKASVELRTTNTMNLNAEGRASAGTQTPIVEDKENRMESGCNKPCCKGKRKRKTSCGCASTDAEDEKEDDASSDDDSSILIIESPSSNRRLQKTTPVILDVEIEETISETDKNPEGMDINDRFMQTNRKFSHVVRPSDDEPQRRPRFTQISDLVRKTETTVRAGPSQRREADPTPPVSAPPSPTKSPPRSPRKCVEREEPVPAPAPRKSPTKTAKGSPKKTVTAPRNQPSVKRTGLKLNPAPAKVIDAGIHRGQKAKAPATLPKVTAIQKPAVEPPRNLPPIPEQAMPAVPNPSMTHCYPMPQNQPYMHPYAQLPMQPYAMPYSMPFPVQAQFPQPHPMYAPQQMMPNQPAVLGPAITAPPSTATQSTVSTTTITMSSRQDPRTTQCGRVQFYDHSNKYHRTYEAPTQSVQCNEKDATQLTAMDHARIENQLRDLREQELDKLRKISDDRGQKALEREQVRRDCAELTEKLDALTQQQPQLLPTDANIIPSHRYADAAARREQKMNDAMEEMLLRPAIITCPEVRTKPTPPNLSRSKSKASVAVNLGEPPVQIGRDNLGSSESCSSILLDYVNDQSKQLKSDLQAEQSNSLKSMRLKSLLERIEKIRVQLLEELKAGESGASKGDNAQELNNIRQERADILSERTRTLNERESDLQQKEAILEQRLRKFYKETKNAKSSESDKPKSNAKEDGPVEIIIKVRSDGTVKQYVPRTKSKAKTKPSAIDNEKDVPLGSTDSTPRDDEPKPTEQDHGKRPFLQDQRQISIDSNSTAYRSLPPVSYKNMTTAAPPSAPLHPMVVQYINRLLGMTRQNIDEMGVSSSCVTTPSTSVINSLRNVTPCPEPEAGRAERDQDENTEMNEHRMERVQTFIADNRSLINDLEESIRCQQQLQREQQSLDAEKSMRAFDQIWNKRLAKNPEDCQQTNKEKEQTREKMPRERPTPQGDRKNAAPPQESGKIRRTQEGDRQQQTNGAVQQKREQKTVKQGSGADKSTNRFAPEKSKALSTSEESSARNMERYAQLTENCTQRIAELTELITKVREEKQRLVEVTLTSNSDGERQSTEYLELPTGQQQTRCRTISDRSDSQTPSTSEALPLQKHKPTAASRDSGIADSRPITAQGQVCIDVEPISLGSSTQNNTARGRVRAPPATIRRYSPQLNAEDLAHELSTITEVETPGQSHIVAATPVPKPFPSFDQYAKELHLDLSRLDADQSQRLQGEFNDLILAIRQRNQGTDYREFPSINAYLHNMTSTRIHVEIGQDADQATLSPGELMRQLRVITHSIQDFPKRREYFEKLMAKQPPDQRDLIDSASLENDSTDSFNVEEELRQRKILKNSFRRGNATETTLTAQEVASSTRRESVAPVTNDQPNESGIDPLSGSNFSSDADQRSPCWHATMHERQQQVDELCSSTTASSPERRPRKSRLRGGHEHNNRSKDDSTVQDASQIGRSLNLREFLTRELLKHRVHDDVASESSDESLRGHFLKSVLHSLSPSNNTQTPGVGVSHATGATNDRQKTSTPVGSFLSIPEKAGSMSNTGSQLFSGESRISLVNYPDGTPPIPFEQQSKLSTNQTRQSSGQIGSGVRTTHRKSPRK

SEQ ID NO: 14407 - DNA, 4252 bp, DROSOPHILA
ttcgccaacgaccactacggcattatcaagatgttctcgcagagcgtccagatcaacctcaagcacaacaagatgcccgagatgtccatatagggctggccgtccacggaggcggcgcgatgatggaatgctggaatcgtgttgtgttgtacgtagctgtgtgagctgtgtgactaggatttagcattttacgatgtgtgtgtattatgattacgtttagtattgccccaacctcggatgcccgaacacatctcgcacccaatcccaaatcccgatcccgcgtagtagctgatttgatatggcagattggcgattagaaggaggccccttccgctagatagtaaactggatgcatttagcagcttgacttgtttccgcgccgctgcgttcaaaccttgtttggatcattccccgcacccgcacctgcgcctgcgccctcgcattcgaataagttaatctagccgaacggagcgaccttaactctaaatactttcgttaagtttaagctaagctttttacatttacgcatgtagtatacatatgacgatgagacgcgtgtggcaacgaaagtggctgcatgtggacgatgtgcatccgggagccacgatcccagacccaaaaacaagcgggtaaacacgcatttgccaggcaataagtgaaataaaatgatatatttgaaacaatcctatgggcatctgttgtttgtttatatctttaaaatgcttactccttattgttcacaacttttgaacagtaaaaatgtgagtatatatttgttttgaaatatattcacatttttagttttatacaatacagcttataatatgtaaataaataatatcattaattatgatttccatttatacaatttatttaaatttcgaatttcaccttacagggtttgtgtcgcagctatccaccctgagtttgtatcgcggtttcgagtcgattgcttaaatatcgatattatcgagcactaccatccgcatctgggattaacttcgtttcgccatccggtcacacacatacccgcaacaatacacgaattttcattaataaacacacaaagtagttaaaattttgggtttacaccgcggcccattcgcatcgccatcatgctttacctcgaagactatctggagatgatcgagcacctgccgcaggagctgcgcgaccgctttaccgagatgcgcgaactagatctcgccgtccagagtaagtgcaaccagagaatccgaatctctgcttttcgccggatcactaaccaataactgctccttgcggtgcacagacaacatggactcgctggacaagaaggcccacatgttcttcaagcagtgcaagcgcgacgaactgcagcacgagtcgatggacacggagttccacagcctgcgcggcgagtacttcaaggtgatggaggacgccgacgagaaggtggctattgccactcagatacacgagctggtggagcgctacttgcgccgcctggatagcgagctcttcaagttcaagtgcgagctggaggcggacaacaacggcatcaccgaaatcctcgagcgccgctctctggagctggacggcaactccactgcagccaccgccctgctgctgagcatgaaccagaaggagaaccgctactacggcgccagttcggccaataccatggtgaacagctcgacgggacacgcaacgggtgccgccactggctcctccggcattgcactggtcagtggtgctgccggaacgggcggtgccctctccagcatctccaccgcccagttgggctcaagtcagcgccaccgcaagctggagaagcggcgggaaaccatatgcacggtgcctgttcaggagaagcgcgccaatctgaatcactcacttcccgtggtcggttcgggctccacgactgccgcggcagcctcatcttcgtccgccacaacggccgcagcagccgccagcctggccagcgcgacgactgcccaaactcatgtctccaaccacattggcagcatcgccgccactcatctcaccctgcctgtggccatgggcgtggccggcggcagtagcagtcttgccagcagctcgcttgccacaggaacgggttcgctggtccgccaactgcccacgaaccttacccacaccgtgctaagcacctcgggtggagcgaccgccgcagcggcagcgggcggcaactccacgtccgtggtcgctgctggtacggcccacgggcacgcccatgtcagtgggcactcggccgccggggccacagtcacctacaacctgcaacaactgggcggaggagccgccgcatctagtgccattgcggcggcagccagccaggcgatcgtggccacacagcagatgcagcaaggccgccgcacggccagcctcaaggcgagttacgaggccatacacggaacagcgggcaccaccaccgacttctggacccaagccggtcagggtggactgcagcagtcgaccgctggatcggtgacagtggctgccggcacagcgttggccaccggcgcagctggcggtagtagcaccggctcgcatcattcgcaccactcacagtcgcaccatggcggccatgggcacggacatggtcatggccatgggcatggtcatgggcacggacaccacagcagcagtggtcacggcggcgggcacagcagccaccaccaggagaagaagcaaaagaagaagctaaccacagcgctgacgttgcccacagtgcagccgacggccggctcctcgtcgggcaactcgattggctcgtcgtcgtcgattagtctggaatcggtgaacaagctcaccacgtcggcggccctggcggcggcatcggccacgacaacctacatgtctgtgggtggacaggcgctgctcgccatgacccccggaggtggaggcggaggcaacttggcggagagttccgctgagggcgtgcccgccggaatgattgccatgaacctgcccaccaccacggtaacgcccggctccagcctgaccatcggcgagaacggactcgtggtggagcagacgaacgagggcgaatggtcgtacgatcccaacgagccgcgctactgcacctgcaaccaggtgtcctacggcgacatggtggcctgcgacaacgacgcctgtccctacgagtggttccactacccctgcgtgggcatcacccagccgcccaagggcaagtggtactgccccaagtgcaccgcctccatgcggcgccgtggcaaccgaaagaactgaggctgactgcgcctgctggcgcccctcttccgtggcgggggcggcggcgtaggcacctggtcgcgtcgctagcggctcttatacttgtaaagtgacaaataaacaaattcaaagtattcaataaagttagatcagcaatagagcagctctttatattcagttcggaacgcaaaggcgaatagtggattgggattgcactaatatatcttaactaaagtagtttaagccagcttctagcttaaataacaaatttagggtgttttcgctacaataataataaacaataaaatatagttcattcgatagtttgatttcaaaattcgcgccctcttggcaatcaaacagcgtgaccatgctgcgcttgctaaagcactctggtcacgctgaacagaagaaaagaaaatttccagcgtcatttgtgcattgcaagttagtaaacaataaaagcgcataaacagggctaggaaaagcgggaagacgattaggtaaacagaattcgacgcaaatcggttggaaaaacggcctcaagattggcaagatacgcaagagcaagaaaatgagctacaacgagaaatcggaggccatcatcaaggaggagtggctgcagcgcctggagcagtttcccttcaagcaggcggacatgaatcgcctgatcatgaactacttggtcacaggtgagtccgggtcaccagcccgcagccacagcaagcagctaatcaagggctaatccacagagggcttcaaggaggccgccgagaagttccagcacgaggcggatctggagcccagcgtggagctgagcagcctcgatgggcgcatactcatccgcgaagccgtgcaggcgggccgcatcgaggaggccacccagctggtgaaccagctgcatcctgagctgctcggcagcgatcgctatctgttcttccacctgcagcagctgcagctcatcgagctgatacgcgccggcaaggtggaggaggccctgtcctttgcccaaagcaag

SEQ ID NO: 14408 - DNA, 2176 bp, DROSOPHILA
ttcgtttcgccatccggtcacacacatacccgcaacaatacacgaattttcattaataaacacacaaagtagttaaaattttgggtttacaccgcggcccattcgcatcgccatcatgctttacctcgaagactatctggagatgatcgagcacctgccgcaggagctgcgcgaccgctttaccgagatgcgcgaactagatctcgccgtccagaacaacatggactcgctggacaagaaggcccacatgttcttcaagcagtgcaagcgcgacgaactgcagcacgagtcgatggacacggagttccacagcctgcgcggcgagtacttcaaggtgatggaggacgccgacgagaaggtggctattgccactcagatacacgagctggtggagcgctacttgcgccgcctggatagcgagctcttcaagttcaagtgcgagctggaggcggacaacaacggcatcaccgaaatcctcgagcgccgctctctggagctggacggcaactccactgcagccaccgccctgctgctgagcatgaaccagaaggagaaccgctactacggcgccagttcggccaataccatggtgaacagctcgacgggacacgcaacgggtgccgccactggctcctccggcattgcactggtcagtggtgctgccggaacgggcggtgccctctccagcatctccaccgcccagttgggctcaagtcagcgccaccgcaagctggagaagcggcgggaaaccatatgcacggtgcctgttcaggagaagcgcgccaatctgaatcactcacttcccgtggtcggttcgggctccacgactgccgcggcagcctcatcttcgtccgccacaacggccgcagcagccgccagcctggccagcgcgacgactgcccaaactcatgtctccaaccacattggcagcatcgccgccactcatctcaccctgcctgtggccatgggcgtggccggcggcagtagcagtcttgccagcagctcgcttgccacaggaacgggttcgctggtccgccaactgcccacgaaccttacccacaccgtgctaagcacctcgggtggagcgaccgccgcagcggcagcgggcggcaactccacgtccgtggtcgctgctggtacggcccacgggcacgcccatgtcagtgggcactcggccgccggggccacagtcacctacaacctgcaacaactgggcggaggagccgccgcatctagtgccattgcggcggcagccagccaggcgatcgtggccacacagcagatgcagcaaggccgccgcacggccagcctcaaggcgagttacgaggccatacacggaacagcgggcaccaccaccgacttctggacccaagccggtcagggtggactgcagcagtcgaccgctggatcggtgacagtggctgccggcacagcgttggccaccggcgcagctggcggtagtagcaccggctcgcatcattcgcaccactcacagtcgcaccatggcggccatgggcacggacatggtcatggccatgggcatggtcatgggcacggacaccacagcagcagtggtcacggcggcgggcacagcagccaccaccaggagaagaagcaaaagaagaagctaaccacagcgctgacgttgcccacagtgcagccgacggccggctcctcgtcgggcaactcgattggctcgtcgtcgtcgattagtctggaatcggtgaacaagctcaccacgtcggcggccctggcggcggcatcggccacgacaacctacatgtctgtgggtggacaggcgctgctcgccatgacccccggaggtggaggcggaggcaacttggcggagagttccgctgagggcgtgcccgccggaatgattgccatgaacctgcccaccaccacggtaacgcccggctccagcctgaccatcggcgagaacggactcgtggtggagcagacgaacgagggcgaatggtcgtacgatcccaacgagccgcgctactgcacctgcaaccaggtgtcctacggcgacatggtggcctgcgacaacgacgcctgtccctacgagtggttccactacccctgcgtgggcatcacccagccgcccaagggcaagtggtactgccccaagtgcaccgcctccatgcggcgccgtggcaaccgaaagaactga

SEQ ID NO: 14409 - protein, 686 aa, DROSOPHILA
MLYLEDYLEMIEHLPQELRDRFTEMRELDLAVQNNMDSLDKKAHMFFKQCKRDELQHESMDTEFHSLRGEYFKVMEDADEKVAIATQIHELVERYLRRLDSELFKFKCELEADNNGITEILERRSLELDGNSTAATALLLSMNQKENRYYGASSANTMVNSSTGHATGAATGSSGIALVSGAAGTGGALSSISTAQLGSSQRHRKLEKRRETICTVPVQEKRANLNHSLPVVGSGSTTAAAASSSSATTAAAAASLASATTAQTHVSNHIGSIAATHLTLPVAMGVAGGSSSLASSSLATGTGSLVRQLPTNLTHTVLSTSGGATAAAAAGGNSTSVVAAGTAHGHAHVSGHSAAGATVTYNLQQLGGGAAASSAIAAAASQAIVATQQMQQGRRTASLKASYEAIHGTAGTTTDFWTQAGQGGLQQSTAGSVTVAAGTALATGAAGGSSTGSHHSHHSQSHHGGHGHGHGHGHGHGHGHGHHSSSGHGGGHSSHHQEKKQKKKLTTALTLPTVQPTAGSSSGNSIGSSSSISLESVNKLTTSAALAAASATTTYMSVGGQALLAMTPGGGGGGNLAESSAEGVPAGMIAMNLPTTTVTPGSSLTIGENGLVVEQTNEGEWSYDPNEPRYCTCNQVSYGDMVACDNDACPYEWFHYPCVGITQPPKGKWYCPKCTASMRRRGNRKN

SEQ ID NO: 14410 - DNA, 3567 bp, DROSOPHILA
aagcatgaagttattcaccatggtggtgttgcactcgtggcgccaacgccgaaaggaggttcgtgaactcaaagagatggtgcaacacctccaggatagcgttagtattgatggttttaacaatttgtttatacgaattatacgtataggattatgttactcaccactttcttccagtccatgaagaccaaaaacgaactgcacgtatgtggcacattgatgcgtgtggaggaaaaacgaaacagggaacttcaaataaagcttaagctatcgacgatgagcattgaccaagtaaggtcctcctgtgaatctcttgtcaactcggtccgtgacctcacaacagagaaaaggcgattggaaaccgatttggaacagcgcttgcaggaggttagtagaattatttaggattatatgaaagtactaaacgaattcatttttccttcaacttaattaataagtatcacttcttcatactaacaagcatactttttgcagctgtgtctatattattatagaaaattgatataaatgtttcctaatttgcagtacaatgagctggaggaagtatctgacaaaaccaaacggctgctcttcagcgcctacgtggaacaatctagcctgcaaaagcaactagctgaggagcagcgtacgacgcagagattgcaggcggaaaaggaccagctaatccaggaagtgatactggcggagggcagagataacaagtaccgccaggtgcgggaatggtaccagcgtgtactgcacaaaaaggaggtgtgcatttacaacctgggaaggagattgcatatgctggaggagcaactgtttgacattaatgagtaagattatttatgctcatgctcattatcgttatactttcccatctgtataacgaataacacagcactattacaataacaatttctttgcattactgtgcactttaatgtacacttttaagcgcttttatcatttattgcatcatgtcgttccttttgacatatcacccactcctgtaatcgaagggcagcagcttctcggtaatccaatttgtaaacttggacacctccgtatatatggccggaatgccctcctgcccgcacccaacgccccagtttactattccagcctgctcgtacacaccagagttctcccctccgattgaacagaatagggccgatcctccatcaccggtgcaggtatcgcggcctaactcgcctccggcgcaaatgatgttcttgggcagctcaaatttagcgcccaacctggtcgacctcaagaacttctcgcaaacatttcgatttaccacgagcaactgaactttcttcaggacggtggagtatcgttgatcctcgtatctcatttttccccaaccggccaccgtgcaacgacgtcctgcgaacgatttatttggtgtaggcaaacagatagttctgatgtgatcattcagtttgaagggcgaatttaggaaaagtaacgccaagttgttggcacctgatttgaagtcaaatccttcatggattactgccctttcaacttcgcgctgctcagacaaaaatatctctcgatcggattttaagtcccaatcgccggccctgaccacaagttcggtttcgattgtaattacccggtgagctactgttagaacgacatttggttgaatcagggatccgccagccaagtactgtccattgtgaaaaatagcaacagcccagggatattgagctggtcgtgcttgatcaatggttattccttctaccatttgcaagccatttgcgttgctcatgccgcaacttggtgacaaaagctctgagcttccaacattggtagtcgggttccctccgttgtttgttggatttccaaaattggtagtcgggttccctccgttgtttgttggatttccaacgttggttgttggatacccaccgttgtttgctggatacccaccgttgtttgctggatacccaccgttgtttactggatacccaccgttgtttactggatacccaccgttgtttgatggatacccaccgttgtttgatggatacccaccgttgtttactggatacccaccgttgtttactggatacccaccgttgggtgttgtatacccgccgttgttcggttcggttgctggattcctttcgttgttggttggacgcccactgaagtcgttgatttcctttacttgtgactcaatggtatttgggcgatctctagtgagttcgcgtgtaggcgatagttgtgcatttattccgtttactccaaccttatcatcttcggggccatttggttcaattaaaaccgtacctccaggcttttatccgtcatagaaaatttgcacttagtcaagctaacaataaatcgcattcaacaattgtataagcttacctttcgtagaactgcacagcaaattttggtattgccgcaattactggagcggtaatcaaatgttggttcctcatacaaacaaaaattccgggtaacgcaagtatgtcgacaggcattgcccataaggacacttgctaagagtagagttccgattgcccaacaatgcttcatgtttgcttcagaaaactgagtgaacgaacggctggcagtgggtatcattatatttctttgctgagcagcttaaaagcttatcagccgacaaagatgtattcgaagtacatatgtacatgtacatatgtacatgcatatgcacataaattgtgttattcccaaagattgcacagaaaacgcttaagttaagagattgcgaaagagatatttccgaattctttggaaatatccattaaagttttcaaaaaaaatgttcagattaattaaactggtaacgatcattcccaggactatacatatatatctcacaggatttgatacgcttaattctagctgttacataccttttaactaatcgagttatgtatctaccctttaccttttcgagtaacgtgacctgtataacacgtaataaagtttcaatataaaaaaaattttttttttatgtacgcatatataaaaaaaaaacataaagaggaaagaactacaaatatgcgtacaaaagaattatcatctgaaatatgtacacatttatatacataacactgaccttaggatgcatggattatcgccgagtgaaatgcctattttttttccaatttgggattttcctagccactgtcgatttgtactatttttcctatttttttgtaaatatttaaagctatataaatgcaacgctatatattcagctgaatattatggacatcgatttaaaaatctttgctaatatcgtctcaaaaaccttttttaatgaaaaaatttttaaatttgattttgattaaaaattcatttattttgtatatttatacaataatgcataatcacaatcttaatgaagaattgatgtaataatctttaagcgttagccaaagtatgctatcctattataaatccaacttctgaacattgccacattggtgtagattcccgggaggtccaatccacaccccatgccccaggcgacgatcccagcctgctcgaagacgtgtggattctcatctccga

SEQ ID NO: 14411 - DNA, 1493 bp, DROSOPHILA
aagcaaacatgaagcattgttgggcaatcggaactctactcttagcaagtgtccttatgggcaatgcctgtcgacatacttgcgttacccggaatttttgtttgtatgaggaaccaacatttgattaccgctccagtaattgcggcaataccaaaatttgctgtgcagttctacgaaagcctggaggtacggttttaattgaaccaaatggccccgaagatgataaggttggagtaaacggaataaatgcacaactatcgcctacacgcgaactcactagagatcgcccaaataccattgagtcacaagtaaaggaaatcaacgacttcagtgggcgtccaaccaacaacgaaaggaatccagcaaccgaaccgaacaacggcgggtatacaacacccaacggtgggtatccagtaaacaacggtgggtatccagtaaacaacggtgggtatccatcaaacaacggtgggtatccatcaaacaacggtgggtatccagtaaacaacggtgggtatccagtaaacaacggtgggtatccagcaaacaacggtgggtatccagcaaacaacggtgggtatccaacaaccaacgttggaaatccaacaaacaacggagggaacccgactaccaattttggaaatccaacaaacaacggagggaacccgactaccaatgttggaagctcagagcttttgtcaccaagttgcggcatgagcaacgcaaatggcttgcaaatggtagaaggaataaccattgatcaagcacgaccagctcaatatccctgggctgttgctatttttcacaatggacagtacttggctggcggatccctgattcaaccaaatgtcgttctaacagtagctcaccgggtaattacaatcgaaaccgaacttgtggtcagggccggcgattgggacttaaaatccgatcgagagatatttttgtctgagcagcgcgaagttgaaagggcagtaatccatgaaggatttgacttcaaatcaggtgccaacaacttggcgttacttttcctaaattcgcccttcaaactgaatgatcacatcagaactatctgtttgcctacaccaaataaatcgttcgcaggacgtcgttgcacggtggccggttggggaaaaatgagatacgaggatcaacgatactccaccgtcctgaagaaagttcagttgctcgtggtaaatcgaaatgtttgcgagaagttcttgaggtcgaccaggttgggcgctaaatttgagctgcccaagaacatcatttgcgccggaggcgagttaggccgcgatacctgcaccggtgatggaggatcggccctattctgttcaatcggaggggagaactctggtgtgtacgagcaggctggaatagtaaactggggcgttgggtgcgggcaggagggcattccggccatatatacggaggtgtccaagtttacaaattggattaccgagaagctgctgcccttcgattacaggagtgggtga

SEQ ID NO: 14412 - protein, 494 aa, DROSOPHILA
MKHCWAIGTLLLASVLMGNACRHTCVTRNFCLYEEPTFDYRSSNCGNTKICCAVLRKPGGTVLIEPNGPEDDKVGVNGINAQLSPTRELTRDRPNTIESQVKEINDFSGRPTNNERNPATEPNNGGYTTPNGGYPVNNGGYPVNNGGYPSNNGGYPSNNGGYPVNNGGYPVNNGGYPANNGGYPANNGGYPTTNVGNPTNNGGNPTTNFGNPTNNGGNPTTNVGSSELLSPSCGMSNANGLQMVEGITIDQARPAQYPWAVAIFHNGQYLAGGSLIQPNVVLTVAHRVITIETELVVRAGDWDLKSDREIFLSEQREVERAVIHEGFDFKSGANNLALLFLNSPFKLNDHIRTICLPTPNKSFAGRRCTVAGWGKMRYEDQRYSTVLKKVQLLVVNRNVCEKFLRSTRLGAKFELPKNIICAGGELGRDTCTGDGGSALFCSIGGENSGVYEQAGIVNWGVGCGQEGIPAIYTEVSKFTNWITEKLLPFDYRSG

SEQ ID NO: 14413 - DNA, 2953 bp, DROSOPHILA
gtctgtcttaaaattaagtcgggtttctgttggaagtaccgcagacatatgtagtcagttaactgtatgagtatatatttctgttcttattatttataatataatccttttaaatattttacttgcattatatacgaaaatattaaaaaattagaaattgtaaactatttcataaaaatgttttggtaaaaaaatgtaaaatctttagctttgtaataacccataagattttgaggctagtataaatttggttcaagcccgtccaattatataattgaattccttgggaatcctatcaatagtttcattaagacttgagaaaacattctaaagccaccctcgtaatcttctgtcccataatgaaagtgaaaaactgttgcagcaacagcaaacaatttcgcagccgaggagaaaactatttcaattgaggtagaaaatgaacgacaaggacatggcggcatttccctctggtttttttttttacttattttcattttctttttgccattctatgtttttcttggtcttgccatgaatggatgcccacctccctgcatttctttttgtgtgtttgcagtttaaattgcgctatgaaaggaattttttggatttaagcattcgttttcatttggcttctatttcttagtttctatatcttttttttttatttgcttttgcctgggatgccaagtgggataatatgtcaagtggcataagtcggcggggaggcagagagctggtgcaccattgataggatcgaagcaggtgtcatcccgtttggcaaccaggtcttaacttggtcatttacggacgactagctgtgtttgtgctggcccggcttagccccagtttcagtttgaatcaagttgcagtggcaaaaacagctgtggcaagtggcccgattgagaaacagttgtccccccccatatagaccgacttttgggacatataaaaggggagcttggttggcaaacgagcagtaaaagactgtatcagcagcatgtctacggaattggtagtggcccttatgctctttggattcctgcaggttgcattcagccaggacaatgcgactgctcccccaacggactattgtcagagtggattgtgcccctctctaaaaaaacacattgcctgcaagaacaaaggagtaaggctaacttttgcaggacttaattgtttccctacaatggtaatattatttgctctaggagttgggcaaacagtgttctcccgacgcccatttggtcaatctcactggcctgcaggacctgatcctgggtgaacacaatgcattgcgaaatgtccttgcttcgggaaaaatcatcaatttacctaagcccgatcgcatggccacactgcagtggcattcagaactggccgatctggccacactgaatgtgaagcagtgtgttctgcagcacgattcttgtcacaacactccagatttccataactctggtcagaacttggctttggtcaacataaccctgctacctgaagacggaaatcacaccgacgagtgccttgttaaggagtctattggaggctggtggaatcagagtatcaatatcacaaaagagcaattgcagcgttttcccaaaggaaaattgggagagtgggtttcttttgtttaggttcatattttcttttaatattatttattttccaaccagttccattcgcaattttgccgtcatggcccgtgacaacaacacccatgtgggatgtgccgccttgagattcgagaagcccgcaggacatccgctattccttttggcctgcaactatgccagcaattatgttcccgactggcccatctacaaggagaaagccattggctgtcagtccggttccgacctcaaatatccatcgctttgcaaggctggtgaggaataccaggatcttatcgggcagcagggctccaaggggaagagattttggacgctgtaggagtgccaaaaataactcctagctaacggattggagtgggtggcaggcgcacttacagtctatttaacatgttgatttgtgtcgcagtgcctggcggtcatatatcatctcacagccgcattagcattagcacagacacctggagagacagtgatgctgaattctagctatatatataaagaatacgtgaaaaatgataatattaaacatgagaattcaatgagaatatagacaatatgaatataaatttataaaagacaatatgaaaaaggtgtatctttattttagtataaattagatatagatttatttaggaaatgttttttcttgatatccaatccaatgctgaagagaataatgatgcattcattttcaaaataccctgtaaaatggctataaactggctgaaactacagctctcacactcacacacattctgccccacttggccgcccccagaatcatcatcattctcttcagtcgctaaaatatgttacgcgttgtttgggctcgagaaaatagcgagcgagacgacgacaagttggcatctaattttaacgtcaatatacaaaatgtaaaaacgtgtcttcatcagctcgtaatatagagaccaccatttccaccactctccgctggtgccgttgaaatccctaagtgcctattaataatgctgcctcgacgggctaaaaagaaaatgcttttccttggatctgctttatttttagtgtccgttcgcgatgaggcctacgtttaatatgccgttactttgtcaaatccgaggctcattaaagtcaggcgagaaaaataggcaacatttttgttcatttttttccgctgtgataattaatttcgtactaatgcaggccacattcattatggcttaattaaaattcaactggaattagtttgcagcacctcgaaaagcgaccattataaacttatcatgccgaaaatattcataaatgcttatatctctattttttgtgctaattacattttg

SEQ ID NO: 14414 - DNA, 834 bp, DROSOPHILA
atgtctacggaattggtagtggcccttatgctctttggattcctgcaggttgcattcagccaggacaatgcgactgctcccccaacggactattgtcagagtggattgtgcccctctctaaaaaaacacattgcctgcaagaacaaaggagagttgggcaaacagtgttctcccgacgcccatttggtcaatctcactggcctgcaggacctgatcctgggtgaacacaatgcattgcgaaatgtccttgcttcgggaaaaatcatcaatttacctaagcccgatcgcatggccacactgcagtggcattcagaactggccgatctggccacactgaatgtgaagcagtgtgttctgcagcacgattcttgtcacaacactccagatttccataactctggtcagaacttggctttggtcaacataaccctgctacctgaagacggaaatcacaccgacgagtgccttgttaaggagtctattggaggctggtggaatcagagtatcaatatcacaaaagagcaattgcagcgttttcccaaaggaaaattgggagattccattcgcaattttgccgtcatggcccgtgacaacaacacccatgtgggatgtgccgccttgagattcgagaagcccgcaggacatccgctattccttttggcctgcaactatgccagcaattatgttcccgactggcccatctacaaggagaaagccattggctgtcagtccggttccgacctcaaatatccatcgctttgcaaggctggtgaggaataccaggatcttatcgggcagcagggctccaaggggaagagattttggacgctgtag

SEQ ID NO: 14415 - protein, 277 aa, DROSOPHILA
MSTELVVALMLFGFLQVAFSQDNATAPPTDYCQSGLCPSLKKHIACKNKGELGKQCSPDAHLVNLTGLQDLILGEHNALRNVLASGKIINLPKPDRMATLQWHSELADLATLNVKQCVLQHDSCHNTPDFHNSGQNLALVNITLLPEDGNHTDECLVKESIGGWWNQSINITKEQLQRFPKGKLGDSIRNFAVMARDNNTHVGCAALRFEKPAGHPLFLLACNYASNYVPDWPIYKEKAIGCQSGSDLKYPSLCKAGEEYQDLIGQQGSKGKRFWTL

SEQ ID NO: 14416 - DNA, 2895 bp, DROSOPHILA
gcatttggaaaatccttctgtccctcgccccaaatgaaacaaaaagcgtgaagcagaccaacttgaagaggggcagcaaagaaaggagaaaaaatcaagtaaataccgaaacacaactaaaactttcacccatttgaacttggtgccaacattggggggggggatggcattggagccggaggaaacgtggatctagagtaaaaataatggcaacaaccacacttgactggcgttgagtggttcataattaaaggggaaaacctcaaaagagccttgaactcattcaactggctgtggctgcattgcgtgcagtttggcccgaaagttggccaagttgccctggccgcacaattgttgcacgcacacagtctacagaccacagtcaagtggagtggaaaaatgcctatgggcgtgtccccactggaaggccaaatgcactaggaaattgtataggaaaaatcttggaaaattatagaaccaaatatatgtctaataataataaacataacttcattcaggaacttttgacactcattagagctattttacaaccaaaaattaaacactatatcatttagttattttgcagtgtaacattttgtttgattgcacatgcatatgcatacacatacatctcagcacatattcatattttctcagaggcctggccaagttttccatggactctaattaccatctttgacttgaagttggcgtggccgaagcaactttctgcctgggttaatttcttaatacatcccttgattgctgttgcctactttaaaatgcaatttgagtgcagaatgattttgtggcgttgttgaacgcaaaagtcataaagaaatagcttttaaccaaccatatgtagaattatgaagataatttagaaaaatgaatcaattcattctttctagacttaatacgtttagatttggatagcacgtcttaaaaaactttacacagtcatctaataaaacacacaaaacagaatagtatttgatcatttggcagacttgccttcctcgtctttcttcttgtcctttgcatccttcttgggttcctttttggtatccttgggagcatctttcttcgcatccttcggagcctcttttttagccttttgaccctttttggtttttgtgagatctaccacctcctccttaaccttctcgcccactttaacggccagcaaaaaggcagacagagcaatggttagagccacagccacatagccggtggcatagatctctggtatcgtgagaaacttgttcaaataccagatcaaatgtcgagttccggcgactgtatggtaggcaaatggcatggtcaccatcaccttggccatcgtcaccatgccgtggcagtcacatttttcgactttctttataaatccctccatatcgccttgcaagcaaaggccgctgattcccacgaaccaaacaaaaacggccagaacaaacccactaattcgtagaaatgcggacaaggtggaagtcaattgaattttgtagatggacaaatgtggcgataactgtcttccaagcagcatatttcgatcgtcataaggcaaatcgggaggcatacgaaagggtatcactttcaaagtgacaggcggaacgaggatatcgccactaggtccaattgtcgtgggtccactagccttatgatcctttggggctttagtagccagaagacgagccgagttgaatggtttttgggcgagcaagtgccttaattgcggactgcaaatattcaatcctcgagccaatgagcgactaaaaaggacgaaatgagctcagctttccgctgataacaatcacttactcaccaagtgttcatttttatatttgagtttttgtcaaataaatttcagaattctttaacaaagtttgttttgttacaaattggcagtgttagataggaatagaaaaaaaaatttaacaagttggtataccatccatatttgaagtatatcgcaaattcactgagagaatatttaaaataatttcattggttaatcttgttttcatagcatctcttcctaccggtctgtttgacacgaataattcgctttgattaccagagtgcacatatgcagatatatatgtatatgtatataaatattttttttcaattcccttattatgggatggactgatggaaattcgattggatctgtaattgtattacctgtcgaaggatttgagaaccacctcaacatcctgtgcatatgccataaatttatgcgacgattggatgagcttaaattcgatttgccgatggacaggcgcctttattcgatttctttgggtttacctttcccccgtgacgctaatctaacactcgttattttccttttgcccagcttcactcacagccaattgaagtcagggctgtcggctttgaaagcgttacgtcaaccgctgaaatttcatttgcagctctttgcaatcatttgcctaaataaatacgtcgcacacaacaaagaaatcaggcagcatctatacacactctcaaaatcattttaatttaataaaattcatttgagttttgcgtggctgcggttttcctttgctgccttgacagatttcatgttcgtttccgcttttgcttgcatgagtttgtgggccgggaaagctcggaaaacttcacgctcaattagcatctgttatcgttgcctttggtcccaatccgatatttattccttgccacacatcaaagacatgcactcagtcactctttgggcgatcgatcaatcaatcaatcaatcatttgctgtgaaaacatttcataaatcaaacgcatacacaaacgagaacgaatataccgacaaagctaacaaaaaggcgcggtcaatgtgcaggttaataaaattaaaattaatcgaatcagtag

SEQ ID NO: 14417 - DNA, 842 bp, DROSOPHILA
aaacaaactttgttaaagaattctgaaatttatttgacaaaaactcaaatataaaaatgaacacttgtcgctcattggctcgaggattgaatatttgcagtccgcaattaaggcacttgctcgcccaaaaaccattcaactcggctcgtcttctggctactaaagccccaaaggatcataaggctagtggacccacgacaattggacctagtggcgatatcctcgttccgcctgtcactttgaaagtgataccctttcgtatgcctcccgatttgccttatgacgatcgaaatatgctgcttggaagacagttatcgccacatttgtccatctacaaaattcaattgacttccaccttgtccgcatttctacgaattagtgggtttgttctggccgtttttgtttggttcgtgggaatcagcggcctttgcttgcaaggcgatatggagggatttataaagaaagtcgaaaaatgtgactgccacggcatggtgacgatggccaaggtgatggtgaccatgccatttgcctaccatacagtcgccggaactcgacatttgatctggtatttgaacaagtttctcacgataccagagatctatgccaccggctatgtggctgtggctctaaccattgctctgtctgcctttttgctggccgttaaagtgggcgagaaggttaaggaggaggtggtagatctcacaaaaaccaaaaagggtcaaaaggctaaaaaagaggctccgaaggatgcgaagaaagatgctcccaaggataccaaaaaggaacccaagaaggatgcaaaggacaagaagaaagacgaggaaggcaagtctgccaaatga

SEQ ID NO: 14418 - protein, 261 aa, DROSOPHILA
MNTCRSLARGLNICSPQLRHLLAQKPFNSARLLATKAPKDHKASGPTTIGPSGDILVPPVTLKVIPFRMPPDLPYDDRNMLLGRQLSPHLSIYKIQLTSTLSAFLRISGFVLAVFVWFVGISGLCLQGDMEGFIKKVEKCDCHGMVTMAKVMVTMPFAYHTVAGTRHLIWYLNKFLTIPEIYATGYVAVALTIALSAFLLAVKVGEKVKEEVVDLTKTKKGQKAKKEAPKDAKKDAPKDTKKEPKKDAKDKKKDEEGKSAK

SEQ ID NO: 14419 - DNA, 3474 bp, DROSOPHILA
tgtattgtttttggtttctcccctttacttctgggtcccattaattaattatccttttagccgtgcgctgggcaacacacttccgcatccggttcggaatccgataggtccggcgatggacaccgactgcggcactgaggactttgggctcggtcgccgccgcctctttaattccatttagaccgaagctcctggcagactgctggctctgtttatgtttatccctgcgactgcactgcccttgttgtggtatttgctattgttgccggcatcggcagcggtaacacgtccatccgctgttggtgagtcatgcgcactagtggtgttcgtaacgctcccattgggatatccttttgatgtacaggtctagccatctattctgatgacctgtttctggagggaagcgcacttttggtagtcactgttgggagcttcaaagggcgattggtgaatcatgcgcaaatagacggggctaactatggagtggcggccaatacgattttgaaattaaatgctcggttctttcgtatatttaatttttatgaataaattatacatttcgaactcagatttttcaagaaatatttttgaataaatcaattctagtggtatcagtgaaatggcgggcacttttgaattccgtatttaaatatcgcgccaaacagtgttggttagtgcgtagaacactaaaagttgtttgatattacctaagttaaaacgattcgatttatttagatagcttacctattattctaacgtaattgttttgagtatatgtttatacttagaggtacctttatatatataattaaatgaaatctcttattgtaatgcatatatttatgaaatatttgtttttttttttaatatttgattgtattttattgatattgatattgattgaaaatattgattattttctgattccaactcgcttgtttggccacatgcccgcccacttgtttgagcgctactagttgattccgcagtagcgagtgctaacagctgatcgcaattagataatagtatagaatagtaaaccccaaaatcatcatggctctgagatttgtggcccagtcatgcagatccttgctgcaacgtggcgatcgtcctttgtcttggacccgtaccctcgcccattatcccgtcaacgatgcgatgttcggtctggatgaggatcgccaaaagctgcgggaagtcgccttcaatttctttcagaaggaattggcgcctctggccaaggaaatcgacaaattggataatttcaagtaggataatgcaggattaatatcacaattacctttaatgaaatattattttttagggacatgcgccccttctggaagaaactaggtgctcttggctttttgggcatcacggcggagccagattttggtggcactgggggcagctatttggaccactgcatcatcatggaggaattctcccggtaagatatccgtacatatatgtcttaaggtgaaaaacttaatgacgtgcatattcacatattacatatattacgaggatccttataaaccctattttctagtgctgctggtggcgtggccttgtcgtacggagcacactccaatctgtgcatcaatcagctgacaaagaacggcacccccgagcagaaggagaagtaccttcccaagctgtgcagtggtgagcatgttggaggtctggccatgtccgaaccgggcgctggatccgatgtcgtatccatgaagctgcgtgcggagcgcaagggagactactatgtcctgaatggatcaaaattctggatcacaaatggatctgatgcggataccttgatagtctatgccaagacaggaggcagcggtgttccggacaagcacggcattaccgctttcatagtcgaaaccgcctgggaaggattcagtgtggcccaaaagctggacaagttgggcatgcgaggcagcagtacctgtgagctggtcttccaggatctgaaggtgccggccaagaatattctgggccaggagaacaggggcgtctatgtgctcatgtcgggattggactttgaacgactagtgctggccgccggacccgtgggtctgatgcaggccgcttgcgacgtggctttcgactatgcccaccagcgcaagcagatgaacaagttaattggagaattccagttgctgcaaggaaagatggccgatatgtacaccacactgagtgcgtgcaggagctatttgtacacggtggccagatcctgtgacgccggcaatcgcagtcccaaagattgtgctggcgttattctctacaccgccgagaaagccaccaaggtggcgctcgatgccattcagatcctaggtggcaatggctacattaacgagaatcccactggtcgcatcctgcgagatgctaaactatacgagattggcgcaggaacctccgagatcagacgctggctgattggtcgccagctcaaccaggagtacaagtgaagagagagcgccatctctttttccaatgtggcaataacgtggaccaactctactacctgacagactaaatgttgcatttattttttgaagatttgtaaaatctgtatgttttatcaatgtctatatgtatatgtatgtgccttaataaaagaagtaaaactttatatgttaaaatattgttttttttttattaatttacaaaaaatacacaatttaaatatgcaactgcatacacgactcgcacacgtacgtatatacaaagagaaataaaaggtattgattacatcgaagaaaattcacaactatagaacatagactgactgaaaaccaagagttttcttacgttagaaaataatatttcatgtttagtgcacagtaataaattgcatcgaaaataacaacaaagtgaagaaccaaatttgtttgtgttacgcttattagaggttaattgtaatttcgttgaatttaaacagaaacttgcctgaataagttcgcacatctcgtataaatatatatgggcaatttaatggcaaataaacacgtagaacacagatatacgaaaacattgaaacttgattagcaagattaggttgttaattttatgctgattatatggtatgggtagaggcatatagatgtagtttcgctagtggctaattacaattaatattaaattatttctattagtatgtttatgggtgtgtaaatgttaaaagcacttttggcaatcatgaaccaagctagaacatttacttaagcaactagaattgcttcaattggaacgcttaatccaatcgaaaactgtgcttttccgtcttcgtctccgatcgggattccgttgttgtagtgaaggacttgcgctccatcacacgctgggtcatcgaggtgagtcgctccgagccttggtcaacaatgctgatcttaccgccatcggtattaagggtcatctgcgagaaacttgactctaatggcttgaccgctccaagttcactgctgctgc

SEQ ID NO: 14420 - DNA, 1316 bp, DROSOPHILA
aacagctgatcgcaattagataatagtatagaatagtaaaccccaaaatcatcatggctctgagatttgtggcccagtcatgcagatccttgctgcaacgtggcgatcgtcctttgtcttggacccgtaccctcgcccattatcccgtcaacgatgcgatgttcggtctggatgaggatcgccaaaagctgcgggaagtcgccttcaatttctttcagaaggaattggcgcctctggccaaggaaatcgacaaattggataatttcaaggacatgcgccccttctggaagaaactaggtgctcttggctttttgggcatcacggcggagccagattttggtggcactgggggcagctatttggaccactgcatcatcatggaggaattctcccgtgctgctggtggcgtggccttgtcgtacggagcacactccaatctgtgcatcaatcagctgacaaagaacggcacccccgagcagaaggagaagtaccttcccaagctgtgcagtggtgagcatgttggaggtctggccatgtccgaaccgggcgctggatccgatgtcgtatccatgaagctgcgtgcggagcgcaagggagactactatgtcctgaatggatcaaaattctggatcacaaatggatctgatgcggataccttgatagtctatgccaagacaggaggcagcggtgttccggacaagcacggcattaccgctttcatagtcgaaaccgcctgggaaggattcagtgtggcccaaaagctggacaagttgggcatgcgaggcagcagtacctgtgagctggtcttccaggatctgaaggtgccggccaagaatattctgggccaggagaacaggggcgtctatgtgctcatgtcgggattggactttgaacgactagtgctggccgccggacccgtgggtctgatgcaggccgcttgcgacgtggctttcgactatgcccaccagcgcaagcagatgaacaagttaattggagaattccagttgctgcaaggaaagatggccgatatgtacaccacactgagtgcgtgcaggagctatttgtacacggtggccagatcctgtgacgccggcaatcgcagtcccaaagattgtgctggcgttattctctacaccgccgagaaagccaccaaggtggcgctcgatgccattcagatcctaggtggcaatggctacattaacgagaatcccactggtcgcatcctgcgagatgctaaactatacgagattggcgcaggaacctccgagatcagacgctggctgattggtcgccagctcaaccaggagtacaagtga

SEQ ID NO: 14421 - protein, 420 aa, DROSOPHILA
MALRFVAQSCRSLLQRGDRPLSWTRTLAHYPVNDAMFGLDEDRQKLREVAFNFFQKELAPLAKEIDKLDNFKDMRPFWKKLGALGFLGITAEPDFGGTGGSYLDHCIIMEEFSRAAGGVALSYGAHSNLCINQLTKNGTPEQKEKYLPKLCSGEHVGGLAMSEPGAGSDVVSMKLRAERKGDYYVLNGSKFWITNGSDADTLIVYAKTGGSGVPDKHGITAFIVETAWEGFSVAQKLDKLGMRGSSTCELVFQDLKVPAKNILGQENRGVYVLMSGLDFERLVLAAGPVGLMQAACDVAFDYAHQRKQMNKLIGEFQLLQGKMADMYTTLSACRSYLYTVARSCDAGNRSPKDCAGVILYTAEKATKVALDAIQILGGNGYINENPTGRILRDAKLYEIGAGTSEIRRWLIGRQLNQEYK

SEQ ID NO: 14422 - DNA, 3741 bp, DROSOPHILA
gagaaaaacgagcgaaacatttgaatttcgtttcaagttgaagttgataaaaagccagtgatttagggcgtgtcctggtgctagcaacggacacaaatttgggttcactttttccgtcggcttccctctccaccccacgactcttttattccgaccaggtagctggcagaccagttgaaaaaaagtaacccgcaattaagataacgtttttttttctcagcgatacttttaactctgtaatttttgtgtactttgggcaaagtttttaggagtaggcgtggcttaaagcatggtggaccgggagcggtaatgactgcccaaaaaacaaatattcttaaattccttacatttaatcaaccaataaaaaggtgttaataaactgaaatagaggcgaaggaagtacaaaaaatttttaattccaattcgataaatgtcactcatacgccgtgtgggccgtgtagttagtattgctccagccccacgttttacattttcattgcaattaagatttcatttatatgcaaaactttagttaaacattattatcatcccagaattttaacaaatactgcgtatatgtttggaatgaaaagattgcttccgttttttgcttggacagacctagtaatgataagaagtattataattacgcctattcgcccgtcattttgatttattatcaaattgataagtaattaaatactgaccatttgcactgtataaataaaaaacacttttcaaccgagcgttatcagtaacaaacttagacaaaaacactcgcacagctggtcaaatgatagcaattgatggcaatagaaaaataataatgccgattattggtgttccccattaactcgtttaagaaacgtcagacccttgaaatgacaaacaacatttggcaataaaatatatagcatcagtgatggtattactagataataatgataagaaaacaaggttcttaaaactgtaaacaacaaagatatactacatatagcctctaatgtttcttaagcttatcagcatgtaagcatttctgtttctttcctcccaataatttgcaagataacgttacgattaacagagcgagtagtagaggtactgccagtatcacagctaaagtgtccaagctgttcagttgaatgaagttgagatcccgggaagttgctcgcaggtgaggagcaccattgtgcctgattacgtactccgtccaccagacagctcgatcgacggctgattgcggttgatcacgataccgctcggaaatggccaaggatgctttggcataactgggatcagtgagcagcgtttgaatggccttttccaaatcctcctgctttagattattcagatccaagcccaagccgaatcccactcgctgggcgcgctgcacattcatgtgctgatcatagaagcacggcaatcccagtatgggtttgccaaagtaaacgctttcggtgctgctcagcagaccaccgtggctgatgaacaacttcacattcggatgggccagaatatccggctggggataccatttcttgatcagcacattagctggctttccaggcatatcgtcatcttcgaatttccacagcactctctgcttcaatttggcaaaggtcttcagcagcgtatcacgagtttcctgtggcagatccttgctcttcacattggagcccatggagaagtatataacaccatgtggcgaaccctcaataaattgtttaatgtcttctggcagtggtttcggcttgtgcgagatgtgcattccaccaacctcaatcatgttgggcaaatagggtcgcggatagctcaaagaaaaatgctggcccagcagaatcaacgaaaaactatccatgacttcctccagggttttctttgcattcgggaaatactttttgtaaacatttctcatatgtggcaggtgaacgaaatggcgatgaatgtcctccacaatgacttcgtagtgattttccaagcgctccagaaaggtcatccgatcggttcgaggagaggtcacaagcgggttatatgatatgggtgatatatttccagcagcctcatcaatagttctatcggttccaaagctggagaatcccactaaagtggcattaaaatgctgagcaaaagcgtacatcggttccatatggagcatctccgccagcaccagatcgaaagtttctcccgaattaagtagcctctggacaccctcgtcctccatagttacatcgatgaatttgtttaatatgtaatccatggcattgagctgctgccacaatagtggcacattcagcaaactcatcatctctgcgagcaaatagatttataaatacaaaatactattacttgtcaatgtgttaatacacaccgtctgcgaattcgtgcgctttgagggcctcaataaagcgcatatttggtgtctccttgttcttgaaggcattaataacggtcacctgatgacccttagctgccaagctttcaagtaactctccacaaatatgtactgagatcgacccggaaacggcagcgtagccaaaatcttcgcactttccgactcgagcggcttggcgctcaaagcgcaaaacacgatcgcgatcacagttaataatctcatggtcacggaatgagtatcgtgcagcgactaattgaacagatcggtcaaactttcctatatatacatatgtgcttagcttttgttgatagcgaacgagagagctttttgagcgacaaacaatgcccattcacgatgataaagggcatttggcatttgcattttcatcgttgttatttaataaagagagagacattccacttttaagagggaaccctcctcggttagggtagtccatgctcgacactcattatctttattgattctgtcggtttgcttatgaaatagcactttatagcggctcgggccaactatttcacattttatttaaaaattgccgaagagcttcaaacgagattttgggcacgcgttcccggcacgtgatggaatgagtatcaaatcgatttatacatatcgccaattcggtacgattcggttccactatcactccataaccaaatcgaataattaatatataacctattattatatttttgggaatttgttaaccgcttttacattaccttattcatatgtttgtatttcatatacaccataaaaacctttacacagtactatcccagtttcctctttcgatattaattcctcaatttgtgcaaactacttaaagttggcaaactcccgacgggcttttaaagatcttcccgtgaagtccccggtatccgctggactgagtgctgggcaaattccccgaagaatgtgcgtgagaagtgcaggccaaacaagcggagaaggcaactaaaaacaaaacgcacaacagggagctgggccgaaagacgtgaaaaaggctcaaaacgagtaccaatgcagctggccagttgggaatttttgccggtggaggaggcgaaactcggcggagcataaaggccaaagcgctgcctaagaaaagaaattatttgcttaagcgacggcaaaggaccttgtccggagcttcctttttcccggaacaaagcacactcacccacccgcacacccacacacacacacacacacagaggcagacaaagaacaacaagaatgaaaatacgtagaatgaaaacagcaggaaggaacaaaaatgaacagaaaatgtaaagtgagtgggccagaaatattaaacttttatacac

SEQ ID NO: 14423 - DNA, 1680 bp, DROSOPHILA
atgggcattgtttgtcgctcaaaaagctctctcgttcgctatcaacaaaagctaagcacatatgtatatataggaaagtttgaccgatctgttcaattagtcgctgcacgatactcattccgtgaccatgagattattaactgtgatcgcgatcgtgttttgcgctttgagcgccaagccgctcgagtcggaaagtgcgaagattttggctacgctgccgtttccgggtcgatctcagtacatatttgtggagagttacttgaaagcttggcagctaagggtcatcaggtgaccgttattaatgccttcaagaacaaggagacaccaaatatgcgctttattgaggccctcaaagcgcacgaattcgcagacgagatgatgagtttgctgaatgtgccactattgtggcagcagctcaatgccatggattacatattaaacaaattcatcgatgtaactatggaggacgagggtgtccagaggctacttaattcgggagaaactttcgatctggtgctggcggagatgctccatatggaaccgatgtacgcttttgctcagcattttaatgccactttagtgggattctccagctttggaaccgatagaactattgatgaggctgctggaaatatatcacccatatcatataacccgcttgtgacctctcctcgaaccgatcggatgacctttctggagcgcttggaaaatcactacgaagtcattgtggaggacattcatcgccatttcgttcacctgccacatatgagaaatgtttacaaaaagtatttcccgaatgcaaagaaaaccctggaggaagtcatggatagtttttcgttgattctgctgggccagcatttttctttgagctatccgcgaccctatttgcccaacatgattgaggttggtggaatgcacatctcgcacaagccgaaaccactgccagaagacattaaacaatttattgagggttcgccacatggtgttatatacttctccatgggctccaatgtgaagagcaaggatctgccacaggaaactcgtgatacgctgctgaagacctttgccaaattgaagcagagagtgctgtggaaattcgaagatgacgatatgcctggaaagccagctaatgtgctgatcaagaaatggtatccccagccggatattctggcccatccgaatgtgaagttgttcatcagccacggtggtctgctgagcagcaccgaaagcgtttactttggcaaacccatactgggattgccgtgcttctatgatcagcacatgaatgtgcagcgcgcccagcgagtgggattcggcttgggcttggatctgaataatctaaagcaggaggatttggaaaaggccattcaaacgctgctcactgatcccagttatgccaaagcatccttggccatttccgagcggtatcgtgatcaaccgcaatcagccgtcgatcgagctgtctggtggacggagtacgtaatcaggcacaatggtgctcctcacctgcgagcaacttcccgggatctcaacttcattcaactgaacagcttggacactttagctgtgatactggcagtacctctactactcgctctgttaatcgtaacgttatcttgcaaattattgggaggaaagaaacagaaatgcttacatgctgataagcttaagaaacattag

SEQ ID NO: 14424 - protein, 559 aa, DROSOPHILA
MGIVCRSKSSLVRYQQKLSTYVYIGKFDRSVQLVAARYSFRDHEIINCDRDRVLRFERQAARVGKCEDFGYAAVSGSISVHICGELLESLAAKGHQVTVINAFKNKETPNMRFIEALKAHEFADEMMSLLNVPLLWQQLNAMDYILNKFIDVTMEDEGVQRLLNSGETFDLVLAEMLHMEPMYAFAQHFNATLVGFSSFGTDRTIDEAAGNISPISYNPLVTSPRTDRMTFLERLENHYEVIVEDIHRHFVHLPHMRNVYKKYFPNAKKTLEEVMDSFSLILLGQHFSLSYPRPYLPNMIEVGGMHISHKPKPLPEDIKQFIEGSPHGVIYFSMGSNVKSKDLPQETRDTLLKTFAKLKQRVLWKFEDDDMPGKPANVLIKKWYPQPDILAHPNVKLFISHGGLLSSTESVYFGKPILGLPCFYDQHMNVQRAQRVGFGLGLDLNNLKQEDLEKAIQTLLTDPSYAKASLAISERYRDQPQSAVDRAVWWTEYVIRHNGAPHLRATSRDLNFIQLNSLDTLAVILAVPLLLALLIVTLSCKLLGGKKQKCLHADKLKKH

SEQ ID NO: 14425 - DNA, 2973 bp, DROSOPHILA
ggccctgcacgatcacaagcagcacagcggattgcaactccagcagctgcatgctcaactgcaggatagcgagcagagtcaatccaaggtgtccatcctgcagaagcagcttaaggagtacgaactatcgctgagccacacccacaatttgctcatggagagcacaagacgggaaaccgccgccatgcgcaagctcgaggaggctatcatactcagcgaagaggcaaacaaggagaaaatagatgccacaaagctggccgagacctacaaggaggagatgacccacctagcctccaatatcggtaccataatggatgaggcctccacacgcgtcgacgttgaagtgggccatctgaagaatatgctcaagcaaaaggacattataattaccaccataaaggagaaggtaaaagtctatattcgtataataattatcacttatagttacacttacaaattttagctgaaaaaactggctgtcgatcataagtcggtggtgcacatgctggagacccggagcaatcgcctggagcaaaagtacaaggaggtgctgaagcagaacgataagctggaggccgagttggaggcaacttgccggcgacttggcgaactggagcgatccgttactgaagcttacggtggggatgccgaagatgccaggatgtgagtatacaacatagacaattaatgacaaacatgattataaatcataacgcttttagaaaaatgtactataagtctcaaatggatcgctgcataatggatcacaagaaaatgaaggagaaataccgcgagggcatggaggacatcacgcaacgcttcgaatcggaaatttacaagttaagggaggagaactccgtgctgctggcggaaaacgaactgcttaagagcggtgccgcaggcgatagctccaagcagacttcacgctgattttacggttgtacaaatatatattttatgataactctcgtacataataaattagttctacgagatcacactatgtggcggccgttgtctgtgcgtttcgaccgggaaacaaactgggaaaccaataggctggctcatcgcccgcctgcttgtcaatccaacagagaccttcgccgagcaccttgtccagtgactgttgagcacgatagtcggtccagctgagaacggataacacggaaatcaaagggatattcagttgaaagtacaagtgaaattcttaccccaaatccttgatcagctgactctgcgtaacacagccttgttcggtattggatgcggcattcagtatgttggtctcctccatgctcagctctccgggaatggactgaactatgtacttgcccttgcccagcttgtgaaccacaaagctgaaggtacgttatggaaaacgagaaacttgtgatattgaatgcaagcagaggtaatgacccatacccgttgccaaaaatgctcaatttcttagcggccattaggatgtcctccttggtgatctcctggtgcactgaactctgacctctggcggcgattagccgacgtcgcagatcgtccagctccataagtccaccggttttgtgattggcagctagacaaacctccaccacctggacgcccagttcgtagtagaaatcgcccattcccagaacgctccagaatcctttaccggtggccagcggatccacgccgatggcggcgcacatttcctgaaactgtttgcggaactgcgaattcttgcgtatgtcctccttgtgtttcatcgcaaattcctcgagtttcacccggaatacctccatttgcttggtcatctgttcgagttggttttcctgcagatcggtgcccttgtccttgtacttctccgcagccagcttctgctgctgtatggctcccaggcctacacgtcgtcgcatagctgttccttaagtttatatttgttagtaaacaactaaatttaatcaacaaaaattaatcacaacaaatgtaaacagctgttttccttacgttgcgattagttacgtgacgtatagtaattgtgctgtgctggtcgcgtgctgttatgcgcaatgttaactatttgaatttcatggagggatgaaatttatgtaaaaaaatatgcataagatacaaatttattatttactttagcttattaccaatatttaataattaaattgctgcttaatatgcatacattttctttaagctaactactttgtaagaaaaaggactaatgaaaaaaaaacgaatataaattgtataaatggtaagatttttttatatttaaagcaaacaacaaaacatctgctatccgattagcactcatataaagtgcatttgtcacaaggtccgctcaattaatgtttaatgggcccaccgcccccattgttcaatgaacaatccaatcgaattcgggtataaataaaaagaagaaaccgctcgcaatatgacgagaaaccatgacacgagggtttcatcgatgagcccgcataattatgattggaaaacgtcatcggatcgtctgctaatatgtatatgtatatcccatgaaagtcactcaatgtttataatgccagcggatatcaaacccgctgattaaatttcaaatctacacacatctcatccgtgaatcattcaacttgcaaaatcagccgatttcgtcagatctacatacctcaccatatctgtgctgattaattatgcgaaaaggaagaaaaatggaatcccatctctggtcattattaagccaccgatttgctttggactccgttttcgttgcgatggcacttagcaccaattaacggtaggagaatcacccgattagcgaggaacccactcgaaatgggagccccagatccacgaaacagatgcccagtggcactcgacaccattacgcgcagtagtctccaatgcgattttacaccgcagattatattgtatattatatatatatattattatatattataatatacaatttttatggtttcc

SEQ ID NO: 14426 - DNA, 843 bp, DROSOPHILA
ctgtttacatttgttgtgattaatttttgttgattaaatttagttgtttactaacaaatataaacttaaggaacagctatgcgacgacgtgtaggcctgggagccatacagcagcagaagctggctgcggagaagtacaaggacaagggcaccgatctgcaggaaaaccaactcgaacagatgaccaagcaaatggaggtattccgggtgaaactcgaggaatttgcgatgaaacacaaggaggacatacgcaagaattcgcagttccgcaaacagtttcaggaaatgtgcgccgccatcggcgtggatccgctggccaccggtaaaggattctggagcgttctgggaatgggcgatttctactacgaactgggcgtccaggtggtggaggtttgtctagctgccaatcacaaaaccggtggacttatggagctggacgatctgcgacgtcggctaatcgccgccagaggtcagagttcagtgcaccaggagatcaccaaggaggacatcctaatggccgctaagaaattgagcatttttggcaacggctttgtggttcacaagctgggcaagggcaagtacatagttcagtccattcccggagagctgagcatggaggagaccaacatactgaatgccgcatccaataccgaacaaggctgtgttacgcagagtcagctgatcaaggatttgggctggaccgactatcgtgctcaacagtcactggacaaggtgctcggcgaaggtctctgttggattgacaagcaggcgggcgatgagccagcctattggtttcccagtttgtttcccggtcgaaacgcacagacaacggccgccacatag

SEQ ID NO: 14427 - protein, 254 aa, DROSOPHILA
MRRRVGLGAIQQQKLAAEKYKDKGTDLQENQLEQMTKQMEVFRVKLEEFAMKHKEDIRKNSQFRKQFQEMCAAIGVDPLATGKGFWSVLGMGDFYYELGVQVVEVCLAANHKTGGLMELDDLRRRLIAARGQSSVHQEITKEDILMAAKKLSIFGNGFVVHKLGKGKYIVQSIPGELSMEETNILNAASNTEQGCVTQSQLIKDLGWTDYRAQQSLDKVLGEGLCWIDKQAGDEPAYWFPSLFPGRNAQTTAAT

SEQ ID NO: 14428 - DNA, 2494 bp, DROSOPHILA
tcccctctccatttagaaattcaaaagtgcattaaggcaatactataaattgtcgtaaaaaggattcatctgcgaaattcctgaatatccatgttatacacaaaacaccaatacacgcacgctgtaattcccacgccccttttggcatgaatgaggggggtcttggcgaaaaaaacacaaacacccacggcaaatatttttagcagcctcaggcttctagcatcccgattaagaatataaacaatatattttaacgagctacacacagctgtttacacatttttattatctggttgattactcgcaatttacgtgcgtttggcgtttaaggtgtttgtgcgtttgcagcggcgatttgaacgaaccgtattggcgtggagtttggcttttcgaattgccgctaacagagcgctgagctcctcacgcgaacgagatccaccgacttttggggaacgcaatttgttggggcaataataacatgaagcagaacaattcactaaaaaatacttgcaagtgtggcaaaataccgccatcagagcaactaccctcggttgcggaaaatgatatgatttagcagtgactcgaaccagtttctttcagtaacagaggctctgttaagtgactgtataaaagtgtggccaggcaacacaagactgttatttttcaaactagttaaaaaggaaatgtagataataaatatgagataataaagtatgaaataataatacaactgttaacttctatgaaatccataaacttttacatatttaccatctattcagcgttttaaacttttttgtatttgttaatttaaaactcttttaagctactttcaaaaatagctttcaaaaaagtgatgtcttgaatttttcccgctacgcagaaatttaaacatagaaattgcagacttccaaatccttttttaatgcatttattttactcgacctcgattattcaaaacttatagatacaagtgtggtggtccaggtaactttatcggcgtgtccaggtgggtagcgctgcatcaatgattacaagagtccatgtttcttggcctcgcccctgaagcaagtgccataggcttcggcggcctcgcagtgatcatccggcacagtgatggcggcacaggtgtcgccgatctccagggcaatctttagcttggccggatcgttgcccgtgtactgcttggccttctcgtgacctgcctccgtgtccagttttccgttggcgtccagaattccgatgttcttcatcacgcaggcgcgcaggcacttgccggcatatgtgctggctggctgcttcttgaccatttcctgcagatcggcatcggtggcccccacttccggcatgcagctctcggctgactccatcagcttggccagggcctccttctcgtcaaaggctcgcaccagtgcggcgccgagaaggacgattgccaccagaatgattggagtagactgcatgatgctaggtcggtgtgtctgaacggaacttgtctatgctgatgagagactcaggcttttatagctaaatcggtgactcgctcggctgtgaaataatatagtacatcgtttaacaatctttacaatggtcgcttaattggccgcatcgtgatcgttattaggggttttcagctaatggatcagctaacaaaatgtagccggtcgaccaataagtgctgaccgcccccataagacacgcacatccccagaaaaggtctaagtgattaaaaaagtgtcccaaccccatgtcaacatgacttgcatatgtgcttcgttacacataattcataagtatcaaaattgtctatcagatgtgcaatcctgcagaccataaaccatataaaatatgaaaatccatttttgaaatttcaaaacctttctaatcgtgcgtaaaattatttttcccattgaaaatccatttaaaacaacatattttgtatatattccatatattttgcatatatttgttggttttttatactttacacaataaaaatgataatgcatctcaacaaaaacaattattcgcggtacttatcggatagatttcaaagacaaaattaatgattgcgtgtaacttttgcttttggaattcatttcccatataccacttgcttggttttaatttgcgtggctttcatttgtcggttattggtatttcagtaatcgattagaaaataaaatagtcataattaatttcgacagatccgtatgtggatcgagaattatacatcgctcctacatatatatacattgaatgcggcatgcaaattctattcgtgagtcatcaattcattgatgttgtggtttttgcgtttggttaaacttaagtcataattaattaacatacagtttaggtaaaagtatttaaagcaacttaaacttaaggttaagagttccctctctttcttctttatttcgcagagtgatttttgtaaagtgtttaaatgtaaaatcatatatcgatcataatttagttatcttccattatg

SEQ ID NO: 14429 - DNA, 494 bp, DROSOPHILA
aagttccgttcagacacaccgacctagcatcatgcagtctactccaatcattctggtggcaatcgtccttctcggcgccgcactggtgcgagcctttgacgagaaggaggccctggccaagctgatggagtcagccgagagctgcatgccggaagtgggggccaccgatgccgatctgcaggaaatggtcaagaagcagccagccagcacatatgccggcaagtgcctgcgcgcctgcgtgatgaagaacatcggaattctggacgccaacggaaaactggacacggaggcaggtcacgagaaggccaagcagtacacgggcaacgatccggccaagctaaagattgccctggagatcggcgacacctgtgccgccatcactgtgccggatgatcactgcgaggccgccgaagcctatggcacttgcttcaggggcgaggccaagaaacatggactcttgtaatcattgatgcagcgctacccacctggacacg

SEQ ID NO: 14430 - protein, 143 aa, DROSOPHILA
MQSTPIILVAIVLLGAALVRAFDEKEALAKLMESAESCMPEVGATDADLQEMVKKQPASTYAGKCLRACVMKNIGILDANGKLDTEAGHEKAKQYTGNDPAKLKIALEIGDTCAAITVPDDHCEAAEAYGTCFRGEAKKHGLL

SEQ ID NO: 14431 - DNA, 5299 bp, DROSOPHILA
cccggtggaggatgcggtttgaatgcaggtagtacagagcggacaccagatgcccggtcacccgacgtgccggctcctcgcccatggctccattgtaggacaggtagcggtgcaggtccatcagcgcgaactcagtgaccacgaaaaggtccgtcttcgactcgaaggactcgatcatctcgatgacgtgcggatgcttcagccgggcctgaatgtcgcactccctgcgcaaattcttcagctctttcgtggctcttccgcgctgcagaacatgaatatggtgtgaactagttgtatggacttgttgctttatcacctggcccgccccactcaccttggagatcactttgatggccaccaccttgctgtcgtccttgcgtgtcgccttgtatacgcacccgaaggatccttgccccaccatcgagcttaccgcgtagcggttcatggttattctttgttttgctgcggattgggatgtgattaccactgaagtgcgtgcggtatgaccgtagcaggttgactccgaggtgggaactcggcttcggtacgtaggtatatgaaaatactagattgctcatacagggttccttttctgataaatgacgcttttgctggacagcaattgtacctaaaaatctatatagaccagatcatgatacaatccaagacaaatacaagactagtttgcgcttttatctgtggcagtaggtattagtattatctgcgaataaacatttattaagtgataaaagttggaacgaactttaacttatatattattatatattataaatatttatatgtatatatttcttaatgtacaaatttttacttaataagtgcaataaatgatatgcaatataaataattaaaaattccaaaagtgcagtagataatataactaattataggtatgtacctatatatcgtaatgtacctaaaattcagtgtgaccaaaccaacacaaatgacccttttgacagcaactcggtacggtcaccctagacaagcacggccgaagaacagctgattgctggctggtttttattgtgcggagccaggaataatcgttgtgaaataaataatgattgccaatttgaacacagccacccagtgagacgacacccacaatcgcagcacgatgcgcgagcccaacctgtacgtgatcctgtcgcacgcgctgatcggtgagtttccgccaaccggcagacacttctgccacgcctcttccgcttccaggcggcagtctaattgagttggggattcccactgccattgaccacactcccaattccaatccgcatcccaggctgcggcttcttcttcctatacgtgcagcatgtgcgcgtgatcttcgagacgcgcaccaacatccagcagctcaatcagctggagcgggaggcgcttctgcggcgcgaggatgccctgtactatgccttctacaagcagctggccgaagggccggacttttggcacggctacgagcagctgaagaacgtcacggacatcgagtatccgcacagtgtcaatgtgctgcagcgattctacgtgctgccggagctggtcacggcgtaagtgactgccagaggagtgatgcccaaaaagtccactaatgcagatgcactttcgctccccaaaggtacttctttcacgtagtgcgctccggcttcaatccaatggtgcaaccgatgcagttctatctggagttcgtgtggctgatgggcggggtaaccctgctggtactctacctgtacggaacgctgctcagcgagaacattttcggtggcatatacggcgtaatctcgtacctgatgttccacagcttcgtggccaagatctatgagcggccgctggcgcgggagaacttcgcctttccgttcattttcctgcagatgttttatctgtgtatctgcatcggaaggatcatacaccgacagcggcacacatctcgcatgttcatggtaataggtgtgctttattgcattaagctcagtaacatctttgcccttcgaagatcttcgccatgtcgcttttcaccgcctgcgccctactctcctggcagttctccaccttcatcttcaccacccagatcctgatcatgatgacgtcctggaacgcgagcgcgctgcccacggctctggtcaacgccttcgtgctggactactcgctgtcgcacctgctgggccacgctctcgcctttgtaatgtcgcacggcaacagccagctgcttctcacctggcagctgagcatctcgctgttcctatttttgattacaatggtgcgacagttgcgtcacgtgcgcagccggcgactgggacacgcgcaggatctgctgaacggcgacttattctcgttgaagttcctcatgctcacactgctgctcgccagcagcgtgcagaccacgctgatagagctcttcaatcgggctggcgtggtcagtgtgacggaaggcgaccagcagcacttcttcgacatatgtgcccactgggctctgcaggtcaatgtcggctttgtcgcccacctttccgcctgcaatccgcagtacgcgcgcgtcgcctggtcagaattgtggcagctggtcaagacgatgattgttaagccgtactgcatgtacggcgtggtcatgctggccatgttcttccggcgctggcgcaagagcggcgccccagtaagtgccctcaccgaagagcagcgcgagagagcgcgcaaatacgtgctggaagacttcatagaggagcacttcgtttccatgagcgacatgtctagcaaggagacggagaaacagctgtataagtgcttccgcctgctcaaaagctgcgactacgactacgagcgctacaagcgcgcacaggccagcctgcgtaaggagcagccgcccgcccgcgacgactttatgcaggatatcaagcggctgcgagcgcaaattaaccgcaacagcgtcaagcagcgcaaggagcgggcgcaggaaaccaaagaagcggccaccgacggggccagcacgccgactgaggaggaggataaggatccggaagcagaatcggaatcgaagaagaagaatcaggagccaggtagtggcgaaacggagaccgagtctgcagcagatcccactgaaacgccgccgtccaggtccgcggacaatgaagaggaggaggaggaacactctgccaccgccgccggctgcggctcaaactcgagtggccatcgacagaggaagcgcagctcctccagacgcagctccgtggtgcccacggccaacgcacagatcctcaacatgcactacgtgtacagcttcctgcagatgctagtcttcacccttatcggactcgccgtgcgcaagctcttcttcctcagcttcacgcagggctgcgtcatcgcacccaccgtctgctccaaactgtggtaccatcgccagcgcaacatcttctggtcggtctcgctggccgtcttcctgctcagcatgttcgatccgggcatggtggtaagttggataccgcctctattgctcacgggaattgttgtgatttcgtcgccctctcaaaaatagaacattcgcgaagagtacttccccacgcgctactccaagagcggtgacgacctggacagcatgctcgagtggatcaagctgaacacagagcgagatgcggtctttgccggccccgtggacatcatcggcaccgtgcacttgaccaccaaacggcccatagtcaaccatgcgcacctggagatgcgtcagatagcgtaagttctcccaatctgagcgagatagcctatcgactatgcccctgctctgtcccgctctcattggcatccatatcctggccatgcacgtactgaaacttccgcctttgtttatcttttttaagggagcgcacggagcacgtgtactcggtgtacagtcgtcagcagtcgtcggatatctacaaccagtgcgcccagctgaagatccagtacttgatcatatcgctggacgagtgcaccaacgaagtgcggtgagtagacgcagacaaaatcctcgagacgggcacttgaacgcttaattgagatattgtattcttatcgcattaatatgtacttttgcctgctttctacaacagcgacgattgcgatctgctggccatttgggatgacaagcagccggcctaccaaaaatacccacagttctgccacgagctgctccacaagaacgtgcccagcttcctgaaagtgttcgccaacgaccactacggcattatcaagatgttctcgcagagcgtccagatcaacctcaagcacaacaagatgcccgagatgtccatatagggctggccgtccacggaggcggcgcgatgatggaatgctggaatcgtgttgtgttgtacgtagctgtgtgagctgtgtgactaggatttagcattttacgatgtgtgtgtattatgattacgtttagtattgccccaacctcggatgcccgaacacatctcgcacccaatcccaaatcccgatcccgcgtagtagctgatttgatatggcagattggcgattagaaggaggccccttccgctagatagtaaactggatgcatttagcagcttgacttgtttccgcgccgctgcgttcaaaccttgtttggatcattccccgcacccgcacctgcgcctgcgccctcgcattcgaataagttaatctagccgaacggagcgaccttaactctaaatactttcgttaagtttaagctaagctttttacatttacgcatgtagtatacatatgacgatgagacgcgtgtggcaacgaaagtggctgcatgtggacgatgtgcatccgggagccacgatcccagacccaaaaacaagcgggtaaacacgcatttgccaggcaataagtgaaataaaatgatatatttgaaacaatcctatgggcatctgttgtttgtttatatctttaaaatgcttactccttattgttcacaacttttgaacagtaaaaatgtgagtatatatttgttttgaaatatattcacatttttagttttatacaatacagcttataatatgtaaataaataatatcattaattatgatttccatttatacaatttatttaaatttcgaatttcaccttacagggtttgtgtcgcagctatccaccctgagtttgtatcgcggtttcgagtcgattgcttaaatatcgatattatcgagcactaccatccgcatctgggattaacttcgtttcgccatccggtcacacacatacccgcaacaatacacgaattttcattaataaacacacaaagtagttaaaattttgggtttacacc

SEQ ID NO: 14432 - DNA, 2760 bp, DROSOPHILA
cctagacaagcacggccgaagaacagctgattgctggctggtttttattgtgcggagccaggaataatcgttgtgaaataaataatgattgccaatttgaacacagccacccagtgagacgacacccacaatcgcagcacgatgcgcgagcccaacctgtacgtgatcctgtcgcacgcgctgatcggctgcggcttcttcttcctatacgtgcagcatgtgcgcgtgatcttcgagacgcgcaccaacatccagcagctcaatcagctggagcgggaggcgcttctgcggcgcgaggatgccctgtactatgccttctacaagcagctggccgaagggccggacttttggcacggctacgagcagctgaagaacgtcacggacatcgagtatccgcacagtgtcaatgtgctgcagcgattctacgtgctgccggagctggtcacggcgtacttctttcacgtagtgcgctccggcttcaatccaatggtgcaaccgatgcagttctatctggagttcgtgtggctgatgggcggggtaaccctgctggtactctacctgtacggaacgctgctcagcgagaacattttcggtggcatatacggcgtaatctcgtacctgatgttccacagcttcgtggccaagatctatgagcggccgctggcgcgggagaacttcgcctttccgttcattttcctgcagatgttttatctgtgtatctgcatcggaaggatcatacaccgacagcggcacacatctcgcatgttcatgatcttcgccatgtcgcttttcaccgcctgcgccctactctcctggcagttctccaccttcatcttcaccacccagatcctgatcatgatgacgtcctggaacgcgagcgcgctgcccacggctctggtcaacgccttcgtgctggactactcgctgtcgcacctgctgggccacgctctcgcctttgtaatgtcgcacggcaacagccagctgcttctcacctggcagctgagcatctcgctgttcctatttttgattacaatggtgcgacagttgcgtcacgtgcgcagccggcgactgggacacgcgcaggatctgctgaacggcgacttattctcgttgaagttcctcatgctcacactgctgctcgccagcagcgtgcagaccacgctgatagagctcttcaatcgggctggcgtggtcagtgtgacggaaggcgaccagcagcacttcttcgacatatgtgcccactgggctctgcaggtcaatgtcggctttgtcgcccacctttccgcctgcaatccgcagtacgcgcgcgtcgcctggtcagaattgtggcagctggtcaagacgatgattgttaagccgtactgcatgtacggcgtggtcatgctggccatgttcttccggcgctggcgcaagagcggcgccccagtaagtgccctcaccgaagagcagcgcgagagagcgcgcaaatacgtgctggaagacttcatagaggagcacttcgtttccatgagcgacatgtctagcaaggagacggagaaacagctgtataagtgcttccgcctgctcaaaagctgcgactacgactacgagcgctacaagcgcgcacaggccagcctgcgtaaggagcagccgcccgcccgcgacgactttatgcaggatatcaagcggctgcgagcgcaaattaaccgcaacagcgtcaagcagcgcaaggagcgggcgcaggaaaccaaagaagcggccaccgacggggccagcacgccgactgaggaggaggataaggatccggaagcagaatcggaatcgaagaagaagaatcaggagccaggtagtggcgaaacggagaccgagtctgcagcagatcccactgaaacgccgccgtccaggtccgcggacaatgaagaggaggaggaggaacactctgccaccgccgccggctgcggctcaaactcgagtggccatcgacagaggaagcgcagctcctccagacgcagctccgtggtgcccacggccaacgcacagatcctcaacatgcactacgtgtacagcttcctgcagatgctagtcttcacccttatcggactcgccgtgcgcaagctcttcttcctcagcttcacgcagggctgcgtcatcgcacccaccgtctgctccaaactgtggtaccatcgccagcgcaacatcttctggtcggtctcgctggccgtcttcctgctcagcatgttcgatccgggcatggtgaacattcgcgaagagtacttccccacgcgctactccaagagcggtgacgacctggacagcatgctcgagtggatcaagctgaacacagagcgagatgcggtctttgccggccccgtggacatcatcggcaccgtgcacttgaccaccaaacggcccatagtcaaccatgcgcacctggagatgcgtcagatagcggagcgcacggagcacgtgtactcggtgtacagtcgtcagcagtcgtcggatatctacaaccagtgcgcccagctgaagatccagtacttgatcatatcgctggacgagtgcaccaacgaagtgcgcgacgattgcgatctgctggccatttgggatgacaagcagccggcctaccaaaaatacccacagttctgccacgagctgctccacaagaacgtgcccagcttcctgaaagtgttcgccaacgaccactacggcattatcaagatgttctcgcagagcgtccagatcaacctcaagcacaacaagatgcccgagatgtccatatag

SEQ ID NO: 14433 - protein, 872 aa, DROSOPHILA
MREPNLYVILSHALIGCGFFFLYVQHVRVIFETRTNIQQLNQLEREALLRREDALYYAFYKQLAEGPDFWHGYEQLKNVTDIEYPHSVNVLQRFYVLPELVTAYFFHVVRSGFNPMVQPMQFYLEFVWLMGGVTLLVLYLYGTLLSENIFGGIYGVISYLMFHSFVAKIYERPLARENFAFPFIFLQMFYLCICIGRIIHRQRHTSRMFMIFAMSLFTACALLSWQFSTFIFTTQILIMMTSWNASALPTALVNAFVLDYSLSHLLGHALAFVMSHGNSQLLLTWQLSISLFLFLITMVRQLRHVRSRRLGHAQDLLNGDLFSLKFLMLTLLLASSVQTTLIELFNRAGVVSVTEGDQQHFFDICAHWALQVNVGFVAHLSACNPQYARVAWSELWQLVKTMIVKPYCMYGVVMLAMFFRRWRKSGAPVSALTEEQRERARKYVLEDFIEEHFVSMSDMSSKETEKQLYKCFRLLKSCDYDYERYKRAQASLRKEQPPARDDFMQDIKRLRAQINRNSVKQRKERAQETKEAATDGASTPTEEEDKDPEAESESKKKNQEPGSGETETESAADPTETPPSRSADNEEEEEEHSATAAGCGSNSSGHRQRKRSSSRRSSVVPTANAQILNMHYVYSFLQMLVFTLIGLAVRKLFFLSFTQGCVIAPTVCSKLWYHRQRNIFWSVSLAVFLLSMFDPGMVNIREEYFPTRYSKSGDDLDSMLEWIKLNTERDAVFAGPVDIIGTVHLTTKRPIVNHAHLEMRQIAERTEHVYSVYSRQQSSDIYNQCAQLKIQYLIISLDECTNEVRDDCDLLAIWDDKQPAYQKYPQFCHELLHKNVPSFLKVFANDHYGIIKMFSQSVQINLKHNKMPEMSI

SEQ ID NO: 14434 - DNA, 5415 bp, DROSOPHILA
cagttgagtatcggctccgagttcagtccaatgtcggccaggaagttaaagttgtcctgggcatagcccatcttgaacttgccatccgcctcactgttgacccgagatgtttatataattaaaggatgctacctaaacgatccccaaaggaatacgcactttgatcccggctgaaacttggcctcgacggccaacatcaggccctgtgccaacttatcccggtgcataatctcaccgaagagccagttctccgtgttccatcgctcggttagggtcaggccttggtcctcgatcttgtacttgctctgaagcgagccggtcaccttgctgttgtcctggctggcgaagccggtggtgaagaactcaatccccgaattggtcagggtcttgcagtcgatctgccagatgcccggatggtagccgcgcttgaagagatcgcgggccagcttgcccagatctgggtatgtcggtgttttggcggccattacgggctgtatgaataggtggtatggtatatatggcccgactaatttcgaaattttttgtctacttttcaacagcctcgattagccgaaaatttatgtctaacgctgcctgatcagtatcgagttttatacacgctggagacctgtgaactaaaacgcacggagtcctgtgcccaaccgaaaaagttaagtttttcaagcacaaagaacttgggatcagtataaggtacttatcttattatacagttttttctttcaagcttaaatccttaaattaagctaaccattcccaagccttccaccaccaacgctgcaatcaagataatttatttcttctcgatttatttctcaggtaaatgcacaacgaaaaggtaaagattgttattaaggatgtgattttggtgttatgtgtgtcctagtttcgccgcaggattttgcaggcaatccgtaaagccttgagaactgaaaaaaatgcaatgccttttgagccataatattccgtcttttccattttgtttttttttttcgtttaataggtaaatgtatttttactgcacttttgtcaacaacaatttcgctaatattcaatgcactaatcaaagctacatccaacgacgacggactgacctgaccgacccatcgattgcaccacccatccatccccctgcatcgtttgtttggcagtgtctctcctgcagattcgcgtggctggggcagggaatgggcggatgtggtgatggccggctgacaactaatccaatccaatcgaatcgctaagatgtgcagattctctttatatttgactgtgtgttgtttgtttttaaagaatatcgtatcttttattttgtttgatcttgttgttgtttctgcacttgtctggctgctgttattgttgttgttgttgttgttgggcgtgtggggatgttagacaacgttcaaggatttcacgactagcggaaaaccacggacttaggcctccagctccagacccacaccgatcttgtggccgccggcattgaagttcttgccatcgaccagcgtggacagggtcagggtgactccgtcgcgcaacttctgctggtagcccagacccacctggctggcgttgttcaccttagcgcgcacgctggcatcatcatccagctgatacttggcgccgatggcgaacttggtgttgctggtgccgctggcccacgacagctgtacacccacatccagcttgtccgaagtgcgttggaagatcgagccgctgaactcctggccatcgttgctaaacaccggacaaggcaatcattagtttgcattgatttcatttgccatgcgtggcaattgcaatacttacacagctgtgtgcagaacaaagtccttggtggtgtagccaagggcaaagttgttggtggtcagcttggactgttgtgtgtcaaatgcggtctggtagccggccaaccatccctggtagccaagcacggcagaggcattgatcaaggggcccttcagatcaatgttcacatccgaatcggccttgacgttctcatggccgtaggcaaccttgaacttgccgttcttgtttctgacgatttttaattaaatatgcaatattaattattctgcagtgaacatatatgtaataacatgtgatccttacccagactgaggagcaaagttgccctccagggacagcttcagaccctcgaggagctgatcctggacagcaacctcggtgaacagcgtgttgtctgtgttccacttctcggtgagggtcaggccgtagtccttgaccttgtacttggtctccagggagccgaagacctttccagactcctggttggagtgtccggctgtgttgaactcaatgcccgacgaggtcttagtcttcagatcgagcttccacaggccaaagttgtagcctttgctgaagatgtcgcgagcctgtttgcccaaatcgctgtatgatggaggagccatctggaatggattgaaatggaatgcattaaatcgcaccttcaattagttggtgaataatcgataatcatgacgatgatacttattgcgaaatcatttcactcgccaggtcattaattgcgtttagcgaacgataagtttaatcttatcagcaacataatgattattactttttgctcgacttgatttcaaaatgttctatcggccgcaaatgaaaagtgaaaactaaaagacgccaaaaaacagcatcaacatgtcccaagaatttcgagggctttttccccattttcactttggctaaatgtcaattttgtgcggcgaaaataaagaaatcaatttagattagtgttcaaggcggccacatgcaaagaatcaccaactgaagcagcgaaaattctgagtgactgaggagggggtcaatgcacgtctgggcaaaataaagtggcgcaaaaaatagaagcgaagatagaaaacaaatagtgactaagtctattttactccaagaaattaagggttttctataccaatgcaaaaccatttaaatcaaaatttatttttcaaatatttttataggttttttaaactaaaattttaataaaaatactgagattttccctatttatctggccacaggtttgcctctctctatgtttacgttccgttcttgctggcattaattgctggtcagttcagtcccgttaggctagcgatcattgactcagaagctaactgcacatttgcaacgtctgctgtggtcactgcttcgctgtttctatttgcgtgacgtcaggaatgcgactcacagtcgcggtaggaatattagtcgcggataaataaatttctatccgatattgagcataaaaaaaatcaaacaaaaataacccaaaacatctaattgaaattattatatagatataacaatataaatatttcatgttgtgttcggggggattggtggggggaaactcaaggcaatcaaggcagaaaattatgaaaagcagcggccagcagacaaaaatctttatggccggcagccaaacgttaaatgggatgggctcttattgttccggaagtcaggtgatataacctggtcactagatgctgaaaataatactatcaggtggatgtcccggtgaaaatgaatcagcatctcgttgacgatgaccttgacaagcagattataaagggggtggttgggtggatgtgcagctcattttttcgacagttgcataacagcagggaaatcgatgagggaaagtggaaagctaagtgaatagctgcccgaaaaggtggtctattgattttccaggtgacgtcactgcgaaaataccacccacaatcgcgaagtgcacccacctcctcacatgaccacaaacaaacaaaacgacgataaagaacggtaaagagtgaaatcgaaaatgtttattgagcgagctgcacgctggtggatggcaacatgacgataacgaacggaattgatgcgacatgcgttacgtaacggaaattcgccaggcacttttccatcgatctctctgcttctttgcccccttttttcgccggcagctgctgccaatgaactgcgaaggcattggtgtgcgtggactgttcatgtgtggatgtgtgtgtgacagctaaccggcttaatatcccctttaaatttcggatttatcaattaattattgcgtgatttggtgataagaagctcgcccatcgtcatccaacaaaaaagtgctcagcccttttgcttttcgttcatgcgcgtgtctacttgcaattttttcatttcgaggttatgaaatcactggcaccgaaaatcctgattttccttctacccataggggtatccatcacatttcactgaattttgagggggtttactcctgagctacttacttttgatgagttttagtttggttagagtgtaatgcgaaacgcagaggaacagagacaccacgacaaacgtacaccaaaaaattttgtaattctgtgccttagtgttaccaaccctaaaaattcgtccaataattattccctaaaacaagccgcagatatactatctggtaacgctgcgtcactcttaatggcaatggtcacactttttgtaacggaaatttgaaaactaacggttacttaaaataattattgaaattagaattcaatcattctattaagaaattcgttatcttaagaacaattaacttacatcaaagtgttttttttttacataaaagggtttcctgcaaacgaaaactttaaagttgtggacaagtaaatgggctttaaaaaagttataatccaaagcaatcaaaatgcaataaatatattacaactttattgattgacaccaatgaagtgtgtgcgatgctctttttatttttagacgaatctgcgtgcagggccgccaatcgaccgcataatcccattcggatgggccaaaagcgagaccagtgcatttgccgtgcggcgacagaatgttgaaggcccgtctgcaggaggacgccgtgctgggacgctgcttggccacctctagctccgtggagcggggcgagctggtgctggaggagctgcccttcgcacgcggaccgaagcgcgacagcggaatcgtgtgcctgggctgctaccagttcctgcagttcggagaggacggcgattcgctggaccgctgcgaactctgcgattggccgctgtgcggatcgtgcgccgacgacgaagacgtcacggagcaccgcggagagtgccaggtcttctccgccgcacgtgtcactttcgccgggaatgtgagcgatgatggcgtctgcccgcagttggattgcataaccatattgaggttagttcgcgggcgctccagcggggcgggggtgatggtgctgggtacatccgtacagcaggggctactgggtgctactaggggaacctgggcggtctgtccgaatattagttttggcagcagcggcccatttctcgcagt

SEQ ID NO: 14435 - DNA, 1378 bp, DROSOPHILA
ggtgtacgtttgtcgtggtgtctctgttcctctgcgtttcgcattacactctaaccaaactaaaactcatcaaaaatggctcctccatcatacagcgatttgggcaaacaggctcgcgacatcttcagcaaaggctacaactttggcctgtggaagctcgatctgaagactaagacctcgtcgggcattgagttcaacacagccggacactccaaccaggagtctggaaaggtcttcggctccctggagaccaagtacaaggtcaaggactacggcctgaccctcaccgagaagtggaacacagacaacacgctgttcaccgaggttgctgtccaggatcagctcctcgagggtctgaagctgtccctggagggcaactttgctcctcagtctggaaacaagaacggcaagttcaaggttgcctacggccatgagaacgtcaaggccgattcggatgtgaacattgatctgaagggccccttgatcaatgcctctgccgtgcttggctaccagggatggttggccggctaccagaccgcatttgacacacaacagtccaagctgaccaccaacaactttgcccttggctacaccaccaaggactttgttctgcacacagctgtcaacgatggccaggagttcagcggctcgatcttccaacgcacttcggacaagctggatgtgggtgtacagctgtcgtgggccagcggcaccagcaacaccaagttcgccatcggcgccaagtatcagctggatgatgatgccagcgtgcgcgctaaggtgaacaacgccagccaggtgggtctgggctaccagcagaagttgcgcgacggagtcaccctgaccctgtccacgctggtcgatggcaagaacttcaatgccggcggccacaagatcggtgtgggtctggagctggaggcctaagtccgtggttttccgctagtcgtgaaatccttgaacgttgtctaacatccccacacgcccaacaacaacaacaacaacaataacagcagccagacaagtgcagaaacaacaacaagatcaaacaaaataaaagatacgatattctttaaaaacaaacaacacacagtcaaatataaagagaatctgcacatcttagcgattcgattggattggattagttgtcagccggccatcaccacatccgcccattccctgccccagccacgcgaatctgcaggagagacactgccaaacaaacgatgcagggggatggatgggtggtgcaatcgatgggtcggtcaggtcagtccgtcgtcgttggatgtagctttgattagtgcattgaatattagcgaaattgttgttgacaaaagtgcagtaaaaatacatttacctattaaacgaaaaaaaaaaa

SEQ ID NO: 14436 - protein, 282 aa, DROSOPHILA
MAPPSYSDLGKQARDIFSKGYNFGLWKLDLKTKTSSGIEFNTAGHSNQESGKVFGSLETKYKVKDYGLTLTEKWNTDNTLFTEVAVQDQLLEGLKLSLEGNFAPQSGNKNGKFKVAYGHENVKADSDVNIDLKGPLINASAVLGYQGWLAGYQTAFDTQQSKLTTNNFALGYTTKDFVLHTAVNDGQEFSGSIFQRTSDKLDVGVQLSWASGTSNTKFAIGAKYQLDDDASVRAKVNNASQVGLGYQQKLRDGVTLTLSTLVDGKNFNAGGHKIGVGLELEA

SEQ ID NO: 14437 - DNA, 4322 bp, DROSOPHILA
atccgtattcaaggtgattctgctggagcacattgtgatgtgccgcatggtgatgggcaaccgggaactggctatccgggaaatagcagccgcgagagacgtttgcatggccgctccgcaacgcagcctgctacggcgacactcggctcagctgcactgcctcatcgggctctactccatgtccaccaacctctttgagcatgcggagaggcagttcgtcgtgtgcgtgagtgagaccagcgagcgagacctgaaactgtttgccaacctcaacctggcgatcatttatctgcgcaccaagcgggacacggacctcaagcaaatcctggatgccgtctcaacggaaaacacgcacacgtatagcagtcaagcgctgatgggaggcttctactacgtccagggactgcatgcttttcacaaaaatagcttccacgaggcgaagttagtcaccttaagccaagactctagaatgtaaactgataatctttattcttttcagacgctttctgcgtgaaactctgaaaatggccaacgccgaagacctcaaccgactgaccagctgctcgttggttttgctatcgcacgtctttctcagcatcggaaactcaaaggaaagcatgaacatggtgacgccggccatgcaactggccagtaagatacccgacatccacgtccagctgtggggatcggcaatactaaaggacctgcatcgtatgtcaaaggatgtgcagcatgaaaaagatgcttatgctaaccacgttaaatactcggagaacctgattgcagaccagcgcaagtgcgtccaaagtgcgcatcacgaactcgtcaactggttccagggcgatccgccagtgacgagtggtccgccggctgctcccgtcctgctcatgccagagtcctccgttacagcctcagtccccgtcatcgcctccacatcgacagccatgcagccggcggggcaatacggtcagttctactagcaatgagatgattatgcaatgtaactttaagcttttatttttatctacgacctagcgactaagttaagactaaagatgttctaaagttgtgaattttgtcataaactgtgttcccgagggaaagagtagacggaaatgtaaagcggatgagttgtgcgcatttgagttgggtcgttcaacttaggattataatcattattacaattaaaagtaaggatccgtcttgggtattaggcaaactcaaccacctttacaaaagccgccttgcttgcacagcttctacattgatttatagcataagcgcagactcggtcatctcgttaagttcctcttcaagggccccgcttccgttttccttgttgcttagaaatgtgaagtgcaccaggcgtttgtcgtgctgctcgtggccggccagatgtgatcgcatctcgggcatcgacttgaactcctcattgcacaccggacaaatgtagatccgctcgccctgatgtgtacgctggtgcatctggcagtcaccccgctgcgtaaaggtcttcgagcagaagggacagacgtacggccgctcacctgtgtgcgtccttcggtggttctttagcacattgagggcagtgaatctcatggggcagagatcgcaggcgtatggccgttcgccagtgtgctttcgtttgtgcttggccagggagcaactagtggtgaatctggccaagcacacctcacactcgaagggcttgtcgccggtgtgggtgcgtgcatgagaggtgagttccgccttggtaacaaacgagtgcgggcacagctcgcacttgaaactctttgtctccgagtgacgcagcttgtgctggcgcagattggcattctgtgtaaagctcttgccacagatattgcacacaaagggtttctcgccggtgtggatgcgcatgtggtcacgcagcgtggacagcatggtgaatactacaatattaagagacaattaaataggattttcgaccactctttgttatcttacctttctgacagatattgcactgattccgcagattccgcttgtggccctgcaccatgtgcttgctaagtgcctccttggaatcacagcgtattccacactccgggcaattgtgggcaccatgactggcctggtgttccgccaagtgatccggcgacacgaagaccttttcgcactcattgcacttgtagttgcgattaatgcagcccttttggcgtctgtggatcatcaacgatttctccaccgcgaatcccgcattgcaacgatcacagtgatatttgagctcaggggtagtagctgctcctgacgttgtgcttggcccgtttactgttcccgctcttggcgcgctgagttttcgctgtgttcctaaccgatgctgtttgggggaaggctctgcatctgacggcggtgtagccggtacatcctgcttgacaactccgcgacgccgtgaggtgcgcttagccgactgaggtacttgttccttctctaattcgcgtgcttcctccttagaacccacaggagtctgatgcttatcgttttcctgctgcgttagaagcttggcagcgctctttctggtggttacctgcggagcggttactgtgatgatctccgcctcgttatcgacaccttcgaagatggccaggttacattccctgatctgctgttccagctcgtggtcgtcgccttcgtaaataacattggtttgggtaaacacaacttccttttcgtccttcaagttcccctggacctgcaggatgaggctggtggtcttttcgacgggctcatccggcagctcgtaatcgaatacctcgccctcgccttcgtagtccaggtccactgaaatcgttgacttaatcaggctggtattctgttcggcgtctgtggtagtcactgcgtccgtttgcacggaggctgtgcatctgtccggctcccagctagtggtctgcacagcctggtccgtcgtggccactggacaactgatagacaccttgctatcgggctcctccggcaacgcattcggcagcaattggcgcagggtgcgactggagttctcgcacttgatcttgaaggtatagcaattggagatttcactcaaacagcttaggcacaccttctcgggcagattatcgttgcggcggggcttgaaaacgcgaattaaatcgagattaacatggaaatcaggatcactcggcgaaggcaactcaccttggtttttgtgaactcccggatcatgtccgccaggcagctgccggatccgccgtcgtagatggacaggagtggtcccgtggaactcaggcaggtaagacagatcttgtccacatccatttcgcgacgcaatcggtcaaatgcagaaacaaaataaaacaattaaataaatgcagtatggctgaagtttgttacgctgaatataccgatgcatttcaagtgcacctggtcacacctttaatgctgttggcggccttcgcgcaattcaaaaaataattctaatgagtaaagaagagtattaaataatctaattttatggcgataagtgcattgaaataaaattatttcaaatgtgaatcgtatatatacaagaatctgggcttattcttgtttcatctaatttttttacttattaacaacaaataattcttttcccaatcgatattgagttatattaaattgtgatcacgagagttcggctcatctctatagattagaattgtttcgacaaaagataagctcttttgaccataatcagaaaaacacaggttataaagatttcccactatgtcgaaatccggagagtttacattccggcgtgctctagctgaagatattaaagatgtgctctccatgattcaagttgagttttataagattcctattttaataccaatttgagatacttttgaattgatctgcaggaactggctgactttgagaagatgagcaatggtccccagctaacagaggaaggtaagagatggcgaaacccttaccatagtaatgaaataatggtaaagtaatggattgtaatatgacagatcttaaacgagacgcaggactcactggtggccaggagtattgtgaagtctatgtgcttgtagacaacgatactgagtaagtgctgtagttcttggcatgacctgattaacttgtgggcttgttctcctattctagtcaggcgattgggtactccatttgctacaaggcatactcaacgtggcagggacggtacttcttcgtcgaggacatctatgtccgccccgagcaccgtaaacgcggcgccggaaagcgaatcttcttggaggttgcatcgcgggctgtagagcttcagtgccctcgcctggagt

SEQ ID NO: 14438 - DNA, 2133 bp, DROSOPHILA
attgcgtcgcgaaatggatgtggacaagatctgtcttacctgcctgagttccacgggaccactcctgtccatctacgacggcggatccggcagctgcctggcggacatgatccgggagttcacaaaaaccaagccccgccgcaacgataatctgcccgagaaggtgtgcctaagctgtttgagtgaaatctccaattgctataccttcaagatcaagtgcgagaactccagtcgcaccctgcgccaattgctgccgaatgcgttgccggaggagcccgatagcaaggtgtctatcagttgtccagtggccacgacggaccaggctgtgcagaccactagctgggagccggacagatgcacagcctccgtgcaaacggacgcagtgactaccacagacgccgaacagaataccagcctgattaagtcaacgatttcaaccaccagcctcatcctgcaggtccaggggaacttgaaggacgaaaaggaagttgtgtttacccaaaccaatgttatttacgaaggcgacgaccacgagctggaacagcagatcagggaatgtaacctggccatcttcgaaggtgtcgataacgaggcggagatcatcacagtaaccgctccgcaggtaaccaccagaaagagcgctgccaagcttctaacgcagcaggaaaacgataagcatcagactcctgtgggttctaaggaggaagcacgcgaattagagaaggaacaagtacctcagtcggctaagcgcacctcacggcgtcgcggagttgtcaagcaggatgtaccggctacaccgccgtcagatgcagagccttcccccaaacagcatcggttaggaacacagcgaaaactcagcgcgccaagagcgggaacagtaaacgggccaagcacaacgtcaggagcagctactacccctgagctcaaatatcactgtgatcgttgcaatgcgggattcgcggtggagaaatcgttgatgatccacagacgccaaaagggctgcattaatcgcaactacaagtgcaatgagtgcgaaaaggtcttcgtgtcgccggatcacttggcggaacaccaggccagtcatggtgcccacaattgcccggagtgtggaatacgctgtgattccaaggaggcacttagcaagcacatggtgcagggccacaagcggaatctgcggaatcagtgcaatatctgtcagaaagtattcaccatgctgtccacgctgcgtgaccacatgcgcatccacaccggcgagaaaccctttgtgtgcaatatctgtggcaagagctttacacagaatgccaatctgcgccagcacaagctgcgtcactcggagacaaagagtttcaagtgcgagctgtgcccgcactcgtttgttaccaaggcggaactcacctctcatgcacgcacccacaccggcgacaagcccttcgagtgtgaggtgtgcttggccagattcaccactagttgctccctggccaagcacaaacgaaagcacactggcgaacggccatacgcctgcgatctctgccccatgagattcactgccctcaatgtgctaaagaaccaccgaaggacgcacacaggtgagcggccgtacgtctgtcccttctgctcgaagacctttacgcagcggggtgactgccagatgcaccagcgtacacatcagggcgagcggatctacatttgtccggtgtgcaatgaggagttcaagtcgatgcccgagatgcgatcacatctggccggccacgagcagcacgacaaacgcctggtgcacttcacatttctaagcaacaaggaaaacggaagcggggcccttgaagaggaacttaacgagatgaccgagtctgcgcttatgctataaatcaatgtagaagctgtgcaagcaaggcggcttttgtaaaggtggttgagtttgcctaatacccaagacggatccttacttttaattgtaataatgattataatcctaagttgaacgacccaactcaaatgcgcacaactcatccgctttacatttccgtctactctttccctcgggaacacagtttatgacaaaattcacaactttagaacatctttagtcttaacttagtcgctaggtcgtagataaaaataaaagcttaaagttac

SEQ ID NO: 14439 - protein, 616 aa, DROSOPHILA
MDVDKICLTCLSSTGPLLSIYDGGSGSCLADMIREFTKTKPRRNDNLPEKVCLSCLSEISNCYTFKIKCENSSRTLRQLLPNALPEEPDSKVSISCPVATTDQAVQTTSWEPDRCTASVQTDAVTTTDAEQNTSLIKSTISTTSLILQVQGNLKDEKEVVFTQTNVIYEGDDHELEQQIRECNLAIFEGVDNEAEIITVTAPQVTTRKSAAKLLTQQENDKHQTPVGSKEEARELEKEQVPQSAKRTSRRRGVVKQDVPATPPSDAEPSPKQHRLGTQRKLSAPRAGTVNGPSTTSGAATTPELKYHCDRCNAGFAVEKSLMIHRRQKGCINRNYKCNECEKVFVSPDHLAEHQASHGAHNCPECGIRCDSKEALSKHMVQGHKRNLRNQCNICQKVFTMLSTLRDHMRIHTGEKPFVCNICGKSFTQNANLRQHKLRHSETKSFKCELCPHSFVTKAELTSHARTHTGDKPFECEVCLARFTTSCSLAKHKRKHTGERPYACDLCPMRFTALNVLKNHRRTHTGERPYVCPFCSKTFTQRGDCQMHQRTHQGERIYICPVCNEEFKSMPEMRSHLAGHEQHDKRLVHFTFLSNKENGSGALEEELNEMTESALML

SEQ ID NO: 14440 - DNA, 7213 bp, DROSOPHILA
attaagcgaacattaaaaagatgtgaaaacataactattatgtctaaataaacacacgtcagatgtatgtacgtcaacggaaaaccattgtctatatattacaattactaaatacataccaaattgaatacatattgatgaaaaataataaatactggcgaaagcaaaaaaacgaaacatttttattttattgaacaactctcaggctccaggtaggcaaaaaaatgtggaacgcttcacgattttgcgtgtcatccttgcgcaggggccatgctaatcttctctgtatcgttccaattttagtatatgttctgccgaagcaagaacgacgttaaattgaaaataggtctatatatacgaactgagtctggaaaaagaagttgagaattataaaaagtagtgagcactggcgccctctctgcttggcgagctaaccttttcgcctcttggctgagtaggtggcgtttcattctactctgtaaaattaatgtagaattgaaacactatggtcaaaaaatacttaggggcataagttataaaacgtatgaaatgaatttttatcaacctgggctattcaaaaattttcgaattattttatgtattttttttaatcgtttttcattataggttaaaatacactttaaaaggaattctttcctgtaaaataaatataaataaatatgctttattgacagaaaatttgatgtttttgtatttgagtaggagcaatcacaggtgagcaaaaaaatgtggaacgcttcacgattttgcgtgtcatccttgcgcaggggccatgctaatcttctctgtatcgttccaattttagtatatgttctgccgaagcaagaacgaagtattgaggaaaacatacctatataaatgatcaacatcaggaaagagcagttgagaattataagaattggcaaatggtcttaagaaccctctgcttaagattttcaaaatttcctttagaatcaaagtgtcctattgttcgtttgttgaaaacacagttcgatttattgactataataaattgatagttttaaatatagaggcacgactaagagagtttggttttgttttggttagggaccaaaaaaagtatacataacgaataaaaaaggatttaagtgcaaatggtaaaaaagtgtcgagtttttcttgagttgattgtgctgtaatgagactctgcattcggcatttgactcggcttttcctactcgtgccgtatttcaggctgcaagtcgaaccaagaattcaagccagtttgtgtggttatctcggcatcatccagaggaattttcagctgaaagaagagaacatataaaacgattgtagatgtgacaaaaaaatgtggaacgcttcacgattttgcgtgtcatccttgcgcaggggccatgctaatcttctctgtatcgttccaattttagtatatgttctgccgaagcaagaacgaagttcacccggatatctttcctatatatactgtactcttgcagaatatgtacttgggaatcataaggatgcgaaggacgtacgcgctgtgtctgtaactaaggggttgctttcgggtacctaccatgccaatgatgggactaccgccggataggaatcccttttgggtgcacaccgtcacctccagttccgtctgcctgagttcggcaatggaaatcaggtactcaaaggatgcatcgtagacggggttgcagttgtccttgatcacgctcgtcttgcgtttcgactccttggtgcgtccaggcaacagatacagcttaacatacggatcggggatattgctgggatcgcgaagtggtatcttctggattttgtgtatggtcacgtctagtttttgacgctgggcgctgtagcggatcgacaactgcattcgtccaaggccatgttcgccgggtgaggaggtggagtctggaaagcggtgggtcagcacagaggtggccagctcgctgatgggtttttcgctggaggtggaggccgacatggccggggagattttcgtagccgccacaggatcttcttcactgatgggcgattcggcggacaaacgcttgctggatgcctgagattcctaaaagcaatggcaaattagattcaattaaaacaaaaattgtttatataacaaagtaaaagaaaaaaaaaaagaatcacagattctccccgacggggaattgaaccccggtctcccgcgtgacaggcggggatactaaccactatactatcgaggacgttgaaaatattcgagcaaaaactaattcttatagaggatgtggtcgtagttagtttctgtatggttctgaaaggacctatctttgtaactttttatgagattctctatagtcacattctacgtaattctgcaagtttatcgttgagttgtggaaaactgaactcaccttaaatgctggaggagaaactgcagcaacatctggtgttttcacggaactgctgcgcgtgagcgctgccacttgctccaaggcatccgaatccttgtcaatctcgccgggcttcaaaatgcgcagcgatagcgacatatagagcttcgattccggtccagacttctggagttggaatggctgctgtataacctccatattgaattgcttcagcagcgtgctgagtgtataggtatattggccaatgtcgtttcctgtcttctggtcgtagatcttgatgttcagactctcgttgtcgggattgctgaccaggaaggtgaagccctgctcccaaacgggagaatcatctcgcattatcatggcagtctgctgtttttgcttgttcacgctgcacaccagatagggatcgggtttggagctggatcgagcttgctagaagtggatatttcatttaattgatttatttattaattcatttccaatcaagcccaccttcaaatgcctggctgaatcgatgaatacactgagtaccgccgaactcatgctggtcacgcgtaggagttgcgtttccagcaaaatctgttgcagatcattgggatcggcagtgagtttgtaccattgcaggcggacatgcagaagtccatgcttggcatcttccaaggtgagccactatatattatgaaacatattattttcatacgtgtaaatgcgagagttctaattacttacactatccacaacgcctttcttgatcacgctggcaatatcgatgctggctctattttgggtagttaaaaagttaaattagttcacggcaaatatgattttaaatcaaaagaaaaaaaaaaagaaaataacaagaacaagaaaatgacaacttctcaacgggttcccttgaaattcaagctatttgagggcatctcgttctgagttcttgttgggttaagttattggggcaagtgtgtgtccgtttttcttgtatgttcttgtggatgagttcgttggtgttcaatcaattaatcgatcaatcaatcaaatagatggttgcctaacctgccgagcgactcgtcatcactagtacggtcccagtcaaaaagtctgagcacgagtatggcatgctgcgagacctcgaccacagcctgctccattcatcgttcgaatcaaaagcaagttaaaagacatttttcgcattattattggttagttccagcgcaaagtctacacaaactacggtccaaatgtgggtggattatttacaggatcgaatctaactacttgtacaaaatatttgtcattggcatgccggtgattctggtttcattcattgtgtgtctgtggtacaaagtgctccagcttttgcttgtgattcaaaaacatgtgtcaaaagggcatgcagattagttttgaatcgagtcatgttaggtcggcatggcgaaagtgttgagattttcttattaatcaaatttacttcagcatagtataataaactcaaatggtaactacagtttaaatgatactaaaataccaatcaaactaattgatgattgttaacataattcaaacattaggttatgtgaaacaataagtaaacacaattcaaatgctatttgtttaatcaaactattggggtcacgaaaaccacttcaattggccaatttctcatcacttcgctgtgtacgttttttttttatttttttttgtgcttgttagtaaacgtattcagaagataaatgaaaatcaagagatacaaaaaaaaaaacgaagatagaacaaacaaatgcagtttcatgcggcaatacaacctgcccaatacatcatcgctctgtacacctggcatagtctgatcatagtcccacaaagaaaacccaatatagtgaccaatggtggtaaaaatacacgcctagaaaaacgaaagtgtgtgagtgtgtttcctgcggtggcagagaaagtaggcaaatccatagagcaaagcgaaacggaacgaaacgaaactcaaggatatatagtcagtcacttctcagtcacttcatgcaaaaacgagctctcaacaaggattactcactggggattttcaagaaggatttttggggtggagtgtgttggtggtgttgtgttaactcaacaaaaagtgaaatgataatattgcttacctgcccaggttctcgtctttcttggaatcgtccgagtccttcaattgaatctcgacaaattgacccatttcaataaaaacagtagcctgcgttcaggcgccaaacaaagtaatcgagtgatgataaaggaatgaaaaatcaaaatggaaaataacacaagggcaaaacaacgaactattatgcaataaatcggtggtttttttttgtgttggattgtttcatgcagcaatcaatcgacaacatcggcagactacaaaaagcaaggcaagaagcgcaggggatcccacggcggggaatccccgcaggaatcagccaaggaatacgtacctcacaccaatagtcccacttgggattcacattgttatcaatgatctgggtcttgaactcctgggcgcccacattgatgatggcatagggatccgacttgcctttgcccagcacactgatgtccttcttcatcagatccttggcctcgaccacgtgaatgcgcaggatgccctgaaaattgccatccatatataaaaaaaagattgatattaatagtcattgtggacccacctctggttcgggcatcttgagggccaccgccgaaacctcttcgctgagtgaaatgggcagtttgtttggcaacaccatcacattgccaatctgctccacgatgatcctacgcagcaagtcactcagacccggcatgtccataaaatcaatcacacccaccaaattgaaatcgatattcggattgttcaggaagaagatctgcagaccgcccaccagtggcatcgatcggatcagtggcttcatcaccactcgcacccagccatggatctgaaaatccttgatgccacccttcataccacccaaatagaaattgatgtcgcaatcgctggcataaaacagatccagatccataatgatctcgttgcgatccacgttcttatcgtagatcttcacaccgccgatccgcggtggaatggtgcccagaataatgcgatcgaaccgaaagccatgcatcttgtagttggccagagctaaagccacattgggttcgatggtttcctttaccaaggtgcgtgcaaagtgattggcattgggccacacttgtttcaagatctggcaaaaggataacagataggattcattcatatggtaactgaaaccaaatcccactcaccttattcaaccactcgcagcgctccacatcgggaaagtagacccacgcgggcagctcgtcgattctggccaggattacgtccttctcggacgccaaagccgaggccttggcaatgtcgcgcttcttctccgacgtcttggccaactggtcgcgtgccaccgagaggatgaccggcgctatcaaccaggccaccgaccagcccatgtaacccaccagataaatggatcccacaatggccaccttcttgcccagcgtgtagaacacggagaaaatgctgttatcatcgcttacggattttgtggccacaattgagtttccatttgtcgtctgcgtgggcggtgtaccattgccggtgggcgtggtcggcgttaccactggggattcgttcatttttttaacctccaccagtggcacaaaaggttcggtctccgtgggatcgggtgggatggtgaactccgccaagggcaccgatggactgttatcgctgcaagaattcaaatgtacacattccatgagcatcttgtccagatatttccgatactaaagctctctgggcagctgactcattagcgtttgccggctaagatgccggcatcgaactcaatgctcatgattgcgatgatgtcatactatattgtgctattagctagaaatgtgatcttgaaatgcctcaccgactatccacgattcataattatagtatacaaaacgtttatgaacacttcgtttgtttacttagcttaatttttcacttcttcaatacactctcgcattgctcatacgccatgtgggtggggtaaattgacacagttttacgacttttctgatggtgctcaaccacccaccgcgttacctgttgagtgggatacacaaaatagctttcatttcggacgagggaagaccaactttgttggcaagtttgcttatcacaaaggaaaaggtataaaggtattgagttacccatttaaactttgaaaaagaaaacttatttcctttcgttttttttatggtaagctctatatttgtcccattttttaagcgaaattaatttgaaagcatttaatagtttctttgtaaataagtaaataactcttgatattatattctctctctcctgaactttccacagttttccgactgtttgtttcacgttttccacccaaacttttcttttattttcgcgtctgccttaattattcaacgcttagcagcagctgttgactttattcaaatttcccagaatatatctcattgtttacctttcattctttttcatgcgttagctttggggactcattataatatagccgtaattttctttttgcaggtcatacaattttcatgtgcaaccttgacttgagtaatcgtacaaaaccaaacttttcaagagatttacaacctcagcatttcagcatttcagcatttcacgcttttcaacgctttgttagctgctaacaacaaaggcgcccagaaaatgttcacta

SEQ ID NO: 14441 - DNA, 2761 bp, DROSOPHILA
cgataacagtccatcggtgcccttggcggagttcaccatcccacccgatcccacggagaccgaaccttttgtgccactggtggaggttaaaaaaatgaacgaatccccagtggtaacgccgaccacgcccaccggcaatggtacaccgcccacgcagacgacaaatggaaactcaattgtggccacaaaatccgtaagcgatgataacagcattttctccgtgttctacacgctgggcaagaaggtggccattgtgggatccatttatctggtgggttacatgggctggtcggtggcctggttgatagcgccggtcatcctctcggtggcacgcgaccagttggccaagacgtcggagaagaagcgcgacattgccaaggcctcggctttggcgtccgagaaggacgtaatcctggccagaatcgacgagctgcccgcgtgggtctactttcccgatgtggagcgctgcgagtggttgaataagatcttgaaacaagtgtggcccaatgccaatcactttgcacgcaccttggtaaaggaaaccatcgaacccaatgtggctttagctctggccaactacaagatgcatggctttcggttcgatcgcattattctgggcaccattccaccgcggatcggcggtgtgaagatctacgataagaacgtggatcgcaacgagatcattatggatctggatctgttttatgccagcgattgcgacatcaatttctatttgggtggtatgaagggtggcatcaaggattttcagatccatggctgggtgcgagtggtgatgaagccactgatccgatcgatgccactggtgggcggtctgcagatcttcttcctgaacaatccgaatatcgatttcaatttggtgggtgtgattgattttatggacatgccgggtctgagtgacttgctgcgtaggatcatcgtggagcagattggcaatgtgatggtgttgccaaacaaactgcccatttcactcagcgaagaggtttcggcggtggccctcaagatgcccgaaccagagggcatcctgcgcattcacgtggtcgaggccaaggatctgatgaagaaggacatcagtgtgctgggcaaaggcaagtcggatccctatgccatcatcaatgtgggcgcccaggagttcaagacccagatcattgataacaatgtgaatcccaagtgggactattggtgtgaggctactgtttttattgaaatgggtcaatttgtcgagattcaattgaaggactcggacgattccaagaaagacgagaacctgggcagagccagcatcgatattgccagcgtgatcaagaaaggcgttgtggatagttggctcaccttggaagatgccaagcatggacttctgcatgtccgcctgcaatggtacaaactcactgccgatcccaatgatctgcaacagattttgctggaaacgcaactcctacgcgtgaccagcatgagttcggcggtactcagtgtattcatcgattcagccaggcatttgaagcaagctcgatccagctccaaacccgatccctatctggtgtgcagcgtgaacaagcaaaaacagcagactgccatgataatgcgagatgattctcccgtttgggagcagggcttcaccttcctggtcagcaatcccgacaacgagagtctgaacatcaagatctacgaccagaagacaggaaacgacattggccaatatacctatacactcagcacgctgctgaagcaattcaatatggaggttatacagcagccattccaactccagaagtctggaccggaatcgaagctctatatgtcgctatcgctgcgcattttgaagcccggcgagattgacaaggattcggatgccttggagcaagtggcagcgctcacgcgcagcagttccgtgaaaacaccagatgttgctgcagtttctcctccagcatttaaggaatctcaggcatccagcaagcgtttgtccgccgaatcgcccatcagtgaagaagatcctgtggcggctacgaaaatctccccggccatgtcggcctccacctccagcgaaaaacccatcagcgagctggccacctctgtgctgacccaccgctttccagactccacctcctcacccggcgaacatggccttggacgaatgcagttgtcgatccgctacagcgcccagcgtcaaaaactagacgtgaccatacacaaaatccagaagataccacttcgcgatcccagcaatatccccgatccgtatgttaagctgtatctgttgcctggacgcaccaaggagtcgaaacgcaagacgagcgtgatcaaggacaactgcaaccccgtctacgatgcatcctttgagtacctgatttccattgccgaactcaggcagacggaactggaggtgacggtgtgcacccaaaagggattcctatccggcggtagtcccatcattggcatgctgaaaattcctctggatgatgccgagataaccacacaaactggcttgaattcttggttcgacttgcagcctgaaatacggcacgagtaggaaaagccgagtcaaatgccgaatgcagagtctcattacagcacaatcaactcaagaaaaactcgacacttttttaccatttgcacttaaatccttttttattcgttatgtatactttttttggtccctaaccaaaacaaaaccaaactctcttagtcgtgcctctatatttaaaactatcaatttattatagtcaataaatcgaactgtgttttc

SEQ ID NO: 14442 - protein, 816 aa, DROSOPHILA
MNESPVVTPTTPTGNGTPPTQTTNGNSIVATKSVSDDNSIFSVFYTLGKKVAIVGSIYLVGYMGWSVAWLIAPVILSVARDQLAKTSEKKRDIAKASALASEKDVILARIDELPAWVYFPDVERCEWLNKILKQVWPNANHFARTLVKETIEPNVALALANYKMHGFRFDRIILGTIPPRIGGVKIYDKNVDRNEIIMDLDLFYASDCDINFYLGGMKGGIKDFQIHGWVRVVMKPLIRSMPLVGGLQIFFLNNPNIDFNLVGVIDFMDMPGLSDLLRRIIVEQIGNVMVLPNKLPISLSEEVSAVALKMPEPEGILRIHVVEAKDLMKKDISVLGKGKSDPYAIINVGAQEFKTQIIDNNVNPKWDYWCEATVFIEMGQFVEIQLKDSDDSKKDENLGRASIDIASVIKKGVVDSWLTLEDAKHGLLHVRLQWYKLTADPNDLQQILLETQLLRVTSMSSAVLSVFIDSARHLKQARSSSKPDPYLVCSVNKQKQQTAMIMRDDSPVWEQGFTFLVSNPDNESLNIKIYDQKTGNDIGQYTYTLSTLLKQFNMEVIQQPFQLQKSGPESKLYMSLSLRILKPGEIDKDSDALEQVAALTRSSSVKTPDVAAVSPPAFKESQASSKRLSAESPISEEDPVAATKISPAMSASTSSEKPISELATSVLTHRFPDSTSSPGEHGLGRMQLSIRYSAQRQKLDVTIHKIQKIPLRDPSNIPDPYVKLYLLPGRTKESKRKTSVIKDNCNPVYDASFEYLISIAELRQTELEVTVCTQKGFLSGGSPIIGMLKIPLDDAEITTQTGLNSWFDLQPEIRHE

SEQ ID NO: 14443 - DNA, 2620 bp, DROSOPHILA
accgcgcacgcgcatcgtcttctccagcgccagatccgtgatgaagatccgcagattccacgagttctcgccgacgtggatcatggtgctgctgtgatgtcacctgtcctactttctgctgcccgtctggggcgtttctaggtcgtccttggtggggcgcccacagcaaagtcgagagttttccaccgatcggcgcacagatggtcgtcaaattcgcattttccgcactgtgacgcaatccacgggttgaaaattcactgcaattgcgttgactatgccgcaatatttccggatccggacaattgcatcgattcgttttgcttgcgtaaatagagcaattaaagaaaattcagtccattgaaaaagaaagcgccgaaccgactggtttacccactcgctctggtatcgatatatctctgacttggttttccaaatcgctatcgattatttcgttgatcggtgtaccagatggaaaaagatatattttcgattactgttttagattacacctattagaatttaacttatgggcgcgaagaagttttgaaattcaatttaatgggatgccttttaagtttgaactataattttaaattcttaaccgaaggacctttaataattttgcatttttgtaggtcccaaaaaaattcaaaagcttagaattttagattaagcatgcagattttagtaagcaaaattgtttcagaacgctgacattcatagtatcacacaaagccctataattattgattgctaacttattagatattttatttttatatcacaaaaaacaaactgcttagcccagaatgattttttttttaatttctttagaaaataagccactaccgcatttgcctgttgatgggctcaaggtaatcaaattaaattgacttaatttgagcccgattggtaagtggtcaaattggacggagacacgcagtgtatttccaaacggaggcctgtacatataaaagcccggattgctaatacggttagcagcatacgatcgattcgaaaatgggacagcccggtttccgtcgtgccattgggcacgtttcgttggtggtggcactgatgtgcaccacctgtttccaagtggaaggactaccccatccgccggccacgtcgccgtcaccaatgatggaaagaatggtggagcaggcctacgacgataagttcgacaacgtcgatctggacgagatccttaaccaagagcgactgttgatcaactacataaagtgcctggagggcacaggtccttgcactcccgatgccaagatgttgaagggtaagcttgaagcccaattcaataattctcggtaatacccaatctcttgtagagatcctgcccgacgccatccaaaccgattgcaccaagtgcacggagaagcagcggtatggtgctgaaaaggtgacccgtcatctcatcgacaaccgacccaccgactgggagcgtctggaaaagatctacgatcccgagggaacctaccgcatcaaataccaggagatgaagtccaaggccaatgaggagccataatcaatctctattttacgtcgtttttaacttaagtgattttatgttgctttaattaacgaataaactgcagagaagcttcaacctttggtctttttgaaagtatccaagccgtaagaatctattaaattttaattacccgaaatgcgaattattttactagttaaacaacttaaatacatagttacagatatattttgcttcaaaagaagaaattgtaaattttgcggaagcggaagcgtttgaaaacgaatacaagtcgtctcgattccccaattcgatagacgagcaatcggaggcgtcatggcaaccagttcctaggagccccgattccggattcagccccaacaacgcagcagtcggcggagcaaacaataaacaataatcagacatcaaacatcaaggcgtaaccacagtagcaggcacttggttttcagttacattttgacttcacctcgcaccgactctctatctatttctatacactagacatccgaattggcctccgaaaattattagctttctcgagctaacccagtgacaatcctccggagcagcggcaggaccttagatggtatcgccgcgcaagctggcatcgtcctacggcccaagagtatcccaatcggaaccgaacaatctgatggcgtgggtagagtacacatcttcggcagtagccaccatctaaagtcttcccctccccccaaatccccttttctagagcgtcggcaaagagctgtgagagcctattctcggccagctcccgggagtcggccagcctgatctaccagcgcagcaagccgccaccgccccaacaacgtggcggcgtgaagggttccggcagtatgagctcccagaaccacagcgagatccatcagcgcgtcatgtccgcgaggaatctgcgcgccaagaccttccagaaccaactggccgatgcccaggcggagattgccaatctggcgcacgagaatcgcatgctgcgcacgcttcacaatcgccagtcatcggcgctgaataagtacgaggcccacaacgctgagctgcccaagttgctaagctcacatgccgaggagctgcgcatgtggc

SEQ ID NO: 14444 - DNA, 568 bp, DROSOPHILA
agcatacgatcgattcgaaaatgggacagcccggtttccgtcgtgccattgggcacgtttcgttggtggtggcactgatgtgcaccacctgtttccaagtggaaggactaccccatccgccggccacgtcgccgtcaccaatgatggaaagaatggtggagcaggcctacgacgataagttcgacaacgtcgatctggacgagatccttaaccaagagcgactgttgatcaactacataaagtgcctggagggcacaggtccttgcactcccgatgccaagatgttgaaggagatcctgcccgacgccatccaaaccgattgcaccaagtgcacggagaagcagcggtatggtgctgaaaaggtgacccgtcatctcatcgacaaccgacccaccgactgggagcgtctggaaaagatctacgatcccgagggaacctaccgcatcaaataccaggagatgaagtccaaggccaatgaggagccataatcaatctctattttacgtcgtttttaacttaagtgattttatgttgctttaattaacgaataaactgcagagaagcttca

SEQ ID NO: 14445 - protein, 155 aa, DROSOPHILA
MGQPGFRRAIGHVSLVVALMCTTCFQVEGLPHPPATSPSPMMERMVEQAYDDKFDNVDLDEILNQERLLINYIKCLEGTGPCTPDAKMLKEILPDAIQTDCTKCTEKQRYGAEKVTRHLIDNRPTDWERLEKIYDPEGTYRIKYQEMKSKANEEP

SEQ ID NO: 14446 - DNA, 3849 bp, DROSOPHILA
tttgttggtaagaacacagcgtgtaacgcttacaaagaatttattgatgaagttgttctcttgccacaaattcattggtccgctcagttcgtttatcaattcttaaagattgttacaaaattgtgtaactgaaaatgtgttacatacaagtatgtttttatcatctatcttacccttataattgttaaatacatctgggataaacacatctctgaagttaaccactggtttcttttgcggaaacgcattaaccgaggtcacctggtgaccccgattagccagttcctttaaataaggtaccacattaatatactgtgatggccccggaaacggaaatatagccaatatcctggcagcttgcatagaagctggcagagttagtaacaaaaaacctatccgtagagcgagcatctcaaaaatcgtctgcacttcgcgatctcactttgtaaactgaatcggcaaacgcatcacaacatagttctaagctgttagataacactgcatgccactgacatgcaatagtaattctcgacagatgagattacgtaaatttcgtaggcgatccacatctcaccgtcgcaccccatcacaatttgtttccctgtcttatcccctttaatcccctaaacaaacacaccgctcttctgaattaacaattgtgtgcactcgaagaaaaaaaagggttagtttacaattcaagtgaaaaaattcaaaaaataggttcttactttagcttaaaacctcgattcttctttaagggtatgcatatcaaattaaaaattaaattttctatgccttacatagcttttaaagtagtcagttaataatagagctttaagctacggttaagtagaggccaaggttcatgcgtgcactatatgattataatgacagcacttgacgtattagcagtagtttcttttgaatgaatttaaataattagtcgccccaatgagcatttttttttgctatgatgtctaaatagctaatatgaaaacaatttaatattttttttttcatttatttatttaaaaattaattcacaggtgctggtaacaaaacaaaaatgcaaatgtttactgctctaagaggaaacataagtcggtggcggcatgaactcaaacagttaatcgactttaattgattactgggtcttcaatttactcgcctccgcacgattttttcggattttacttataagcgaaacgaagaccctttgtaagcatttaatcaaaataacgacgatcagtagggagacaaaagtgattgcgatgaggagcccccaggtgtccagtccgtggaactgaataaaatccagatcacgcgaagcacatctcaagtgtttggctcccttatgccgcaatacgtactcggtccaccaaatggcgcgctccaaagcggtttccttctgatctcggaataatttggatttagtctgagctgctgccgcataactgggattactcagcaattcctggatcaaaggcgtcagttctgtcgcattgacactccatatatcagcactgagaccatagcctacctgcttggccctctgaacattcaagtgctgatcatagaaaatgggcaatccaagtatgggctttccaaagtatatactctcgatggtgctcaatagacctccgtgggtgatgaagagcttaacattcggatgagcgagaatatcgggttgggggaaccacttgctgatgaagacattatcgggtttttcgggcaactgatcatcctcgaatttccacagcacacgttgtggcacactggcaaaggtttgcattagcatttttcgtgtggatggcggcaagtctttgcttttgatattggaacccatggagaaatagattactcccttctccgattgctcgacaaattccgacagttcctttgctaagggctgaacctttcgcttctgttgtaaatgcagtccgcccacctcgatcatattgggcaaataggggcgtggatagctcagggaaaagtgctggccgagaagcattagcgcaaagctgtccaaaacttcatccaatgatttcctggccgtgggaaagtatttcgcatacagatcccgttgagacggcaggtggacaatcctcttgtgcagccacattaccgaggcttcaaacacattcatcacacgatccttgaaatccatttgctccgttcgcgatgagagtagcaagggattgtaggacaatggcgatatgttgcccattaactcatcgatgtgtgtatctgtgccgtacgatgagatacctatggtttctgctccaaaatgctggatcaaaccgaagagggcttcggtttgcaccgcttccattataaccaaatcgaatttctcgccgctgttcagtaaatcctttacagccgcatcatccaggatacttgtggtcaaaagattgagaaactgtgtggtcatagtcaacatttgccattgactcgccgtttgggtgtaatctgcatttccaaatgctacaataaatgtgaattttaatagataacttgaagaaatacctgacaactgcttgagtttacttacccgccattatttcgtgaatttttttagcaccaatcacccgaaagttgggctcgtttttatcgctaccaaaggtattgattacggtgacattgtgaccccgatgggccagttccttcataaactgctcagcgaaaatgtactgcgatcggccgggaaaaggaaacacggccaatatgcgcgaactttgaaccccttcatcggcatttgcggcgaacagccatatcaggccaattagcagaatgccaagaccagttacagaaaatattccacccatttgcaaggcaaccgcagcgattcgctgacgaacgacaactaatctaacataagaactttttcatatataattatcggggaatgacgattagaagaatcgcccaaaatttactcattgcccacacaaagcaagttcaacgaagcgaaacagggcctattaatttcaaaccaaaacaaattcacagttcgctctctttgtatgttttaatttatgcacttatatatatatatatatatatatatatatatatatatatatatttgcatatatatacatttttggcgtcaccggcttgactcaaacaactttgttgattgtttacacccaatactcagatgttatgtaactaataggagaaacaaatagcactcttttttcaatctggttctcttaagttctcttaagcgctctatcgacttttggttctcaaactctccagttgattttgagtaacttgttggtaaacaaaatgtcttgcgctcagagaacttgcaaaatgtttataatcgtttagtagattctttatctattcaaacatttttagtaattcagttttggctttggctgataaattttaataaaattctctttacatatatgttgaaaattgaatgaaaatatagaaatatattgctgtctaattgtacagaacgtcacagacgtgcactaaatggttccataaaatgagtctaatacttagaaataatcgtaaattaggggctattaagattagataaagctacctaccaatagcgcttatcattcattgtccctcctgtaatcaggctaaaaaacagtcataaaataattacaatccagttgaaaatatttattgtatttattcgtattttctaaaatattaatttgtattcacattttaatttgttatttttacagctacgattttattaataaatcgtatacatgattaataaacgtatatctaaaattaacttctaattagatgtttcgtaggtagaaatgactttgcagatgttgacaaatgatttagccatcttctgct

SEQ ID NO: 14447 - DNA, 1782 bp, DROSOPHILA
cgaatcgctgcggttgccttgcaaatgggtggaatattttctgtaactggtcttggcattctgctaattggcctgatatggctgttcgccgcaaatgccgatgaaggggttcaaagttcgcgcatattggccgtgtttccttttcccggccgatcgcagtacattttcgctgagcagtttatgaaggaactggcccatcggggtcacaatgtcaccgtaatcaatacctttggtagcgataaaaacgagcccaactttcgggtgattggtgctaaaaaaattcacgaaataatggcggcatttggaaatgcagattacacccaaacggcgagtcaatggcaaatgttgactatgaccacacagtttctcaatcttttgaccacaagtatcctggatgatgcggctgtaaaggatttactgaacagcggcgagaaattcgatttggttataatggaagcggtgcaaaccgaagccctcttcggtttgatccagcattttggagcagaaaccataggtatctcatcgtacggcacagatacacacatcgatgagttaatgggcaacatatcgccattgtcctacaatcccttgctactctcatcgcgaacggagcaaatggatttcaaggatcgtgtgatgaatgtgtttgaagcctcggtaatgtggctgcacaagaggattgtccacctgccgtctcaacgggatctgtatgcgaaatactttcccacggccaggaaatcattggatgaagttttggacagctttgcgctaatgcttctcggccagcacttttccctgagctatccacgcccctatttgcccaatatgatcgaggtgggcggactgcatttacaacagaagcgaaaggttcagcccttagcaaaggaactgtcggaatttgtcgagcaatcggagaagggagtaatctatttctccatgggttccaatatcaaaagcaaagacttgccgccatccacacgaaaaatgctaatgcaaacctttgccagtgtgccacaacgtgtgctgtggaaattcgaggatgatcagttgcccgaaaaacccgataatgtcttcatcagcaagtggttcccccaacccgatattctcgctcatccgaatgttaagctcttcatcacccacggaggtctattgagcaccatcgagagtatatactttggaaagcccatacttggattgcccattttctatgatcagcacttgaatgttcagagggccaagcaggtaggctatggtctcagtgctgatatatggagtgtcaatgcgacagaactgacgcctttgatccaggaattgctgagtaatcccagttatgcggcagcagctcagactaaatccaaattattccgagatcagaaggaaaccgctttggagcgcgccatttggtggaccgagtacgtattgcggcataagggagccaaacacttgagatgtgcttcgcgtgatctggattttattcagttccacggactggacacctgggggctcctcatcgcaatcacttttgtctccctactgatcgtcgttattttgattaaatgcttacaaagggtcttcgtttcgcttataagtaaaatccgaaaaaatcgtgcggaggcgagtaaattgaagacccagtaatcaattaaagtcgattaactgtttgagttcatgccgccaccgacttatgtttcctcttagagcagtaaacatttgcatttttgttttgttaccagcacctgtgaattaatttttaaataaataaatgaaaaaaaaaatattaaa

SEQ ID NO: 14448 - protein, 537 aa, DROSOPHILA
MGGIFSVTGLGILLIGLIWLFAANADEGVQSSRILAVFPFPGRSQYIFAEQFMKELAHRGHNVTVINTFGSDKNEPNFRVIGAKKIHEIMAAFGNADYTQTASQWQMLTMTTQFLNLLTTSILDDAAVKDLLNSGEKFDLVIMEAVQTEALFGLIQHFGAETIGISSYGTDTHIDELMGNISPLSYNPLLLSSRTEQMDFKDRVMNVFEASVMWLHKRIVHLPSQRDLYAKYFPTARKSLDEVLDSFALMLLGQHFSLSYPRPYLPNMIEVGGLHLQQKRKVQPLAKELSEFVEQSEKGVIYFSMGSNIKSKDLPPSTRKMLMQTFASVPQRVLWKFEDDQLPEKPDNVFISKWFPQPDILAHPNVKLFITHGGLLSTIESIYFGKPILGLPIFYDQHLNVQRAKQVGYGLSADIWSVNATELTPLIQELLSNPSYAAAAQTKSKLFRDQKETALERAIWWTEYVLRHKGAKHLRCASRDLDFIQFHGLDTWGLLIAITFVSLLIVVILIKCLQRVFVSLISKIRKNRAEASKLKTQ

SEQ ID NO: 14449 - DNA, 7047 bp, DROSOPHILA
agacatactgcaaattggagactggtactgggttttccccattttcttgccagtcggcagaaattttcgcttagccacgaaactgttgccgaaaattgatgcaaatgtcgccagaacattgtgatataagctggtaatattcactggggcagctaggaatttaaagttgaatgttatccaattgaaaacttaaatagtaattagtaagttcaatacgtaagaattataaatcattacatatatcaataatatttttgagccataatgttcagataaaaaaggcaagataagcacgtcaattgaaattcggcaatcaattaacaaataagcgtattgtcaaattattattttatacctaagtgtacttcacagaataattagaaaacatacttgcataaacaagagttattttttataaaagaaataaacagttaattaaatttaaataaataattcaaaattgagcttgttcccgcaatctgaaattactgctcatgtggcttctgtgtacaagtagattgattagctctgcccaaaagaaattatttacgtaacgtttcgtaagctcagctttttcgtaatgaaacccacaaagtttccttcatctctgccataacacccaattaaattcagcagtatgccattattctgcaaagtgacatatccatatcgcatctagccccagacatgtgtgtaaactaacccccaattatttactactataagcaaaatttgattagctatcgcttacactctccgtcgatgatttatttcagccgaaattttgttaattaaaactcttcacctcactgcgtggagaagcatattgatttttgctgtttggattgatggggtggtgctactgtcgatgactttatggtcacggccataaccacagttatgtttatggatgtgcggtgagataagctgataaacgatcccatctcgaacccttataaatagaagtggatagtttcgacaccgcgtaaatgaatcggaaatgtcacccaagaagtgtgagccgccgcccgaggattcgcttgcgaccaccgaaaaggccacctttcttcgtttgggccacaagaaccactcccaatggaccgcgctcggatcagcatccttcatcctaatctctggaggaatgagtttggcatggggagccggattcgccgttcactccgcccatcgggatcaacttctgcggaccgtgcacatgcaaatcgcctggtatgcaactgcagtgcttggagccctttttggagcattttatactcaccgactgccacagcagcccatttatgtgagtataccggggaaaaatatttaaagggaacttcttaagaaacttttgtttatacattaagctgataagctagttaatatgaacacgcttgccattgcagatttttagctccatcttggttattgcatccggaatactgttcctggcttggccagagtgtccaggtgccattatagccgcccggtatctagatggattggccaatggtctggtatttgttcccgccctaagtactgtgggtgagatttctgttaacgagatccgtggacttttggcctccacggtggagcagctcagcttcaacaccggcatcctgttgcagctaatctacacggccgtgtggcaagtggactggaacgtggccattgtggcggatcaggtgcatggagtgctatccatagtctacggagttatagccctggctttggccctaaccctctgtgtggagtcacctgtccacctgttgatgcgatccagtgaacagagggcgttggttgccctgagacaccttcaaaggccatatatggtgaccagtgaaatgctactgagattggatgaacacaaacagtatgtggccgacaacagggaaatgtgtttaggatcgagtctgcagaaagggtatccatcggttcttaagcttttggcccttcgattgttgggagtcctgtccctgaactccatcatatgcagtgctctctatgaaaccggtaatcagttggtcagctgcttgtatgcatggccttttgtggttttcgggctgctccggtggggcggatgcttttttgcggtgcttttgatggacaccacaggccgtaagaaaccgacccttttcggaatcttttccaccggagcctttgccatcgcatatgccaacttatttggccgaactcctcatatgatcaccgccctggtgatgcttttcagtctccaattcttcgagggactgggacaatgtgcatcggcggtttacctcactgaaggctttcctctactaatgaaaccacatatggtggctgtggtatacataatggaacaagccgcacgactgctcctctgtagctttttaccatcgatcgcagaaataacagcatactttcactccatgggagcactttccatggtgtgttttcttctcggaatcttctgcctgcccgaaactagactagttactttggcagaagcacagctcaagttttcaaagtggttcaacaaggatttttaggtataagtgggtagggggaaaataaatgtttatatgtaacaacaattaagaatgtattttgttaaagcgcattaaagtagtagtagtttatttgtaatttttgatacgatatttttaatcaggtgcgataatgcccaattacataaactatttgcacagccgctgagtgttgattggttgagtggtttagtattgatcacaaacaaatgaggatatatgtagaagtacaatatccatgagtcgaatggacccaaaaaaaatctgacagaatctatgaccacagtttcaggaagtaaaacaaattgaggccaagcacctgggaatcaggttggtgattcccgaaacaataatcttatctagactggtcgaaacgtggtaattcaggctaaacattctggcttatttctgaattctgaatttggaatatcttcatgatatgcttcaatactactggcagacgaagccgcaataattttctaaaaacaaaaaaaaagtgaccttgaccttgagccagaaaaaacaatacaggtgtgcctttctggtgattcaataaaagatataatgataaagaaaacaaatcacgctgataatataccttataatgacttattttttcttaattacttcctttttagtattgccaacaaataaaaccaaaaataaattcccagaaacaatcaatatcagcaaatacatatttatatgatattatacgacaaatgtatggcattaagtactcaacaaaagtgggaaataaaggatataaaaaaattataccttatcttttctttattttttccgttttatctttttattaattaaaaattaatccatgaactttaaatagaaaatattctcttaaaattcttatctgagcaattaaaccactttttaataactatatggcgagtataaaaagtatgaatcaggcctaataactatgatcagtcataccaacagaaaaagcaggggaagacccgttctccggttctttaattacgtcgaatgaatcaaaagggctgtgatctgtagagagttttatataccacatatgtacatcataaagtattattcacaaacattgcgataatcgtccttatcgggcacgcgtatattaagttttgaagcatttactgaaatagatgccgccccctagtgataagggattgaatccgcacttgattatcagttgggcaaggctcgatagcagtgcacataaatatcatttggccagcccccgtattagccagtttcaaatcgacctctaccggagcagtttgtcttcgcaatagagtgaaatagatataaagcgatcggaaattcagaacgataagtttgccccaccgccgttggccatgcaaaacgacaagtatccagcgccaataggcttttatccaccacaaggacagccgggatatccacaaccagcgtcacagccaggataccctcagccagggcagccgcaacacatcacaccggcggagacatacggaccacaaccaccgccaatgccaccgcgggatccacacaccagagtggatccaccaggaggatgctttcagcgcaaccaaaagaacaaacctcaatccaatgctgtgggcgcaggtgagttcagttcattagatcgatcagcttagtcacctactgatgagtagttgttcaccacgaggttaatctaatctcgagtgttggaagtatgaatctttttctagagcccaagtagattatgatgacgatgacgtaagtgctagtagccaagcattcgaatttaattattttagtactacgataatcgaacggcttataccagtgacttatgtttccattaaaaccatttgtgaagatgttgtacaaccctaatcgattgaaaatacttaggtatatttttacaactaaatagattcgttaaaaatttaataaaaattagtttcgtagttgtagtttataaaaaaaagtttcgacccgaaaaatatgtactttctagttcaagatcagaacctgtccgtataaacgtcgtgatctcaggaagattgtaaagacgcctacttattttggccaaaacggcaacgtggttatgaatatttaactgaaaagattaaaatttgacaccaatccttcgacagacttaaatctatatatttgatactctttcagctggtctcatctttatctctggaggtatgaacatagcgtgggcgattggcttccaaggaccaatctattaccaaaccaccaagcacaattacattgcctggttcataggcgccattattggagctttggttacgatggcgctgaccaacaaggtggccaaaaaatatattctggtaagcggaggaagcctgttggcactttaagtttttattaatcaattccttttacgcacagcaattttcttcagtgttggtgaccgtcggtggattggttattgcctgcacccacaataatggagctggaaccacggcagcttgttacctagatggtattgccaatggtctggtatttgccccatttatggcgttggtcggagagatctcggttccctatttgaggggcaaggccagtgccaccttggagcaattgtgctttggaaccggtatacttcttcagatcctttatgtgtcaaattggacatattcttcgtatatgacatacaatgattttacgtccgagaatatgaaaggagtgctgagcacaatctacggcgttttggcccttattatgggctcattttttaccatcgaatcgccggttctaatgctggccaataacgaagaacaggcggccattgacgcactgcgtcggctacaaaagcctgcggtgctaaccgaggaaacttacgagcttctggcggagcacaaacgctacttggcctacaacaagaatatgtcaaagagtgaaagcatttccaaagcgctgcccaccttcatgcgacttgcatacctgcgcgccctgaatgctatgagcatctccagctttgtgatcatcacttatgtcgttgcgatcttagtctccaatgatttaagaaatgcgagctcctggtacataggattagccttttgccgttggttgggatccctaatcccatccttttgcatggagtccttgggccgaaagaagcctgcggtctttggcctgctcgtaagctgcggcttgtcgtttgccgtgggttcacagtacaatgtatatacgtatatgagccaagtgaccgtcttgataatgattttcgagttctttgccggtatggccttctcatccaactcggcctacctgacggaggcatatcccatgggagttaagcaacactttatcggtttaactttcatcaccgaaatatttgtcttcctcatcataaatgtttgtgacttcaattttggacaaggctacaactacttctacatcatgggagccatgtacctggcgggagtgattctcggagtccttacactgccggagacaaggaggatgaccttgcaaggtgcccaggagcagttcaataaattcgttaacttccgcttttaatgttcaaaggaattatagattaataaatctactattaaagtgcaagaggtctaaggcctctgtattcctccacataacgatactcactgttttttaatcattcataatataaaattattaagtataaattattcggcgcccaacttgttttttcgcttttatatttttcaacctaagttataatgctttacaacagccatataaatagttattatcttaatactaccgtatgataaggtgatgagacattcaaaacatatttttgtggaagcgtaataaatttcaagcatattaacattggtaataaaatagaatcacaattgggaagcaccttagaaacgtatgtttacctgattaaactgttataaaaacaaaccaaatccgttcaatgcttcttttagtggcaataaaaccaacgaatatgctttgatacgacgctctgctaatatcgccatttgcagcttatcaataacgtattgatttggtattgactatatggctttctatttgaagggaatttccaacgaactgttatttgctcctatatgacaaacaatcattacattaaatatcattacaatattttgaaagcaaataattttttactcctgttaaagttcaaacaatcccaatttttttaaatcttatcttcatataactttatttataactatttaattggcgttcaaatggttttcccgccttttaaaattactatcttactaccgtctaaagtgagaatgaaataattaccacccttttctcgaggaaagtgccctttaccatcattgcaattagttgcatcgatgaaatatacatgaaatcccccgaaaactgttaagcccgtagtaatgtatgattaaactgattaaaaatgagctaagtccgtgggaggcaccttttagtggtcaataaaatgcacgaccacgctttgataagaacccccgctattatcgctggccatttgcagcttatcaatagagaagtgataagctgtgta

SEQ ID NO: 14450 - DNA, 2751 bp, DROSOPHILA
atgtcacccaagaagtgtgagccgccgcccgaggattcgcttgcgaccaccgaaaaggccacctttcttcgtttgggccacaagaaccactcccaatggaccgcgctcggatcagcatccttcatcctaatctctggaggaatgagtttggcatggggagccggattcgccgttcactccgcccatcgggatcaacttctgcggaccgtgcacatgcaaatcgcctggtatgcaactgcagtgcttggagccctttttggagcattttatactcaccgactgccacagcagcccatttatatttttagctccatcttggttattgcatccggaatactgttcctggcttggccagagtgtccaggtgccattatagccgcccggtatctagatggattggccaatggtctggtatttgttcccgccctaagtactgtgggtgagatttctgttaacgagatccgtggacttttggcctccacggtggagcagctcagcttcaacaccggcatcctgttgcagctaatctacacggccgtgtggcaagtggactggaacgtggccattgtggcggatcaggtgcatggagtgctatccatagtctacggagttatagccctggctttggccctaaccctctgtgtggagtcacctgtccacctgttgatgcgatccagtgaacagagggcgttggttgccctgagacaccttcaaaggccatatatggtgaccagtgaaatgctactgagattggatgaacacaaacagtatgtggccgacaacagggaaatgtgtttaggatcgagtctgcagaaagggtatccatcggttcttaagcttttggcccttcgattgttgggagtcctgtccctgaactccatcatatgcagtgctctctatgaaaccggtaatcagttggtcagctgcttgtatgcatggccttttgtggttttcgggctgctccggtggggcggatgcttttttgcggtgcttttgatggacaccacaggccgtaagaaaccgacccttttcggaatcttttccaccggagcctttgccatcgcatatgccaacttatttggccgaactcctcatatgatcaccgccctggtgatgcttttcagtctccaattcttcgagggactgggacaatgtgcatcggcgaacgataagtttgccccaccgccgttggccatgcaaaacgacaagtatccagcgccaataggcttttatccaccacaaggacagccgggatatccacaaccagcgtcacagccaggataccctcagccagggcagccgcaacacatcacaccggcggagacatacggaccacaaccaccgccaatgccaccgcgggatccacacaccagagtggatccaccaggaggatgctttcagcgcaaccaaaagaacaaacctcaatccaatgctgtgggcgcagctggtctcatctttatctctggaggtatgaacatagcgtgggcgattggcttccaaggaccaatctattaccaaaccaccaagcacaattacattgcctggttcataggcgccattattggagctttggttacgatggcgctgaccaacaaggtggccaaaaaatatattctgcaattttcttcagtgttggtgaccgtcggtggattggttattgcctgcacccacaataatggagctggaaccacggcagcttgttacctagatggtattgccaatggtctggtatttgccccatttatggcgttggtcggagagatctcggttccctatttgaggggcaaggccagtgccaccttggagcaattgtgctttggaaccggtatacttcttcagatcctttatgtgtcaaattggacatattcttcgtatatgacatacaatgattttacgtccgagaatatgaaaggagtgctgagcacaatctacggcgttttggcccttattatgggctcattttttaccatcgaatcgccggttctaatgctggccaataacgaagaacaggcggccattgacgcactgcgtcggctacaaaagcctgcggtgctaaccgaggaaacttacgagcttctggcggagcacaaacgctacttggcctacaacaagaatatgtcaaagagtgaaagcatttccaaagcgctgcccaccttcatgcgacttgcatacctgcgcgccctgaatgctatgagcatctccagctttgtgatcatcacttatgtcgttgcgatcttagtctccaatgatttaagaaatgcgagctcctggtacataggattagccttttgccgttggttgggatccctaatcccatccttttgcatggagtccttgggccgaaagaagcctgcggtctttggcctgctcgtaagctgcggcttgtcgtttgccgtgggttcacagtacaatgtatatacgtatatgagccaagtgaccgtcttgataatgattttcgagttctttgccggtatggccttctcatccaactcggcctacctgacggaggcatatcccatgggagttaagcaacactttatcggtttaactttcatcaccgaaatatttgtcttcctcatcataaatgtttgtgacttcaattttggacaaggctacaactacttctacatcatgggagccatgtacctggcgggagtgattctcggagtccttacactgccggagacaaggaggatgaccttgcaaggtgcccaggagcagttcaataaattcgttaacttccgcttttaa

SEQ ID NO: 14451 - protein, 916 aa, DROSOPHILA
MSPKKCEPPPEDSLATTEKATFLRLGHKNHSQWTALGSASFILISGGMSLAWGAGFAVHSAHRDQLLRTVHMQIAWYATAVLGALFGAFYTHRLPQQPIYIFSSILVIASGILFLAWPECPGAIIAARYLDGLANGLVFVPALSTVGEISVNEIRGLLASTVEQLSFNTGILLQLIYTAVWQVDWNVAIVADQVHGVLSIVYGVIALALALTLCVESPVHLLMRSSEQRALVALRHLQRPYMVTSEMLLRLDEHKQYVADNREMCLGSSLQKGYPSVLKLLALRLLGVLSLNSIICSALYETGNQLVSCLYAWPFVVFGLLRWGGCFFAVLLMDTTGRKKPTLFGIFSTGAFAIAYANLFGRTPHMITALVMLFSLQFFEGLGQCASANDKFAPPPLAMQNDKYPAPIGFYPPQGQPGYPQPASQPGYPQPGQPQHITPAETYGPQPPPMPPRDPHTRVDPPGGCFQRNQKNKPQSNAVGAAGLIFISGGMNIAWAIGFQGPIYYQTTKHNYIAWFIGAIIGALVTMALTNKVAKKYILQFSSVLVTVGGLVIACTHNNGAGTTAACYLDGIANGLVFAPFMALVGEISVPYLRGKASATLEQLCFGTGILLQILYVSNWTYSSYMTYNDFTSENMKGVLSTIYGVLALIMGSFFTIESPVLMLANNEEQAAIDALRRLQKPAVLTEETYELLAEHKRYLAYNKNMSKSESISKALPTFMRLAYLRALNAMSISSFVIITYVVAILVSNDLRNASSWYIGLAFCRWLGSLIPSFCMESLGRKKPAVFGLLVSCGLSFAVGSQYNVYTYMSQVTVLIMIFEFFAGMAFSSNSAYLTEAYPMGVKQHFIGLTFITEIFVFLIINVCDFNFGQGYNYFYIMGAMYLAGVILGVLTLPETRRMTLQGAQEQFNKFVNFRF

SEQ ID NO: 14452 - DNA, 4162 bp, DROSOPHILA
tcttgttttctgttgtcttcagattgacgccccgataaagatacaaaatggatgtggaggcaccgaagcctgaaattctctagtttctacaatttcttaagagtcaccaacaactcaaagctcggtttttagatttcacattcctaattggcctaaaatatgagcttatgtttaccaatgaaacaaatccattgggcgataatttaatatttaatatatattttcaacatttacccttatcccaataaaactagtaatatttattatgcccctatggttgaagccacaatggaaaatttcaagctcaaacagcgcgtaaagcggcacagttttagcttcactggggcaacccacttgaaaaccaggctatcccacgtgattcgagcaaatcataaatgttgtgaatgtgttgcctttgttttaatcacatttatggctgttttcaatttaaatttctttagctttatttcgaaccacccttcaaaatagcattaaattcacagtaagagttccgtgaatggaagtggctccaaataattatcaagaaatcataatcaagttatttgaatggcaactgataagaaacggcacaaaaacaaagccaacaattatttccctttgtgtgcaataaaatgtttagaaacgatccaatctcattatattctcatcgattagctgacaaaatcatgtttcccggcgtcccagttttttccgtttgcattgcacttagtgtgatgattttttgtcatgcggaggtaagttaaataggcgctcaaaaagtataccaatacttaatcgaaataaacaaaaccctcgacagacgctgaatttgtttggaaacttggaggctatttatgaacaggcagaaaatgcactctcaacgtaagtttcaaacaaagaaagtaggcctaagcttactgttttactccccagtttacaagaatcacttttgcaacttgaaaccaatggcactctaaacacatcccctgatgtgatttatccaacttcctgtctgacttctggggatcttgaaaatggcttgcacaccctgaaagttccaggcttgagtccctttcaagtgtattgcgaaaatcagttggctggacccggttggattgtaattcaaaagaggttcagtggaaatctgagcttctttcgcaattggaaggagtacaagaacggattcggcaatctaatggacgagtacttcctcggcctcgaaaagattcgtgccttgactgccctggagccgcatgagttgtatgtacacctggaggatttcgatgatacaattaagcatgcgaaattcgatgaatttgccattggaaacgaagatgacgactacgccatgaatacactgggaaaatattcgggcactgcgggagattccctccgctcacaccgcaaaatgaagttctccacatatgatcgggataacgatcatgagtttaataagaactgtgcattttactatctgggaggatggtggtacaacgcatgtctggacaggtgagattactgtcggataaactttctcaaaacataatctcacaactttgtaattattcaagcaaccttaatggtcagtatatgccgggtgggaaatacgaggagagcttgttcgccagaggaatgtgctggcgatcttggcgtggccacaactacggatacagggtaacccaaatgatgataagacccaagtgccgaatgataccagtgactcagcggtgaatttgggcaaggcggtttcacgaatattgttattattattagctgttcactccctgttggtttcaatggcttcgagaacgtgaaaacaatttgttatgtacttgattaatatgcaaaggttgttccattgaatcatcgcattctcgccgagcacattaatcagaatctcaattagaactgcgaaatatactgtaattctcatgtttagttgtctcaacttcctgatctactaccgctcaaggcgaacttgacctacgatttgtcaatgcaattgataagtcaatcgaactatatagtatcgaaattgattttcaagctatacaaatctatctaatctagatgggttggaacaaggcacggaacaagatcatgaatctctatttgttgtgtgttttaattttaagcggtggcagcctcttgtctactgctcaaagcaataaattggatctagtctataagaaagctgaaagcatggtttccaggtttgtgacacaaaacatcgtagagctttcaagtttaaactatgtatttttcagtttaaagatcaggctggaagagctaaaacagagctacaaggaaatcacagaagaaagaggcagtcatgagagtaagttcgagctattttggcttctgatcttctacaaaaattaaactaattacatcttttcgtaatcgtctagcagcaattaacccatcctcctgtctagctgccggaatcaacagtaatggcatccatgttattgaagttccgggtctggaaccttttccggtttattgtgacactcggctggcgggatctggatggactgtaattcagcgacgacaggatggcagtgaaaacttctatcgctgttgggaggagtatagccaaggatttggggagcttagcggagaattctttatgggtctggaaaagctacacttcctaacaaccgcggagccttacgagctgtttgtctatatggaagatttcaatggagtggtacatgatgctcgatacgaggattttgccattgggaatgcatcagcgtcctatgcgctatctgttttgggtaaatactcgggagacgccggtgattcgttaaggtaccacaagggaatgcccttctccacattcgatcacgatgatacgggtcacggatgcgccaggatttatgtgggggcctggtggtatgatcagtgccagaggaggtaagaatatgatatgatatcttcaaatgaaaaagtcaaacaattatcttcgctagcaacctcaatggccaatatttggaaggaggtcgattcgagccgaagatgtcgggtcgtggaatcacctggatgagctggcgtggctacgactacggctacaaattcgtacaaatgatgatcagacccaagtgttccaacaacctacgaaggcagggcatgcaaaatgccttaaacgcccattgaattccacaccgaaaacaccgaagggaaatcactttatttcttgataaacactatcaacattttgggacttttatttacaatttgataataaccgtttcccgctgatttgtttgttgtattattagttgattttttttttcaaacgctgcttttctacacgcgcacgtaaacaaattgttctcttcgtttgcgaatagtctttgtttctcgtcgaggttttcgagtggaacgcgcgttgcgctcagttcgcaagttgaattccaactgaggagctccaacggccgcgcatgcgatgccccagctataaaattcaaacagagaaaccggaggcctggggagagtctccagcgagaaagagcctcgggtaatgagagatatcggggggagcgaagtgaacacattgataaaaatatattcgcgggggtctgacgtcacagatgggagctccatggaggcctatggaaatgagtgactgcgacaaagaccagaagcccagacaaagggagaccacaattgcagacgcagaccacacttgtcatcagttccactgatgatgatgagaagaatctgcagatccgcaaaagaaatgctaaaccgtaagactgccgggcagggaaggcgaaacgtgtgaaaaaccccgactgggctgtcttgactcattattgtggcacagtggaacagatcggctggaaaccggcagctccttaattgctgtccactgtgatccccttcgctggcctccagcgcagatgattcactcaactcaatcgcttgattcatccagacggattgtcgcttaattgaacagctgctgcggcgctgggaaaattggccagcgttggacggaagggaaaatagtattactatctgtattaagcaatgaatttaacattaaacgttaaagaatttttgtatttgaattttaatgtttttgagctttaaataagaatgctctggctaagatttgataattttggaccgacttccttttactcattca

SEQ ID NO: 14453 - DNA, 1518 bp, DROSOPHILA
ccaacttcctgtctgacttctggggatcttgaaaatggcttgcacaccctgaaagttccaggcttgagtccctttcaagtgtattgcgaaaatcagttggctggacccggttggattgtaattcaaaagaggttcagtggaaatctgagcttctttcgcaattggaaggagtacaagaacggattcggcaatctaatggacgagtacttcctcggcctcgaaaagattcgtgccttgactgccctggagccgcatgagttgtatgtacacctggaggatttcgatgatacaattaagcatgcgaaattcgatgaatttgccattggaaacgaagatgacgactacgccatgaatacactgggaaaatattcgggcactgcgggagattccctccgctcacaccgcaaaatgaagttctccacatatgatcgggataacgatcatgagtttaataagaactgtgcattttactatctgggaggatggtggtacaacgcatgtctggacagcaaccttaatggtcagtatatgccgggtgggaaatacgaggagagcttgttcgccagaggaatgtgctggcgatcttggcgtggccacaactacggatacaggatgggttggaacaaggcacggaacaagatcatgaatctctatttgttgtgtgttttaattttaagcggtggcagcctcttgtctactgctcaaagcaataaattggatctagtctataagaaagctgaaagcatggtttccagtttaaagatcaggctggaagagctaaaacagagctacaaggaaatcacagaagaaagaggcagtcatgagacaattaacccatcctcctgtctagctgccggaatcaacagtaatggcatccatgttattgaagttccgggtctggaaccttttccggtttattgtgacactcggctggcgggatctggatggactgtaattcagcgacgacaggatggcagtgaaaacttctatcgctgttgggaggagtatagccaaggatttggggagcttagcggagaattctttatgggtctggaaaagctacacttcctaacaaccgcggagccttacgagctgtttgtctatatggaagatttcaatggagtggtacatgatgctcgatacgaggattttgccattgggaatgcatcagcgtcctatgcgctatctgttttgggtaaatactcgggagacgccggtgattcgttaaggtaccacaagggaatgcccttctccacattcgatcacgatgatacgggtcacggatgcgccaggatttatgtgggggcctggtggtatgatcagtgccagaggagcaacctcaatggccaatatttggaaggaggtcgattcgagccgaagatgtcgggtcgtggaatcacctggatgagctggcgtggctacgactacggctacaaattcgtacaaatgatgatcagacccaagtgttccaacaacctacgaaggcagggcatgcaaaatgccttaaacgcccattga

SEQ ID NO: 14454 - protein, 440 aa, DROSOPHILA
MDEYFLGLEKIRALTALEPHELYVHLEDFDDTIKHAKFDEFAIGNEDDDYAMNTLGKYSGTAGDSLRSHRKMKFSTYDRDNDHEFNKNCAFYYLGGWWYNACLDSNLNGQYMPGGKYEESLFARGMCWRSWRGHNYGYRMGWNKARNKIMNLYLLCVLILSGGSLLSTAQSNKLDLVYKKAESMVSSLKIRLEELKQSYKEITEERGSHETINPSSCLAAGINSNGIHVIEVPGLEPFPVYCDTRLAGSGWTVIQRRQDGSENFYRCWEEYSQGFGELSGEFFMGLEKLHFLTTAEPYELFVYMEDFNGVVHDARYEDFAIGNASASYALSVLGKYSGDAGDSLRYHKGMPFSTFDHDDTGHGCARIYVGAWWYDQCQRSNLNGQYLEGGRFEPKMSGRGITWMSWRGYDYGYKFVQMMIRPKCSNNLRRQGMQNALNAH

SEQ ID NO: 14455 - DNA, 3803 bp, DROSOPHILA
ttttctgggcgttcgtgcaggcgatgccttacgagaattgtagttctttagctgtttggatctgtaaggtaaaagcaaagttcattgtcattgaaaagattaacaaatagcccactctagttcacatacgcctccatcagcttcagcagcaaatggtgatacgcctcgtactcatcctttccgaactcattcggatcgtgccgagcatgttcgtacatatcgcaatattggtgaatcattcgctgccctgctccgttaagcgtcaccgataaagtggtcagcagaaaggccctcaagctctcaggagcatgtcgggagctaccgtccgccctcgctatttcggattctagcagtttcacgtcatcaaccgccttcatgcggtagtagtagggtggcaatggtgcctcctgctccggctgaacgatgtacttgtcgccatcgtcccacagcagtttcggctcctgcgtgattttctggatgcaatctaggcgccgctcaatctctctccttagtgccttcttggcatcattgcctaccggaacgtggggcccccgacgtcctcgcagctggaagcgcataatctgccgcttggcaaagatgaacagcatcaggcaagtaagtactcctccgctgattatgatgattatcatcacgcccgaaagctgttccatgttgccgcccgccttgctggccttctcctgaagactcggtgcggcgtagtcgcctaccttatgcaggcgcagatgcccatccatggcgaatactttttaattcgcggatatgaaataataaacaattttctcaagaaaattctttgttgttttggtcaaccacccaagtcagctgattctgagtgtgaccgcttacgtttggaaaatactagaaatacataattatatcttatataccaagtttcaaaaacgaagcgcaaattttaaacacataattttgtaatggttaggaaaatgtaaacttatgtaacagtaatacaaaacaatcattacaattattttctaaaatggtcaacaattttattttttacttttttgtatatgatatatggaaatagaaatgggaaaccaatacttttgagcgcctcaacaattgaattttgagaacttggacgattatttacacactaaaaaagaaatccatgcggatgaacagtctctttggcaaccagcgagttatattgctccttttacttcaatcattttgctcacgtccacgggtaattattactgaatagcaccgtgcccaccaaactataagtggtgcaccatacaaagagagctcctgccttcgaacgcagttttagttgggccagtgtcttgggcatgtggtcagcggcaaaccagtagaaaacaggtgtggccgaggccaggaggcgtgtggacacttggatgtgcacgtagacggtgcagacaagggtgagaatcgcagcgtgcagcacgaaagggaatgtggtgtggtcccttatcagctccttgaagccagagggcgtcaatttggcccagaccgctttggccaaatgctgcatgtagtcgtagcagtgccagtgcatgaaactcagcatgggcagggccagcaagaagttgggcagctgtttccacttgtagtatcgcaggaagcccacatcccagtagtgcgactgcacgtaagtgtaggggaacggcaacgtgtactggcaccaaggtgatccttcagagccctggccagacaataggtacttccgttccactgcgtagtccacaatgtgctgcggatggtttggccttgtgttcggcagacagtatagcctgtatatgtagaaatagtaggtgtgcagtatcccaatggctcccagaatggtcagcgtcatttgtgtcagctgcatgcaggtgttgggctccttgttcttgagtagcagttggcgtccgaagaagtagagcgggtatcccaaggtgattaatccatttgagcggcacagtaaacaggcggctaaggcggttcccaaacgcagatatcggaagctacccgtcggcttcgagcactccagcatcagatgaaggctggagtaggcgaaaaaggtctctgagtaggcggcggtgaagaaaatggttgccggattaaagcagtagatgagggccgcattccagctcttgtttaaatcgttgaacaatacttgggtgagctgaaacagcaaattagctgactcgcagaagagccagaagttcagggcgacagccaccaccagcaggatagattcctgtgataaggagatcccgatggcctccacggcctgtcccacgtgacgcacgacaaccggatatagtggatagaaggccaacgtgttttcgtagctgtacagattctcggctatatgcagaaagtattctccatcccagtgccgtaatcctcccaagcagcgcttaatcaccttgtctatccaggaggcattctgatctgacgaaaccggcatccggaatacatctggtttgtgctctggcagggctccgttggcgaccaattgtaccaggaggacgataaggcgactggccagcgccagtttagtcactttctctgtcatttcagatttctaggtcttgggtggagtcgattatcattcggcgggcatgtgattcatatcaggtcgagggcatacctcacagctaaaacgatgtggacggatcttctggcctggacactgctgcggagggaaaaaggcaaatcagctcctcggttgcttcttgaactgccttctcttttggtgacatttactttgtgaagcggttttattattatatattatttttgggcagaagcccggaaaagcagagcatggtgtgaccagagggtttgaggaagcattagacactttcgatatattatcgatacgagaataatatatttaataaacagaattaaattaatatgtaaacttaattctcgttgctctcgaactattaatttagtgtacaatacagccttataatttaatttaaaaataaacagttaatacgtcacgtgaattgcaatcgatactatcaaactaatatcgttgattgccccacctcaaatcgatatggcacattatagtggcggcatttcctaaataaactgccgcttttatttggcagttgggttgaatttaagctaaaatttcactcataaatgaagtgtcgcaatgccgagcagtgcaaagaagtcggactctgcaaagagcaatagctcgacgccacgaagaccgcgaaagcgcaaacgagtggatcgccagagcctggactcgcaggtcgatgaggatgccaaggagatcgatcgccggctacggaaagtggccaagaagaactccatcagtgccgaggacatgcaaaaggtggtccggaaggtggtgcgcaacgatcatgttctggcattagtcactttgaaggcggaggacgagctggcgcgggagaagttggagtcggcggagcagcaaaagcggggtgccatcatcataacggacactccatctgtgcccaagctaacgcgagcgaaagcacgggaactgaactgcacgcctgggatctcgctgccccagctcaatgaaacttccaccgacaataatggtatagaggctctaatacgtgaggatttgcactctgatgaggaggacgaggagtataccttcaaggaggaggactttcatgtgagtataaacattgaggccaattgatcgttgttcaataattgttattattcctttattatcagtccgatgatgatcctaacactacagcatcggatttcgactccaatccctgcacgcctcaaactcctcttac

SEQ ID NO: 14456 - DNA, 1743 bp, DROSOPHILA
ttctgcccaaaaataatatataataataaaaccgcttcacaaagtaaatgtcaccaaaagagaaggcagttcaagaagcaaccgaggagctgatttgcctttttccctccgcagcagtgtccaggccagaagatccgtccacatcgttttagctgtgagacctagaaatctgaaatgacagagaaagtgactaaactggcgctggccagtcgccttatcgtcctcctggtacaattggtcgccaacggagccctgccagagcacaaaccagatgtattccggatgccggtttcgtcagatcagaatgcctcctggatagacaaggtgattaagcgctgcttgggaggattacggcactgggatggagaatactttctgcatatagccgagaatctgtacagctacgaaaacacgttggccttctatccactatatccggttgtcgtgcgtcacgtgggacaggccgtggaggccatcgggatctccttatcacaggaatctatcctgctggtggtggctgtcgccctgaacttctggctcttctgcgagtcagctaatttgctgtttcagctcacccaagtattgttcaacgatttaaacaagagctggaatgcggccctcatctactgctttaatccggcaaccattttcttcaccgccgcctactcagagacctttttcgcctactccagccttcatctgatgctggagtgctcgaagccgacgggtagcttccgatatctgcgtttgggaaccgccttagccgcctgtttactgtgccgctcaaatggattaatcaccttgggatacccgctctacttcttcggacgccaactgctactcaagaacaaggagcccaacacctgcatgcagctgacacaaatgacgctgaccattctgggagccattgggatactgcacacctactatttctacatatacaggctatactgtctgccgaacacaaggccaaaccatccgcagcacattgtggactacgcagtggaacggaagtacctattgtctggccagggctctgaaggatcaccttggtgccagtacacgttgccgttcccctacacttacgtgcagtcgcactactgggatgtgggcttcctgcgatactacaagtggaaacagctgcccaacttcttgctggccctgcccatgctgagtttcatgcactggcactgctacgactacatgcagcatttggccaaagcggtctgggccaaattgacgccctctggcttcaaggagctgataagggaccacaccacattccctttcgtgctgcacgctgcgattctcacccttgtctgcaccgtctacgtgcacatccaagtgtccacacgcctcctggcctcggccacacctgttttctactggtttgccgctgaccacatgcccaagacactggcccaactaaaactgcgttcgaaggcaggagctctctttgtatggtgcaccacttatagtttggtgggcacggtgctattcagtaataattacccgtggacgtgagcaaaatgattgaagtaaaaggagcaatataactcgctggttgccaaagagactgttcatccgcatggatttcttttttagtgtgtaaataatcgtccaagttctcaaaattcaattgttgaggcgctcaaaagtattggtttcccatttctatttccatatatcatatacaaaaaagtaaaaaataaaattgttgaccattttagaaaataattgtaa

SEQ ID NO: 14457 - protein, 449 aa, DROSOPHILA
MTEKVTKLALASRLIVLLVQLVANGALPEHKPDVFRMPVSSDQNASWIDKVIKRCLGGLRHWDGEYFLHIAENLYSYENTLAFYPLYPVVVRHVGQAVEAIGISLSQESILLVVAVALNFWLFCESANLLFQLTQVLFNDLNKSWNAALIYCFNPATIFFTAAYSETFFAYSSLHLMLECSKPTGSFRYLRLGTALAACLLCRSNGLITLGYPLYFFGRQLLLKNKEPNTCMQLTQMTLTILGAIGILHTYYFYIYRLYCLPNTRPNHPQHIVDYAVERKYLLSGQGSEGSPWCQYTLPFPYTYVQSHYWDVGFLRYYKWKQLPNFLLALPMLSFMHWHCYDYMQHLAKAVWAKLTPSGFKELIRDHTTFPFVLHAAILTLVCTVYVHIQVSTRLLASATPVFYWFAADHMPKTLAQLKLRSKAGALFVWCTTYSLVGTVLFSNNYPWT

SEQ ID NO: 14458 - DNA, 3183 bp, DROSOPHILA
tacaagccgggcacagcaatcatctcgaatgcctcatgcacaaccaattgcctggcgccgctggccaaggtggtgcacgataactttgaaatatgtgagggccttatgaccaccgttcatgcggctacagctacccaaaagatcatcgacggacccagcagcaaactctggcgggatggacgcagtggcatgaccaacatcatacccgcatccacgggagccgctaaagccgtcggcaaggtgattccggatctaaacgggaagctaacgggtatggctttccgtgtaccagttcccaatgtctcggtggtggacctcacctgtaggctttctaagcccgccaaaatggacgatatcaagaagtgcataaaggctgcatccaaatgcgaaatgaagggaatcctggggtatgtggaggaggaggtggtgtccaccgattttaacggctcacgatttgcatccgtctttgatgccaaggcctgtattgccctaaacgataacttcgtcaagttgatcagttggtacgataacgagaccggatattcctgccgtctccttgacctagttctctatgcccagttggtcgaccaatgcgatgcgaaggaaaagggtgcttgctagatggaagatccatgtaagaaaaaaggatgatccctgcaagaaataggaagatccttgcaagaacaagaaataggaaactcttagaaaagaattaaaaatttttttaaccaagtctagatttatttaaattagatttatatttagaaatctttatttacttaaaaattaatgtaatgtaatccattttaccatagttttaggcgcagatttcatattttgcaattcttatgggctaaactatagatagcataggatgcaatcggcttttattcgccctttttccaacaaataaataaagaacaaaaaaatgtatacccatattttcctggcagacataaaagccaataagaaaaagtgactgaattctttggaaattgtcttagacattgctggagttccgctgaaactgcattgatgatatactcttaatctcattgtcctccatgacacctccatcactgctctgatggtggtccgcctctacgatgatgtcatccagtgtgggtgtcttaattctattgcgtatgatgagatctctgtcggagggtgcttgaagatgaagaggatttgtggctagctcggcgggaccatcgccaccgccaccaccgcctccctgcagacccagagtcagattaaccttggcgtgctgtccagtcttaagttcactgctgggctgcacattttccaatgtcgtgggcggacgcaggcgcgcaggatctagtagggaatgcattttggtctgttttctgggcgttcgtgcaggcgatgccttacgagaattgtagttctttagctgtttggatctgtaaggtaaaagcaaagttcattgtcattgaaaagattaacaaatagcccactctagttcacatacgcctccatcagcttcagcagcaaatggtgatacgcctcgtactcatcctttccgaactcattcggatcgtgccgagcatgttcgtacatatcgcaatattggtgaatcattcgctgccctgctccgttaagcgtcaccgataaagtggtcagcagaaaggccctcaagctctcaggagcatgtcgggagctaccgtccgccctcgctatttcggattctagcagtttcacgtcatcaaccgccttcatgcggtagtagtagggtggcaatggtgcctcctgctccggctgaacgatgtacttgtcgccatcgtcccacagcagtttcggctcctgcgtgattttctggatgcaatctaggcgccgctcaatctctctccttagtgccttcttggcatcattgcctaccggaacgtggggcccccgacgtcctcgcagctggaagcgcataatctgccgcttggcaaagatgaacagcatcaggcaagtaagtactcctccgctgattatgatgattatcatcacgcccgaaagctgttccatgttgccgcccgccttgctggccttctcctgaagactcggtgcggcgtagtcgcctaccttatgcaggcgcagatgcccatccatggcgaatactttttaattcgcggatatgaaataataaacaattttctcaagaaaattctttgttgttttggtcaaccacccaagtcagctgattctgagtgtgaccgcttacgtttggaaaatactagaaatacataattatatcttatataccaagtttcaaaaacgaagcgcaaattttaaacacataattttgtaatggttaggaaaatgtaaacttatgtaacagtaatacaaaacaatcattacaattattttctaaaatggtcaacaattttattttttacttttttgtatatgatatatggaaatagaaatgggaaaccaatacttttgagcgcctcaacaattgaattttgagaacttggacgattatttacacactaaaaaagaaatccatgcggatgaacagtctctttggcaaccagcgagttatattgctccttttacttcaatcattttgctcacgtccacgggtaattattactgaatagcaccgtgcccaccaaactataagtggtgcaccatacaaagagagctcctgccttcgaacgcagttttagttgggccagtgtcttgggcatgtggtcagcggcaaaccagtagaaaacaggtgtggccgaggccaggaggcgtgtggacacttggatgtgcacgtagacggtgcagacaagggtgagaatcgcagcgtgcagcacgaaagggaatgtggtgtggtcccttatcagctccttgaagccagagggcgtcaatttggcccagaccgctttggccaaatgctgcatgtagtcgtagcagtgccagtgcatgaaactcagcatgggcagggccagcaagaagttgggcagctgtttccacttgtagtatcgcaggaagcccacatcccagtagtgcgactgcacgtaagtgtaggggaacggcaacgtgtactggcaccaaggtgatccttcagagccctggccagacaataggtacttccgttccactgcgtagtccacaatgtgctgcggatggtttggccttgtgttcggcagacagtatagcctgtatatgtagaaatagtag

SEQ ID NO: 14459 - DNA, 1115 bp, DROSOPHILA
caacaaagaattttcttgagaaaattgtttattatttcatatccgcgaattaaaaagtattcgccatggatgggcatctgcgcctgcataaggtaggcgactacgccgcaccgagtcttcaggagaaggccagcaaggcgggcggcaacatggaacagctttcgggcgtgatgataatcatcataatcagcggaggagtacttacttgcctgatgctgttcatctttgccaagcggcagattatgcgcttccagctgcgaggacgtcgggggccccacgttccggtaggcaatgatgccaagaaggcactaaggagagagattgagcggcgcctagattgcatccagaaaatcacgcaggagccgaaactgctgtgggacgatggcgacaagtacatcgttcagccggagcaggaggcaccattgccaccctactactaccgcatgaaggcggttgatgacgtgaaactgctagaatccgaaatagcgagggcggacggtagctcccgacatgctcctgagagcttgagggcctttctgctgaccactttatcggtgacgcttaacggagcagggcagcgaatgattcaccaatattgcgatatgtacgaacatgctcggcacgatccgaatgagttcggaaaggatgagtacgaggcgtatcaccatttgctgctgaagctgatggaggcatccaaacagctaaagaactacaattctcgtaaggcatcgcctgcacgaacgcccagaaaacagaccaaaatgcattccctactagatcctgcgcgcctgcgtccgcccacgacattggaaaatgtgcagcccagcagtgaacttaagactggacagcacgccaaggttaatctgactctgggtctgcagggaggcggtggtggcggtggcgatggtcccgccgagctagccacaaatcctcttcatcttcaagcaccctccgacagagatctcatcatacgcaatagaattaagacacccacactggatgacatcatcgtagaggcggaccaccatcagagcagtgatggaggtgtcatggaggacaatgagattaagagtatatcatcaatgcagtttcagcggaactccagcaatgtctaa

SEQ ID NO: 14460 - protein, 349 aa, DROSOPHILA
MDGHLRLHKVGDYAAPSLQEKASKAGGNMEQLSGVMIIIIISGGVLTCLMLFIFAKRQIMRFQLRGRRGPHVPVGNDAKKALRREIERRLDCIQKITQEPKLLWDDGDKYIVQPEQEAPLPPYYYRMKAVDDVKLLESEIARADGSSRHAPESLRAFLLTTLSVTLNGAGQRMIHQYCDMYEHARHDPNEFGKDEYEAYHHLLLKLMEASKQLKNYNSRKASPARTPRKQTKMHSLLDPARLRPPTTLENVQPSSELKTGQHAKVNLTLGLQGGGGGGGDGPAELATNPLHLQAPSDRDLIIRNRIKTPTLDDIIVEADHHQSSDGGVMEDNEIKSISSMQFQRNSSNV

SEQ ID NO: 14461 - DNA, 6545 bp, DROSOPHILA
ttaaagtgcaagaggtctaaggcctctgtattcctccacataacgatactcactgttttttaatcattcataatataaaattattaagtataaattattcggcgcccaacttgttttttcgcttttatatttttcaacctaagttataatgctttacaacagccatataaatagttattatcttaatactaccgtatgataaggtgatgagacattcaaaacatatttttgtggaagcgtaataaatttcaagcatattaacattggtaataaaatagaatcacaattgggaagcaccttagaaacgtatgtttacctgattaaactgttataaaaacaaaccaaatccgttcaatgcttcttttagtggcaataaaaccaacgaatatgctttgatacgacgctctgctaatatcgccatttgcagcttatcaataacgtattgatttggtattgactatatggctttctatttgaagggaatttccaacgaactgttatttgctcctatatgacaaacaatcattacattaaatatcattacaatattttgaaagcaaataattttttactcctgttaaagttcaaacaatcccaatttttttaaatcttatcttcatataactttatttataactatttaattggcgttcaaatggttttcccgccttttaaaattactatcttactaccgtctaaagtgagaatgaaataattaccacccttttctcgaggaaagtgccctttaccatcattgcaattagttgcatcgatgaaatatacatgaaatcccccgaaaactgttaagcccgtagtaatgtatgattaaactgattaaaaatgagctaagtccgtgggaggcaccttttagtggtcaataaaatgcacgaccacgctttgataagaacccccgctattatcgctggccatttgcagcttatcaatagagaagtgataagctgtgtagcactcaattatatttttggtcccatggcaaataggtaattctacagttacagacattccgtcaaccagttcgaaattgaccatttactaggacggtcgagccacgaacgaaaaaatgggaaacgacaatttttcacaacagaatcctccgccgatgggtttcgcaactgcaccaccacagcagggatatccacggcaaggatatccacataccgaatttccccagccagggtttccacaaccaggacaccaccaatcgggatatcctcagccgggacattcgtggaaccctccgccaccacagtttggattttcagggtacccaccgccacctcaacaaggatatcccccacagttttacggtccaccaccaggatacggattaccacaagcaacactacctcctaatccgccccagcaaaccatcacggtaaataacagctggtacagtcgtaatcagaagaacaagccacaatcgaatgctgttggagcaggtgagtcaaagaaaaaagatttttaagttttgacattttaaagtaatattatatatatatgcattgtaactaccaaattaaatatagtacaattttacacttagcgaactaaccactgtttaatctccagcgggtctcattttcgtctctggcggtatgaatattgcgtggagcattggattcagaggagtactccactataaaaccactgagcataattttgcagcctggttcattggtggcattatcggagctgtgatcagctggtttctcataaacaatgtggccaagaagtatgtcttggtaagtaacataataaaatataaaatacttcaacaattacttcattaactagaccattgcaaacagatcttcagttcgtttctggtgatgattggcggaatactgactaccagtacaaagaatagtggcgatgccacgttggcggcttcctatctggatggaatcgccaatggactggtgtttgctccattcatggccttggccggagaggtctcagtgtcttatatgagaggaatggtctcagccagcatcgaacagatgtgctttggattgggaatctttctgcagatcatatacacctccacgtggaactcaacggcttacccttcgtataactccttctcggcggagaatatgaaaggagtgctgagtattatatatggatttttggccctgattataggctctctactgtgcatcgagtctccggtaatcatgctggccaagaacaatgacgaacagggagctattgacgcactgagacgactccagaggccgtataccttgaccaacgaaaccttcgagcagctggcggagcacaagaagtatttggcccagaacaaggaactttccatgggtcagagcatcggacaggcgctgcccaccttcatccgactcgttttccttcgcggtctcaatgccatgagcatttccaaatttgtaatgatcggctttgtttattcatttgccagtccgtatggatatgtatcgccttcggtgggttggttcattggattcggcgtttgccgctggatgggaaactttatagccacgttctgcatggaatcctgtggtcgcaagaagcccacacttctaggactcatcgtttgcagtgtcatgtcctttgtggtggcaggccagttcaatatctttacttataataccggcaacaacataatgttgttggtctttgaactgtttgccggtatcgcctttacagccacatcgccttacctttcggaggccttcccgctggaagttaagcagcattttatatcctttactttcattggagagatgctggtattcttggtgttgactttgatcagatggagctcttctggcggagccaactacttctatgtcatgggaggactctatctctttggcttcttctttggcctcgtttgcctgccggaaaccagaaggaccactttaagggaggcccaggataagttcagtaaattcatcagcatgggtttctagttggtgaaatacttcttttaccgctttagtcattccaaagataataaatatttatcgctaagcgagcactccaggcgttgtacttcccaatcgtaattttcttcagctattgatatcattttcgaactgtcaacaaaacaattctcattgatatgttggacaatggaaaaccgaattgcttctttctcgtaaactaatgaaagagggtttggccaactaaaagagattgagagttgaaaagcgagagaccgaaggtaatggttggcaatcgtagttttacctgccaatgtgagcaaacacacaaatcccacagaacacatgctcgtttcacaggcatttgtatgctaagaagctatctaaaagatagggaaacccaaaaaatcaaaccacccacttatcaatcaatacccgataagattagttgaccgccgatagataaaccagggacctattcaacacgctcacctacaagaaccgaaaaacacggcgtgtagtcatcaccgtgagttcgaccacaaaaggtccgatgcagaccgaacggccatctccagacgatggattccatgtcgtacccatccatagtgatgcggaacagcacatccacaggaactccgatcgccagcgggagctgatcctgcaaaactcacagacaagtccatgctgcaatcgggatctccgcaatcagccgcaggctaatgcagttggagctggtaagagaaatgccacttcctgagtattcatagtacttcccagtaaaatgcaattacatgtacaataatactcttcaatgttgataaattgttttttggcagtaataaatcataatatatctatgaatttgcctatcttcctattcttgtggtaaatacacgtcccatcattttggatagggtgaagtccaagtcagaaatgattcattcttcagtgtcagcaaaaaaatacaaaatacaacaattcaaaataatagataatagaattatgtgtactccatgaccccaaatataacactgaagttcaaaatatcatccaagctgtcaagaaacctcttatctttagtaaaaatgtttagaaatcttaactatataggttctgcatttcaaatgtgtaatatatgttaataattagtttttttacagctgcccttatattcctgaccggtggagttcacatagcatggagcattggttttgacagttcgctttccgaacttgaagttactaaccatgttcaaatttgctggtttattggggccattattggggccctgctcggtggattttttagcagatggtttccctacaaaacattaatggtaagaaagaaggtcttgtttttcaatatatcggcttttgtgccgataaaaatatataatacatatatttgcttcaatatatctagatgactagatgcactgctgtaaatgaaattattgtttatcccttcaggagttctgttcgctgatcactatcacaggtggaatagtgatggcggtgaaccgaatggacttggacgccctgctggcagggagatatatgaatggattggccaacggactggccatcgcacccactttggccatggcaggtgaactgtcggtgttctacaagaggggaaccaccacgtctgcggctgagcagtggcctacaacgattggcatctttgtgcagatcgtgtgcagtcatagttgggatgttcagagtgattttacggaggagcaattccagggagtgctcagtggagtcctgggctccatagccctgctgctcgccttcctgctatccatcgaatccccggtggacctgctggagcagggcaatgaacagggtgccgttcaagctttgagcaggcttcaaagaccacgagctgtgactgctgagacctacgaccaagtgagggatcatcgcacctatgtcgaacatcacagatcaatgggttggcgccacgccctccccgccctcgtgcgcctgtcggtgctaagggctttatacgctctcagcttgagcgtgatggtggccttcacattggcatggacgagcacggaggtgtacggcgatagttctggtccatatgtgctatttggtttcctgcgactgatgggcagcttcacgacctcctttgccctggactccttgggcaggaagattccgctgcttctgggactggtcatttcgggatgcctggcctgtggactagccagcagattcgcgggaagccatccactaacattctcgggcaatcggatggccctgtggctgctgctcatctaccaattatttgccggcatagccttcgctcccagctcatcctatctctcggaggctttcccacgtcgcatcaaaaggccttgcattgcaatcacctatattctggagataattgtccagctgctcctccgccaaatggatttcgcagcaattggcagtgatagcagttatgtggcactgtacttctttatcctgggaggcttactattagcaggatttctcttcagtgtttggtacatgcccgaaacgaaggataccactctcctacaagcgcaatttaagttccaggaattcgtaattccaccagcctgaaagtaggcacctcgaacctagccagtaaatagaagcacatatgtatataatcgtaagataacgctagcaaaataaatctgaaatcctaataagaaaccgtgggagtgtgacgttgtcttatcggcgctaaagtgactggacagatttggttagctattggctgcactcttttgtgccgatcatcatggagctaatggttataatacttatggggaacaccatggtataaacttcacagataagcacggcgagccaaaagacttacttccaaacggcaattaaagcggttcccatacatctttgataagattcgggcctcatatatgtttgctggactttatatagatcaaataaaccctatttagaatgggaactagttcaagtttcaagattgtgaatccgaaattaattcaatttaataaatataataattacgtgctattttatatatgatttatttatcatacagaggatactttttccatttataataaaaaatagtatttaaaggcataaatattatgaaacttgtagaaatttcttaaaacttaatatttttaaacccaagaattaatgtaactcacaattggcgcatctctaacaaatcaactttcgctctttgcgtcaatagtgttcatagttgtctggctcatatacacacacacatgtgattttttgccttcatacaaattcaaatttaattaatttatttatatccagtaatcagagcgataagtaggttggcaaaaggtttcggcccactgttatcttatcgaaagtgctggccaaatcgaggtgctcgctcaataaccgctcgatgctccttcatttatcaagcggcgtctgaacagtcggttaacttgattcgtcgcgttcgcgagttggctgtccgacaagtgtgagttttgctttttagccaaatagcactgtgaccacaaagtgcaaaaataatgacatactcaagaagacaaacaagccagcagcggttccaatgaaaaag

SEQ ID NO: 14462 - DNA, 3003 bp, DROSOPHILA
ggtaattctacagttacagacattccgtcaaccagttcgaaattgaccatttactaggacggtcgagccacgaacgaaaaaatgggaaacgacaatttttcacaacagaatcctccgccgatgggtttcgcaactgcaccaccacagcagggatatccacggcaaggatatccacataccgaatttccccagccagggtttccacaaccaggacaccaccaatcgggatatcctcagccgggacattcgtggaaccctccgccaccacagtttggattttcagggtacccaccgccacctcaacaaggatatcccccacagttttacggtccaccaccaggatacggattaccacaagcaacactacctcctaatccgccccagcaaaccatcacggtaaataacagctggtacagtcgtaatcagaagaacaagccacaatcgaatgctgttggagcagcgggtctcattttcgtctctggcggtatgaatattgcgtggagcattggattcagaggagtactccactataaaaccactgagcataattttgcagcctggttcattggtggcattatcggagctgtgatcagctggtttctcataaacaatgtggccaagaagtatgtcttgatcttcagttcgtttctggtgatgattggcggaatactgactaccagtacaaagaatagtggcgatgccacgttggcggcttcctatctggatggaatcgccaatggactggtgtttgctccattcatggccttggccggagaggtctcagtgtcttatatgagaggaatggtctcagccagcatcgaacagatgtgctttggattgggaatctttctgcagatcatatacacctccacgtggaactcaacggcttacccttcgtataactccttctcggcggagaatatgaaaggagtgctgagtattatatatggatttttggccctgattataggctctctactgtgcatcgagtctccggtaatcatgctggccaagaacaatgacgaacagggagctattgacgcactgagacgactccagaggccgtataccttgaccaacgaaaccttcgagcagctggcggagcacaagaagtatttggcccagaacaaggaactttccatgggtcagagcatcggacaggcgctgcccaccttcatccgactcgttttccttcgcggtctcaatgccatgagcatttccaaatttgtaatgatcggctttgtttattcatttgccagtccgtatggatatgtatcgccttcggtgggttggttcattggattcggcgtttgccgctggatgggaaactttatagccacgttctgcatggaatcctgtggtcgcaagaagcccacacttctaggactcatcgtttgcagtgtcatgtcctttgtggtggcaggccagttcaatatctttacttataataccggcaacaacataatgttgttggtctttgaactgtttgccggtatcgcctttacagccacatcgccttacctttcggaggccttcccgctggaagttaagcagcattttatatcctttactttcattggagagatgctggtattcttggtgttgactttgatcagatggagctcttctggcggagccaactacttctatgtcatgggaggactctatctctttggcttcttctttggcctcgtttgcctgccggaaaccagaaggaccactttaagggaggcccaggataagttcagtaaattcatcagcatgggtttctatgatgcggaacagcacatccacaggaactccgatcgccagcgggagctgatcctgcaaaactcacagacaagtccatgctgcaatcgggatctccgcaatcagccgcaggctaatgcagttggagctggtggaatagtgatggcggtgaaccgaatggacttggacgccctgctggcagggagatatatgaatggattggccaacggactggccatcgcacccactttggccatggcaggtgaactgtcggtgttctacaagaggggaaccaccacgtctgcggctgagcagtggcctacaacgattggcatctttgtgcagatcgtgtgcagtcatagttgggatgttcagagtgattttacggaggagcaattccagggagtgctcagtggagtcctgggctccatagccctgctgctcgccttcctgctatccatcgaatccccggtggacctgctggagcagggcaatgaacagggtgccgttcaagctttgagcaggcttcaaagaccacgagctgtgactgctgagacctacgaccaagtgagggatcatcgcacctatgtcgaacatcacagatcaatgggttggcgccacgccctccccgccctcgtgcgcctgtcggtgctaagggctttatacgctctcagcttgagcgtgatggtggccttcacattggcatggacgagcacggaggtgtacggcgatagttctggtccatatgtgctatttggtttcctgcgactgatgggcagcttcacgacctcctttgccctggactccttgggcaggaagattccgctgcttctgggactggtcatttcgggatgcctggcctgtggactagccagcagattcgcgggaagccatccactaacattctcgggcaatcggatggccctgtggctgctgctcatctaccaattatttgccggcatagccttcgctcccagctcatcctatctctcggaggctttcccacgtcgcatcaaaaggccttgcattgcaatcacctatattctggagataattgtccagctgctcctccgccaaatggatttcgcagcaattggcagtgatagcagttatgtggcactgtacttctttatcctgggaggcttactattagcaggatttctcttcagtgtttggtacatgcccgaaacgaaggataccactctcctacaagcgcaatttaagttccaggaattcgtaattccaccagcctga

SEQ ID NO: 14463 - protein, 973 aa, DROSOPHILA
MGNDNFSQQNPPPMGFATAPPQQGYPRQGYPHTEFPQPGFPQPGHHQSGYPQPGHSWNPPPPQFGFSGYPPPPQQGYPPQFYGPPPGYGLPQATLPPNPPQQTITVNNSWYSRNQKNKPQSNAVGAAGLIFVSGGMNIAWSIGFRGVLHYKTTEHNFAAWFIGGIIGAVISWFLINNVAKKYVLIFSSFLVMIGGILTTSTKNSGDATLAASYLDGIANGLVFAPFMALAGEVSVSYMRGMVSASIEQMCFGLGIFLQIIYTSTWNSTAYPSYNSFSAENMKGVLSIIYGFLALIIGSLLCIESPVIMLAKNNDEQGAIDALRRLQRPYTLTNETFEQLAEHKKYLAQNKELSMGQSIGQALPTFIRLVFLRGLNAMSISKFVMIGFVYSFASPYGYVSPSVGWFIGFGVCRWMGNFIATFCMESCGRKKPTLLGLIVCSVMSFVVAGQFNIFTYNTGNNIMLLVFELFAGIAFTATSPYLSEAFPLEVKQHFISFTFIGEMLVFLVLTLIRWSSSGGANYFYVMGGLYLFGFFFGLVCLPETRRTTLREAQDKFSKFISMGFYDAEQHIHRNSDRQRELILQNSQTSPCCNRDLRNQPQANAVGAGGIVMAVNRMDLDALLAGRYMNGLANGLAIAPTLAMAGELSVFYKRGTTTSAAEQWPTTIGIFVQIVCSHSWDVQSDFTEEQFQGVLSGVLGSIALLLAFLLSIESPVDLLEQGNEQGAVQALSRLQRPRAVTAETYDQVRDHRTYVEHHRSMGWRHALPALVRLSVLRALYALSLSVMVAFTLAWTSTEVYGDSSGPYVLFGFLRLMGSFTTSFALDSLGRKIPLLLGLVISGCLACGLASRFAGSHPLTFSGNRMALWLLLIYQLFAGIAFAPSSSYLSEAFPRRIKRPCIAITYILEIIVQLLLRQMDFAAIGSDSSYVALYFFILGGLLLAGFLFSVWYMPETKDTTLLQAQFKFQEFVIPPA

SEQ ID NO: 14464 - DNA, 4538 bp, DROSOPHILA
cgggtctcttgctggtacttctaacagacacgaggcttaaataagattgaatgttagaaaatatgtgttcgaaaaataatttcaaattacgcgcaattatcgacttatcgctactgctatcgatgtaataacagtatgtcgattatcgattgcagaacagctgttgattcgataagagagcaaaagtaataacaaaacccatgaaagccaattgttattattttgtgatgcaatagtttcaatatttggatacaaaatgcagcttacccgccttttactgaagcctcgagcctcggaagtattgaccgcatatttgaaacaatgccatgagccaccttggacatcatatttcgtgaaggtaagactcccctttttccgccccaatattttcaccagatctaatgagaaatatgctccaagtctagtttcacgatgtggccaacgatcagaggggaatgtctcactttaattggaccctggaaaacggaaccaactatcacattcttcgcaccgcctgttatccctatatgaagtaccactgtagcaagagggaggtgcaggatctttggctggaggacaagttctttcgcttccttaaggtgattaatttgggtaagtccagtaaacggattatgctacataggtccgtggtaactcgaaaaaggtgtatgccctgtaatgaatcccgaaatgcatatgggaaagtcctcattcgagtttaatcaaactcccaaaagaccgcatttatatccttaaattctacacaggcttaccaatgctcttctatggactggctgccatccgtctaattagtcacaccgagatcgttcatgtcagcgagacggtaaaagttcccatatactttctatatcctgaggacaagggctcaagcttttgatttgatttcctgaactccaaaatgtgaaatgtgaagaaaagccttcttatctaaatatatgcatattcagttaatgtaattagaagagaacactggaaatatctcatccatatatgtatgtatttgtctttttgagataactacaccttgcattacttagtttgtctacttgacttagttttattttaaagctattaattgaaaccaattatttaaaattatccaaaatcacatctgactatttcttagcaatggccagacacttaaacaacaacccagaacgacacacactttcaacaaagtctggaaggcatcttatgttttgcaatcggtcggatgattttcacaagtctcatcatagttatctagaagcagggcctttacagaggcctcaaactgggtcagtgagcacggtgcatcgcaattgggaatggtcagctccttggggaatttgtcttcgctgttgtagtagtaaaccaactgcaaccaaacaacccaaactggtaagaatcccatagttaatagtaatacgctaccaataccaaccttcacttcaaagtctccatcactgaaagacttgctgtgatgaagctcgaaggccaatgccgatgcatattccggaagcttggtagtctggtccagtatgcccagggaattcatcacgttaaccaaagtcacatcatgaccggagtacaggaatattttgcgatcgggattgagattcctcttgcgcttattctgcattttgttgagtatatccgtaaggaaagcgccacccttaatccgcttcattagatttgtttcggtgaatagcatatagctacgttcagctagtggcctaatctcctcggggtatatattctcagtccaatcgggcagcaccagattagcttcctcttcggttttgagtgtgccatagagtagctccacgtccagtacatttgaaatgttctaaaggataatatgataatatcagaagtgaaaaagtgaaatatatcgtatggcaataaaggaattaacaaccaatatgggtgcaactctctcccaccttgcctgtgtttttggttagcaatttgtacagctccatgttgtcctcgttcagtttctggagttcaggaggcggagatttgtaaagcttctgcagaatgtggtcatatttcaagcacggtttcttttgggccaacagctaatagagttagatcatagtactatgatgatgacttgcatttgactaatggaaatatacaattgcactcacgatatcttcattgcgagatagcgtattgacggccaccggctgccagggaatgggtagcacattcttgttctccagcggcggcatcatgccggccaagacgctctgggcgctcatctaaaagataacacacggccaactgattagggcaccaccatctcggacagatagcaaatagagttatagaggatttcttatcgaaacaattgacgcaccacacagcgttccgcggccgagctgagcacattcacctgctgctgggtgtaaaggctgttcggaggcagcagacggtagtagcgcatgcgcagattccttcccaggttgtacgcctgcaggctgcctttctgtcaaagggggtttaagaaatttgtagaatataaatatctttattaaaatatattaaatagtaatgtatgttttacgtgtctagcattaaagttttagatatcaccaacttgcatctataattcattcttcattgatcattttggatcataaaattaaaaccaaattggagttttaaatgcaatgaaacacactgttttacattattgacattatttatttacatgataaccgtttaataaatactctttaaagtgtaaaaattcgtacgataaaatgtgttaattggaaaataaataaacataaacgagagcgttatagtctagtttctcagctagtgcaagcaataatatatcaaatagtacgaaaatcaaacaatttttttttaaatttccaaaagaatgggcgtgtcagttttgatcagccctattgaaaattgatgtgttatcacttatacgttttgagttaagagaaagaatttaaagtttaggtaggatccatatcctaatctatactattgtatatcgaatactaaccggcgtgagggctcccatcccgccctgccagtcgtgggcagcgtgcggatccaacggatagaagccactcggattcttggcaccatgtcggaacagctggtgggcattggattggattgataaacacagtgctcagatctcgttgtttacaactttatgccagaagtggcggcagcttactatggatatcatgcgtagattccgcaaaccctgctcgtcgttgctgtcgccgaacacaaagtatgccatcatgacgaaacagagggcacttcccagggcgatcaccgatattttggtgccgcgtcgcgatttgcagtccatttttagggagggggtgcggtggcgtctctatgctcctgctgcagttgatcgagaaaatatatttcagatttgcagcctaaaaatagttttttgtttattttatagcgagtgttttcgatttcgctgcccccgtcgacgaaacaaataataaataaatacaagtcacgtccgatggcaacaaaagccgtataacaactgagcgactgtcgatggaaggttgcctcacagccagaaagagagggggcgctaagaagcgagagagaaggctatataaaacagaaagagccagctagagacagtcggagagccggggagacaagttttccatgtgattttggcattgcgcgagagtaaagtctttgaacatgtgcgaataattaaattagtcgctcattggcagtacaaattgggtctcgactaggtgctactgtgtgcaatatggtggtctatcaatttgcactcatgtgaaaaacattgtttttcaagttatttgtcttgcctttatatcttaccttgcgacatacaactatcgctaatcatatacacatgtaagttaaccaaataaatatttataaaatatatatattttgatcactacaaattccaacgaaaaatcaaagagggtaacgttttttttctatagtcaaacgtagatgctgaactgaaatatgagatatctattttctggattttggtgcctgttcctcggcatcctcctcagatggttcgctggtgggttcctcaaccaggtaaccctgctcggtggtatatttgcgcttctgcgatacttttcttcgcctcctgaaaaccgattctaatttaacgtattcccccgatcttgactgctcgctaatctccaccgatgaataactctttgacgaacgctgcgaatcgccagattcctcagctgcgccggactctgaatttgaacggtttaagcagagaacaatctcgggaatttcatagccgtatccctcgtcgtcatcggtgtgctcattctccatttgaacatattctagatttggctcatggaaacatgagttggattcaatggttggatatataagaccagtttccagattttgcctagttggcagagccaagtgcgtttgcatatccgattgatagtggataacgcccattggtccagctacataggcggcattgctatctggaattgacc

SEQ ID NO: 14465 - DNA, 1584 bp, DROSOPHILA
ttttgttgccatcggacgtgacttgtatttatttattatttgtttcgtcgacgggggcagcgaaatcgaaaacactcgctataaaataaacaaaaaactatttttaggctgcaaatctgaaatatattttctcgatcaactgcagcaggagcatagagacgccaccgcaccccctccctaaaaatggactgcaaatcgcgacgcggcaccaaaatatcggtgatcgccctgggaagtgccctctgtttcgtcatgatggcatactttgtgttcggcgacagcaacgacgagcagggtttgcggaatctacgcatgatatccatactgttccgacatggtgccaagaatccgagtggcttctatccgttggatccgcacgctgcccacgactggcagggcgggatgggagccctcacgccgaaaggcagcctgcaggcgtacaacctgggaaggaatctgcgcatgcgctactaccgtctgctgcctccgaacagcctttacacccagcagcaggtgaatgtgctcagctcggccgcggaacgctgtgtgatgagcgcccagagcgtcttggccggcatgatgccgccgctggagaacaagaatgtgctacccattccctggcagccggtggccgtcaatacgctatctcgcaatgaagatatcctgttggcccaaaagaaaccgtgcttgaaatatgaccacattctgcagaagctttacaaatctccgcctcctgaactccagaaactgaacgaggacaacatggagctgtacaaattgctaaccaaaaacacaggcaagaacatttcaaatgtactggacgtggagctactctatggcacactcaaaaccgaagaggaagctaatctggtgctgcccgattggactgagaatatataccccgaggagattaggccactagctgaacgtagctatatgctattcaccgaaacaaatctaatgaagcggattaagggtggcgctttccttacggatatactcaacaaaatgcagaataagcgcaagaggaatctcaatcccgatcgcaaaatattcctgtactccggtcatgatgtgactttggttaacgtgatgaattccctgggcatactggaccagactaccaagcttccggaatatgcatcggcattggccttcgagcttcatcacagcaagtctttcagtgatggagactttgaagtgaagttggtttactactacaacagcgaagacaaattccccaaggagctgaccattcccaattgcgatgcaccgtgctcactgacccagtttgaggcctctgtaaaggccctgcttctagataactatgatgagacttgtgaaaatcatccgaccgattgcaaaacataagatgccttccagactttgttgaaagtgtgtgtcgttctgggttgttgtttaagtgtctggccattgctaagaaatagtcagatgtgattttggataattttaaataattggtttcaattaatagctttaaaataaaactaagtcaagtagacaaactaagtaatgcaaggtgtagttatctcaaaaagacaaatacatacatatatggatgag

SEQ ID NO: 14466 - protein, 395 aa, DROSOPHILA
MDCKSRRGTKISVIALGSALCFVMMAYFVFGDSNDEQGLRNLRMISILFRHGAKNPSGFYPLDPHAAHDWQGGMGALTPKGSLQAYNLGRNLRMRYYRLLPPNSLYTQQQVNVLSSAAERCVMSAQSVLAGMMPPLENKNVLPIPWQPVAVNTLSRNEDILLAQKKPCLKYDHILQKLYKSPPPELQKLNEDNMELYKLLTKNTGKNISNVLDVELLYGTLKTEEEANLVLPDWTENIYPEEIRPLAERSYMLFTETNLMKRIKGGAFLTDILNKMQNKRKRNLNPDRKIFLYSGHDVTLVNVMNSLGILDQTTKLPEYASALAFELHHSKSFSDGDFEVKLVYYYNSEDKFPKELTIPNCDAPCSLTQFEASVKALLLDNYDETCENHPTDCKT

SEQ ID NO: 14467 - DNA, 4216 bp, DROSOPHILA
aaaagcccggattgctaatacggttagcagcatacgatcgattcgaaaatgggacagcccggtttccgtcgtgccattgggcacgtttcgttggtggtggcactgatgtgcaccacctgtttccaagtggaaggactaccccatccgccggccacgtcgccgtcaccaatgatggaaagaatggtggagcaggcctacgacgataagttcgacaacgtcgatctggacgagatccttaaccaagagcgactgttgatcaactacataaagtgcctggagggcacaggtccttgcactcccgatgccaagatgttgaagggtaagcttgaagcccaattcaataattctcggtaatacccaatctcttgtagagatcctgcccgacgccatccaaaccgattgcaccaagtgcacggagaagcagcggtatggtgctgaaaaggtgacccgtcatctcatcgacaaccgacccaccgactgggagcgtctggaaaagatctacgatcccgagggaacctaccgcatcaaataccaggagatgaagtccaaggccaatgaggagccataatcaatctctattttacgtcgtttttaacttaagtgattttatgttgctttaattaacgaataaactgcagagaagcttcaacctttggtctttttgaaagtatccaagccgtaagaatctattaaattttaattacccgaaatgcgaattattttactagttaaacaacttaaatacatagttacagatatattttgcttcaaaagaagaaattgtaaattttgcggaagcggaagcgtttgaaaacgaatacaagtcgtctcgattccccaattcgatagacgagcaatcggaggcgtcatggcaaccagttcctaggagccccgattccggattcagccccaacaacgcagcagtcggcggagcaaacaataaacaataatcagacatcaaacatcaaggcgtaaccacagtagcaggcacttggttttcagttacattttgacttcacctcgcaccgactctctatctatttctatacactagacatccgaattggcctccgaaaattattagctttctcgagctaacccagtgacaatcctccggagcagcggcaggaccttagatggtatcgccgcgcaagctggcatcgtcctacggcccaagagtatcccaatcggaaccgaacaatctgatggcgtgggtagagtacacatcttcggcagtagccaccatctaaagtcttcccctccccccaaatccccttttctagagcgtcggcaaagagctgtgagagcctattctcggccagctcccgggagtcggccagcctgatctaccagcgcagcaagccgccaccgccccaacaacgtggcggcgtgaagggttccggcagtatgagctcccagaaccacagcgagatccatcagcgcgtcatgtccgcgaggaatctgcgcgccaagaccttccagaaccaactggccgatgcccaggcggagattgccaatctggcgcacgagaatcgcatgctgcgcacgcttcacaatcgccagtcatcggcgctgaataagtacgaggcccacaacgctgagctgcccaagttgctaagctcacatgccgaggagctgcgcatgtggcagaccaagtaccgcaaactgcaggctgcgaacaaggctctggagctaaagctcaagcagaaggaggaaatcatcctgacgctgagcgatcagaacaagcactacagtcagctcaacaaggataagtatgtatgattacttttatgctagtcgcaattaaattttcatttcttttgattgtttttttttttgttcaggaatctcgacgagcggcaaaagcttcaggagaagttaaaatccctggagcagcgtctggaggagaaggacaacgacatgaaactgatggcccgcaaggtgcagctggagtcgaagaacatccgccagcaactgctcaacgagcaaaggaagggcaaggaggtgatgctgaagctggagaaggccaagctggagatcagtggataccgcaagctggaggagtacactgtgggtattacaagcaattcctcaaagtcatcttttaacttttgagccttcagctcggcactgacaaggtgaatcccctgtcctccggtcgacgaaccaaactgagtggcgtcaccgatgagccggacaagatcgacaagttggagaagtcaatggagatgctggacaaggccatcgagaagaacaaccagagcgaattcacggccttgacggatgtgatggagtcggaatcgttctacgatttcgaaaaggacagtgccgaagacaagagtggacccaacactccacctagtcaaatcgaacgacaggtgggcgggcgcggcggtaagcttatcctgccgcccgccacgaaccatgctaagatgggacagaaagccaatcggtccactttgagccaagtgctctcggcccagggaaagatttcggtatcttctggaaaatctgctaaatcacgcattgccgttgcagtgccgaagatggaaagtgtccaggttagcaagcgtcgcgaaccggagaccgtgtccagactggcttccgccgaaaccaagcccaagcagaagcctctggagtacgagtacgaggacgactatgagccggctggcgaagatggtgatgacgacgcctacggcatgatgagcaagatgtgcgagggagaggaaccacaggacaacagcgaagagaatgccaacgaaagcagtctattgaaatactccgcatacatggataacaagagtagcgagggcgatcccctagaggaatcaatggaggagtacgacggaactgatggtcaacaatcgcagggcagcgacgatgaggtgactgttgcctttgtaattccgatccactagtagtacttaaatgttttctcaatctcaatcccaggacattagtgtacgtgctccgcgtctgaaggagaacatgtccagcctgcgcaagcagatctcgaatgatttcaaggagcgcgagagcttcctgaagacgttctgtcgccaggccagtaatagcaatatgcgcgacgattccgcgtcgaagaagaggaacagcatcgcgaccggagcggcggccagtagccacatgaccggcagtcgcaagaatgcccttttggccgctctaaagacgatcgacgacaacaagagccaggactagagtgcactgcaatagtttccacccatgtccagttcaagttagtccttaagcggtgttgagttatatatatatttttcaagctgaggcccgtgtgcccggcgcagctggagcagttgcatcagtggcttggcgaagatggatcgaatcaagcccttgatgcagttgctccagcgccggtcgcacagtcgttgattaaattttaatataaacatttctgtgtttggtatataattggaaggattgcccttatcacaaatccacattgtatctgatagtcgatgcgctcaattattaaaaacattttattttgttatatctacattttatacagcaaaatgcctaagaattgtccattgattactctcgagaataaaatcaggcagtctgctttcctcgcagcttgctgatggcccgcgataccttcttgcgcagctccttttgacgccgctcctgggaagccatcttctcccgcttcttttcgcggtagtttttgatgcgcttcttcatttccatgcgttcacgttgccgcttgtccttaaagttggtctcaatcatcttcatcatcttggacaccttctgctcgtacggtgagttaaccacggccacgcgctccagcgccgccttgggattctccggtcccagcttgggcttgtccttgtacggcagcgcccgctgaagggccttgggtatggtaagtgggcggaaaattttctccttgcgcacgatcgttgtgtacatactgtcgggctgggctgcattttgcacagccctctcccgcttgagttgaccgagcgtcttcatgccctgccattggctcttctggtccagcggcagcaggagtgaggacacaggagcatagaaccgaggcacttccacacggaaccaggtgcggcagaagactatgtcgctcagaaggatcttgtcctcaaatgtggcacgataagaaccttcgggtgtgtggtgagccttcttgatctgtccacgaattccagacaccgtt

SEQ ID NO: 14468 - DNA, 1936 bp, DROSOPHILA
agttacattttgacttcacctcgcaccgactctctatctatttctatacactagacatccgaattggcctccgaaaattattagctttctcgagctaacccagtgacaatcctccggagcagcggcaggaccttagatggtatcgccgcgcaagctggcatcgtcctacggcccaagagtatcccaatcggaaccgaacaatctgatggcagcgtcggcaaagagctgtgagagcctattctcggccagctcccgggagtcggccagcctgatctaccagcgcagcaagccgccaccgccccaacaacgtggcggcgtgaagggttccggcagtatgagctcccagaaccacagcgagatccatcagcgcgtcatgtccgcgaggaatctgcgcgccaagaccttccagaaccaactggccgatgcccaggcggagattgccaatctggcgcacgagaatcgcatgctgcgcacgcttcacaatcgccagtcatcggcgctgaataagtacgaggcccacaacgctgagctgcccaagttgctaagctcacatgccgaggagctgcgcatgtggcagaccaagtaccgcaaactgcaggctgcgaacaaggctctggagctaaagctcaagcagaaggaggaaatcatcctgacgctgagcgatcagaacaagcactacagtcagctcaacaaggataagaatctcgacgagcggcaaaagcttcaggagaagttaaaatccctggagcagcgtctggaggagaaggacaacgacatgaaactgatggcccgcaaggtgcagctggagtcgaagaacatccgccagcaactgctcaacgagcaaaggaagggcaaggaggtgatgctgaagctggagaaggccaagctggagatcagtggataccgcaagctggaggagtacactgtgaatcccctgtcctccggtcgacgaaccaaactgagtggcgtcaccgatgagccggacaagatcgacaagttggagaagtcaatggagatgctggacaaggccatcgagaagaacaaccagagcgaattcacggccttgacggatgtgatggagtcggaatcgttctacgatttcgaaaaggacagtgccgaagacaagagtggacccaacactccacctagtcaaatcgaacgacaggtgggcgggcgcggcggtaagcttatcctgccgcccgccacgaaccatgctaagatgggacagaaagccaatcggtccactttgagccaagtgctctcggcccagggaaagatttcggtatcttctggaaaatctgctaaatcacgcattgccgttgcagtgccgaagatggaaagtgtccaggttagcaagcgtcgcgaaccggagaccgtgtccagactggcttccgccgaaaccaagcccaagcagaagcctctggagtacgagtacgaggacgactatgagccggctggcgaagatggtgatgacgacgcctacggcatgatgagcaagatgtgcgagggagaggaaccacaggacaacagcgaagagaatgccaacgaaagcagtctattgaaatactccgcatacatggataacaagagtagcgagggcgatcccctagaggaatcaatggaggagtacgacggaactgatggtcaacaatcgcagggcagcgacgatgaggacattagtgtacgtgctccgcgtctgaaggagaacatgtccagcctgcgcaagcagatctcgaatgatttcaaggagcgcgagagcttcctgaagacgttctgtcgccaggccagtaatagcaatatgcgcgacgattccgcgtcgaagaagaggaacagcatcgcgaccggagcggcggccagtagccacatgaccggcagtcgcaagaatgcccttttggccgctctaaagacgatcgacgacaacaagagccaggactag

SEQ ID NO: 14469 - protein, 599 aa, DROSOPHILA
MVSPRKLASSYGPRVSQSEPNNLMAASAKSCESLFSASSRESASLIYQRSKPPPPQQRGGVKGSGSMSSQNHSEIHQRVMSARNLRAKTFQNQLADAQAEIANLAHENRMLRTLHNRQSSALNKYEAHNAELPKLLSSHAEELRMWQTKYRKLQAANKALELKLKQKEEIILTLSDQNKHYSQLNKDKNLDERQKLQEKLKSLEQRLEEKDNDMKLMARKVQLESKNIRQQLLNEQRKGKEVMLKLEKAKLEISGYRKLEEYTVNPLSSGRRTKLSGVTDEPDKIDKLEKSMEMLDKAIEKNNQSEFTALTDVMESESFYDFEKDSAEDKSGPNTPPSQIERQVGGRGGKLILPPATNHAKMGQKANRSTLSQVLSAQGKISVSSGKSAKSRIAVAVPKMESVQVSKRREPETVSRLASAETKPKQKPLEYEYEDDYEPAGEDGDDDAYGMMSKMCEGEEPQDNSEENANESSLLKYSAYMDNKSSEGDPLEESMEEYDGTDGQQSQGSDDEDISVRAPRLKENMSSLRKQISNDFKERESFLKTFCRQASNSNMRDDSASKKRNSIATGAAASSHMTGSRKNALLAALKTIDDNKSQD

SEQ ID NO: 14470 - DNA, 2701 bp, DROSOPHILA
gtcccactcgaacccggaccacatgcgcgatccacatagccattagcccacaaacactcaatccacacaatacacacaatccacactcgacttagtgttccaaatgcgcatcggatcagatcggataacgaaccccttagctgaaattcgactagcaaaatcaatacgttagtaacacttattcgtgcgttaagattagggagatcatctggtacataccttactttaaaaatcaaccaaaatgccgggtaattaatcaataaaatacatattattagttctaatctaagaggagtaaacaaaaacaaaacaaaaacaaaaggaaaacaaaaatacatcaacattatgaataaagaaaaataagcaacgtgagcaacgtaatatgggaaatctgtaactttggtgatctttttaaatgttattagtaaaagaaggcaaaacaaaatcaagtttaatgacgaatacaaatcaaaccagttttaaatgtgacttaaattacgacgtaaacgacatttttccacaacattatatgtgtaaacaagacgaaaaacaaaacaaaaaatgcaaaatgcgagtttgtgaaatatgcaatttaatgaaagttgatgatcttttcgatataattctgtcaagctgtcttaacaattagttataagcgcttcaatacaagaaaccatcaaacaaaaatcaacaaactcaattaagttatggaaaacacaattatatataacaacaaatcgtatatgttttatacaaattgtaattatttttatcgatttcgatttgattttttaaacccacgaaatgtacccatcccttgtaaaacaaaaacgattttagtttgcgtttaaaataagaaaacagcatatacaattcatttttgttcaataaaaatatatttaactaaacactcactcgtcttgccttttgagtctaggatgctttcagttttgaggaaatcatttccaaatggggtcacccatgctcatcgcgtgatcaggtgcaaatccaaccaggataaatgtgccaaaaacgctctgatcatcctggcgccgggagcggaggaaatggaatttaccatatccgccgatgttctacgaagaggaaaggtaaatgattcaataattcgaagatccccttgttatatcatttgcaattttagatccttgttaccgtggctggtttgcatgattgtgaaccggtgaagtgctcccgatctgtggtcatcgtgccggatacttcactggaagaggccgtgaccagaggtgactacgatgtggttgttcttcctggcggattagctggcaacaaggcgttgatgaactcgtctgccgttggcgatgtgctgcgttgccaggaatcaaagggcggcttgattgccgccatttgtgccgctcccacggcgctggccaagcacggaatcggcaaggggaaatccatcacttcgcacccggatatgaagccccagctgaaggaactttattggtaggtttgccagtattacgtgtttattaaattatcaggaaactctgactactcagttatatagacgacaagactgtggtccaggatggcaacataattacaagtcgtggtcctggcactacttttgacttcgccttgaagattaccgagcaactggtcggagctgaagttgccaaggaggtggccaaggcaatgctctggacttataaaccatgatgggaatcgaaggaaaagctgatcataagttacataaaaataaaaatatgaaacattaacgtataacgtatagttatttgcaaatagtaaaatctctactattttacaaccaatgatgctgaaaaaatcggtgtactgatttttatgtacaaagttccataactagaattttcctatatagaatgacctaggttattgtcaattaaaatatgaatatgtggaaattcatttcgtatctttttgatttccctattcagtaaacaactgtacctgtacctatttccgccataatattatcgaagtttcccacccaaattttatatcagagtttcccattttgcccgttggcgctttatgcacaccttaggtaagaccgtaataccgcctagtgagaccatgcgaggacttaagaataacaccaccataccgggcgattgcaaatgtattgaaataaaactaaaagaaatcgtatcaactgctagttcggcgaaactcgggaaatcggaaggttcaacttttggggcggtccgtgaatttttgcatttttctgtgttttggcggaaaacgaaaccgttattgagatatttgtgaatcgcaaactgtagatacaactttatagagtagttacagtcgagatgctagatatattcatttgaaaatatacgagataagatcgttttttgcgccgccgagtgcacgtgaatcgtttgttgttgttgcgcccgttgcacttgcagccgtaagcgtgtgtatgtgtgcgtccgttgcattgtgtgagtgtagacgggtcattaaatctgccgcttcttttgctgcttctactgctgctgttctttttgtttttgggtaaattgcacaagtgtaacggttttcaagaagtgcaacaaccaaagcaacagcagcagcaagaacaacaactaccgcagcacagccatgtaaagtgtgtgtaaccagaaacgcgaaaaaagtgcagttcattcaaactgcaaacgaaattgcc

SEQ ID NO: 14471 - DNA, 592 bp, DROSOPHILA
gtgcaaatccaaccaggataaatgtgccaaaaacgctctgatcatcctggcgccgggagcggaggaaatggaatttaccatatccgccgatgttctacgaagaggaaagatccttgttaccgtggctggtttgcatgattgtgaaccggtgaagtgctcccgatctgtggtcatcgtgccggatacttcactggaagaggccgtgaccagaggtgactacgatgtggttgttcttcctggcggattagctggcaacaaggcgttgatgaactcgtctgccgttggcgatgtgctgcgttgccaggaatcaaagggcggcttgattgccgccatttgtgccgctcccacggcgctggccaagcacggaatcggcaaggggaaatccatcacttcgcacccggatatgaagccccagctgaaggaactttattgttatatagacgacaagactgtggtccaggatggcaacataattacaagtcgtggtcctggcactacttttgacttcgccttgaagattaccgagcaactggtcggagctgaagttgccaaggaggtggccaaggcaatgctctggacttataaaccatga

SEQ ID NO: 14472 - protein, 174 aa, DROSOPHILA
MEFTISADVLRRGKILVTVAGLHDCEPVKCSRSVVIVPDTSLEEAVTRGDYDVVVLPGGLAGNKALMNSSAVGDVLRCQESKGGLIAAICAAPTALAKHGIGKGKSITSHPDMKPQLKELYCYIDDKTVVQDGNIITSRGPGTTFDFALKITEQLVGAEVAKEVAKAMLWTYKP

SEQ ID NO: 14473 - DNA, 32371 bp, DROSOPHILA
atttcagtaatcgattagaaaataaaatagtcataattaatttcgacagatccgtatgtggatcgagaattatacatcgctcctacatatatatacattgaatgcggcatgcaaattctattcgtgagtcatcaattcattgatgttgtggtttttgcgtttggttaaacttaagtcataattaattaacatacagtttaggtaaaagtatttaaagcaacttaaacttaaggttaagagttccctctctttcttctttatttcgcagagtgatttttgtaaagtgtttaaatgtaaaatcatatatcgatcataatttagttatcttccattatgggtatgaaatgtgaagcgagagtcacagtagcagtcacggcaacagtaacagtttacgagtgcgattaacgaacgagtaacggttttgtaaacctcaaaactttgctacattggtttttgtttcatttgtgattattatcataatatatcgatatcgatctctgtgtgatgcattgtgattgatcgctttctacttaggttaaagttgggatgggttctggaattggtttgggggattatgatgtacggttagggttgttattcttgcgttaaatatgcttaaagacttatattatatatttggtgtacttttttgagttttgtgttctgttttcatttgctgttttatcgctttgtttagtttagtttgtaactgtttgtatgtagtttatataataacttgtccatgggcatgcctgctgctacctgtccgatctgcggggatctacatctacagctacgtaaactaaatataatacagtttttgttttgtttttgttttgggggtcttggggttttgagggctacgccaactgtctgctattcaactctccaaacgactctgcgatccctttctccaaagtgttatacacggcacagtggttactcctattcctgccttcctgcctcatccattggtttatcaaaggtttgcgttatacgcttagatgggcgatatggagagtggtgctgaagctgtatcgggcatatattccttgaggagatcccgcagtcgtaggatttctctgccagctgccgatagatcgccttgaagggaaagttcccgctcccgaagtcgcttgatgtcgcgctgacaggtctgcaaaaataaatatatacaattagtaaaactcgcgatgggactatctaatttaattaagtttcacttatgtttgaatacctaccacattctgtctgagtagatccagcttgtcgcacttcaaacgtgtgacctcctggcgcagattctcgatcttcacgatcgtctcgttgctgggggaactacccattatggtggactggacaccatctaagcacagggagcacgccttggtggtggcctctgccgaactcatgctttctagcccagtatcactgtcaatgtaggtggctccgccgtccaagtgcgccatcattggatcgagatccacgctattcagactggaatcatcgctcgtttccgacatggtggccactgcgaccactccgttttgggcggcactcacagccgctgctaccacgcccccgccggttccattttgggggaggtgtccacctatagaattggtattgttgttgttcgcctggcgagaggtaatgtccggggaggaggaagtggactcgttcgatgacttcgacttggatgaggacttggaggccgtgcgactgcaggtctgtggaataagaaagaaattagtttccattttcaatattattgctatcaagacttacatttagattgggtgtctgcatttcgggatgggtctccttcttggaattcaatgtgcccagcttcgtgttcacactgaatttatccgtttgtccaggtccatgaccatttccggtgtccacgctctgtgagcgcaccctcatgattaaagccttcttcaccgtatcgataaagcgggagccggcattgccgccactaccactttctgctttcggggtctcgggtgtaggacttcctgccgacgtctgggaaagatcggttcccagaaagtcgcgagtcttctcccgcagttcctcgcataaattctggagcagagaggtcctggtgcgctgttccaactttgcaaacttctcagctttgtagcacgcattctcagcattgatcagcttggtcaagatgaactccttgaactcctgtcccttgcggaaaactgcgggattcggcagagtgggaccaaagaagggaacatcatccctggcggttacgctgaccttgtaccgggtatgtggtgtattcggctcaatgggctggaccacgatgaaagcgtgcagaaagtgactggcgatcatgtcgggtgagaatggagtgttagtctcctgaaaaacgatggccacaatgtcattgccaatgtgtcgcttcctctggagctgctgtggatcgccttcggtgtgcggcaatagtgtggatacatggaacatgatctctcgctccttgaagacctcatagacagctgtgtcgcccgtgtgaccattctgaatgtcaagcccacccctgtagcccttgtgatccttcagacgtatcctttgacccaagacatccaagaattcgtcgaaagctggtgatgtctgctggttaccgaaaagttcctcctcggtggtctgtccatatctttggtagagcactccaaacttgaagtgcgaaacgagaacatgctcgtcgtatacactgatgagttgcgaggccttggggcacaaaatcggcatgaaatgctcgactgtgatattttcgttcagtgtatgcgccatttttgccggacttggctgtggtaataggcatgataccggtagaagctcatgcatcgtaccagttctcaatctcatcaggattcgcatgtgctcctggttggctacattttccgttttaatagaaagcaaaatcggtcccaactgctcatccagtccaatcaaattcgagtgctccctggcggcatagaatctcctgtagcacttggccgtatcgtccgtctcgaactttgccatccaggtagtctgtggtagcagaggatttcctctcgcatcgtagccgcactcatgttcggtgccatccatccagtaaccaccgtgcagtggcagcaagatcatggggtacggtgctggtttggccagcgcctcctccagcaatctctgcgaggcgggaatggccgaaacgatcgatgagttggagctcaccgacgactgagattggtagtggtgtccgttggacagcagctggcatccagaggcgctgaccaccccactcagttgcggggaggcgggcgtcgagctgcaggcggagcccgagactgtggagctgctcgagtgattcatcgagtggcgcagtgttgcccgcgatcccgagtgctgcagcccaccgttgtgcggatgggcgtgactgtcgtggggtgagtgtggctggggcacgcgctcctcactcgcattactgccgcgatggtggttctgtaagtagaaaaaaaaaatggattataaataagtttaattcgttaaatggttttttaatcaaacttgaattcagtgtatacaaatttacaaatttaatatcacagacagcccaaagaaactacctttcaaaaatcccaatcttatgcctccataaatccaagtattgcagacaatgccacctaatccttggcggaaataaatataattttcccttgccattctctgcgagtacgaaactggcttgattgttcagcgggatagtgtgtcagagatccatgtgtggcactctgcacacaactggggcttgattatgtgtgagtgggtgctacagtggagcctcccacacgccgacgggcggaattagaggctctgcagcactgctgcattataatttcatgcaattatcgtcagtgaaacccgcccgcagcccgcgccccagcttcatatgcaaatggggcggcctcgagccatgtggatggattggataatggtagagtggtggtgcagggtggtgcagttggttcgtcggagtggtgcagagactgtcgatggctttgcaattttgttggcacaaactatttgcaaaggcaccaaacaaatatggtagtaggtggaaggggcgtggtcgtggattacgtgatggatttgcagagagggaaacttccacttccaatggctttgaatttttgataacattaagccaacattttcatttgacatgaacgaggctcctgctcccatttcctttacaattcctggcgccactcgaagcttttgtctggtcgacccccttttgaccccaacccccaccccctgcctcttaacccgctgccacctaaacaagcaagcatattaaaaagttttcttttatttgcaaacagtttttccgtttctgggattcttttgttgcactttggggctctggcctgcagccaaatgtggcacgtacccaaggggttaaagggagcgggctagggttcatcgatagttcgtgccttgatttaatagtctgccggctgccaattgcaactgcaactgatggctggaaataatgagccaaaggaagtaggaaaaaggcaggcagtggaggtacccacttgatagatgaaaataatgagccgagaaaggatgggaaatgcaaaatgcaactaaaaaagcaatacagtttggcaggaactgtgaggtcaccgcctctcacttctgcaatcgattgaaggttaaccgattcgattattcaaattcgcgttgtgtgccattcaagccgagtttccagccagttgactgcaccgctaatgaattgcattgtcagtcatttgggtgcatatccaatggattttgacatccatcgctctagcattcatttgtatctgtatctgtatctgttggtatctgtatcgtgtgaaccgaactatggtctaaaacaaaatatgcaaatgcagtttcctactgtaactccctctttgcaggcaaacaaaacgaatgtggcaattgaggaaaattaataaattttgttgtaaccctagacgttcatttggccgcggggcggggaattaaatgggaactggagctatgggactgttgcagatattgctaatagagtcggtcacgtcacacgcttagttggcttcatttgctaagggcggttggtcttttaatgtttgcctaaatggaaaatgggaaaactggtaaatggctgagggggaaacctcatccccaaaaatagatagttagttggataagctgtctgtggttgggtaaacaaaagaagtcagcgtacaagtgactcatctaataaggaatattgtagtctctctctccccatctctctaagtttttccttcagttaatttgtgaagatttccactttggcaattggttttggtttcagtttgacttgttttatgagatctaattaggaaaccatttgtgcggaggctgccgtagaagtattaagcacaagcagacaactacataaaccggaaaatgccaaagttaaatgtaataaagtggaaagcatgacgaatgtagaacttgtgcagaacaagaaactcgcttctgacaaatgatcattccgcttcccgccgaacaataatgacaatcataacgccgatgatgatgtttatgtgccgattccgaggaacttaagcggattacatacagccagttcgagtacacgagccacaagatgtggaaaagtgttacgagctcagagcagaaaagaacatatagaacactgaacaccgaacagaaatggaaccaaagtggcggagagctgaagtaggaactacagccatatggcaaactgaagaggggcacaaactgcacagagaattaaagttatgtcaaatgatgttctctctggacttgatctttaaaggctaacaagtttgtaataagccaaagaaaatgattctccaatttccttaatcagacatcgacattgaactaaacattttttctcactgtcgagtgtcatcatttcgaggttaatggggtagtggcatgtgaagagggacttgcaacgagtggaaagggtagcccctggcaaaatcttctcctgcattgaacaagcgatttgcataaggcgaagggcagcagttcctcttttggacacctccatatgtgcaaaaaatcctgcgacgtagccagagtcaacaaggcttgcttgttgtttttattgttgccgctcaagtgcaggcgggcgtcattaaaaatgtgcattttgcattcaacgccctcgtatttctcgcttttctcacaccctaaaaacgacaaaaaatgaaaacaaaatttaacaaaagcacaggaagcaggcccctaaaagagggttaaaaaacacaaggcgttgcgaagaagtgggtgtctgttattcgctgcagtgctttcaaaactgttaatattgtaatattatttctgttttagcctttgtgaatatcttatgcagttcacattgctcagctcagaaagtgtcacacatacaagctctccaactgattgatatatgtatgctgtctacgcacgtgagacaaatgtcgggagagctggagatagatgtgtatacggcgacaaatcccaatcccccagtgccccccccccccacactccccacatgatttattcgagtctccaaaggggggcgatgcaaaaacacaagccaaactcgagattgaagtgcttaaatcaaaatcgcataaatcacaaatgtcacaagtcaagagtgcgtgtcaaactgtgcatgtggggtaaggcaaggatttgagacttagacagtttgtgaaattaagatcataaagaatttccagctagtttttttttacaacagtagtaagcactaagatcacatgcttttacattcttctagcagaactttaacaataccgctatatcataaagacaaaaacacctaatgggttcagctccagctgcgacgcactttagaagccattgaaagtcgatctttcaacttgggattctccacacgtatgagtgattcgagctgagcacgattgttctgtttgaaacgctttcacaaacttaattaacatacactcatagtctttcttatcgctcaacagtgagcagaacaaaataagtgttaaaatggtaaaaaaaaagacttcacatatcataaaatgaaatataacgttcgtagaagttttgatcgactgcaatcgaaatgagatcatgtcgcgagtttgcaagaagtgtataaaaagtgagctcacccacggtttggaggcgtttttgtttggccaaaatcgcattggttcaactggttcattgatattcgtgttttgttcaacgattattgaaaaccaaacacggcctaaataaggcaatcattgagtgttgtggctacagtttggcgacattttcattagcggaacaaagcaaaaacgtaaaaaagttgtgtggcagaaagcgaaaggcagccaaaaatggattcaagattgccgtaaattatgcaagctacctgattgatttttaagatccactaattaatataaaataacaaacatcatttgctgcttcggtggtggcttaaaaatagatttttaattgcagctcgcagctggaagccacagttcggattcgagttgcatgtgaagtcacggtgtgtgtgacccaatttgtgcgcagtgaacccaacacccgcttcgaatatttcccttttgccagtacccatgcagcataaaattagctgcgacaattccaaggcagaatcaagagggccaagaagccagagccacaggcaaagctaaagccattccattcccacacgcccacgggaagcaatttccctcgatctgaggtaactcgaaaggtatgaggagcatgactccatgtcacggctttatgagcagcgaaaaagatggggggcaagttgtaaggggttggcgtaataagatattctgcgattcacacaaactgagctaaagccgtactgaaaataattgtgggtgtcatcaagtgatttttgggcggggctaataagcaagaagacaacgctattcaactcgaagtctctttgaagatataagtacttttctaaacttttttatctggtcttcaattaaattatccttaatagctatgctcaattttatgatataaattttctctagtttcactaatcacatgccctcgactgtacagtggctctcaaacaggcactgcagccttcctacgaatttcgtgagcttgcccaaccttcttctccctatttaaccctttcgcgcttgcgcattgaagctgctccgtttccactcgaatgcccaagactttgtgtgtaactttgcaaatttaaattacaaacggctgacaaaagttttgccgccagaccaaataccgagaccaagatggccaagccactcttcataaaaaaaaaaaaatgctccccctgtttttattatttttctccgcttgggtagtttttctcataaaataattgctcgtgtgatcgagactcgttgcctttcaacttgagttaccaactcctccccgtggagacttgtgaagtcaacgaagaggagttcttttgtctcacgagaattttggcagtcaagcgtgaaacatgaaagaatatgtacaacctgatgatgttcttcttggcaaacccttcctagaatcatctgaaatgctataaattaccaggccccaaagttgtactcccatttggcttcctaggaagttttctgcatgttttcaggcagttgtcaaagctttaaagaggaaacacgatatgaacgtttcctgcccgtaattagtgtgaaaatgtgtgttatccaagccgtaggtaaactcaattccctgcctcatatcaaatattgattaaacaagccaaaactggagcataacccagacgtatataacgcattgtttacttggccaaaacatgcgaccaacgaggttaacaaattgaacgtgcatattgaatatgtgaaggcagtttcgattggttgtggttcaaaatgtcagctgcagttgcaaaatgacaggagaaaaaaaagagagaaaaggcttggaactttcgagcaagtagaatggctcttcagtcggaatgcgaaaggggagggttgtcaatttaacagggctcagaaaaagtttttaatagttaggccagcataaaaactgaatataaatatgacgcttaaaactttttaatttggttaacttttatagaacagatgcctagatatttctactatgaatcctcactctaggttgatccactctcgacgtatttttggtgtatttgtcagcgggtttctagatgatttatggcagtggatctgacatttctctgcttgatttttgctcgaaaaaagttgcctgaccaccgaagccgatgcgttggcgtttttttggcatcggcaacattcactttttacttggcatatctgtatctacatatgcatatgtatgtttggtttttatttcgatttttttttttttttgagagagtagtactgcccaaaaactgggtcaacgcatgtcgccagcgcgatttaacactcgctcatcgttaatcttcattcatttgcatgtgcttcactgcattcgttgttcattattcattattcggggcttgcagccaggctctcaaactgtaactgcatccaataagtggcaattgccgcaaattgcttcctcagctgctgttgcttatttatagcaaatcttttgacgccaagtgagtgcccacaagtgcatttaccaaccccttcgacccctcgcagtccatcgcttatgagtccaatctcatttgccgcccgtctgcatacatacgttgacttatttatgatcgcacacgagactcgaatcgtgggggatttctttctttttttttggatgaaaatgaaacagcagacgccagatggaaatcagcgaaaggcccataaaactattctcagtacccgactccgttgattgtttaccccgaaagagtcaaagcgacttaatggctgactaaggagtaatggaaaagcctgaatcatctgtgttttccattgcagcatcagccattttccgattgcaattgcagatgaacattttaatgagcagttttccaacatatacaattttggagtttgaagagttaagaaatagttgcatctaaaatacagtcaagcagtaatgttcaaaaaacaagttttcaatcgaggctcaaaaacccgaataatttcatcattcactaaagtaattaaattcagtataattatactattaatacaagaataaatatatttcatgcaactgccaaatttatctgaactcccttgatttctttatgctcatcgccaattcaatcaccttacttttttgttttacaacgtgtctggcatagctcacaagtcgaaaacaaaactccaactgcagtctggcatataaatcaataaattagcagtccataaacttaataagccagataaataacaaaaccattgccacaacaaaaagttcagcacgcaatgcagccgaaattcattaaaaaaaatatatgaaatataaatgtgtgaaaggagcgaaggagacgagacattccacttttgtaatcaatcattgacatcctgcagagtgcatttcgaagttggagaatcattggccaattgcatgttgggcgccaattaaaaaaaattccgaaatggccaacggcggctagaaaacaacaacgccaacaatggggagtcatgcaagtggctaaattggccgcaaagtgaaatgcaaaacaaaaaataaaagccaggcctcaaactcagagttgagcaatgatcggtaacaatagaaaaaaaaaaaacagcgagcagtgaccattggtcagcagattcgagtaaagccaaagagttggccaaatccaaaaccaaatccacatccaagtccccatgtacatgtgcaatgcatttaacactttcaacacagccacaatcgctttggtgattcactcggcgtcaggtttttgtttatgctttgtttatttatttactcttttttatttttgggtgcgttacagtttgtcagccactgtgaaactttctttttacgaaatatttatgaagaaattcacacagcgagaaaaacagacatacggataataaaaacaagtgtggggggcggctggtttagtcgaacgctcgtttgtgggcgtgttaaccacttttagagccctttcccagctgattgcctggggggcaacgggatttcggtctctgcctaatgaatttatcttttcctctttattttttaacacaccacattgcgagcaatttcatttagaaactttctttcccagcaacatcatcatcaggcagacaaaaaaccggaacaaaatctcggaattatcttgagggcatatcaactgtttgtttgctggtatgtctacgtcgaacgctttttattgtttttattattattattattcattattatttagttttgagtttttctgaagtttgacacgcacgcgacgctgtctaaaaccttggctaagtctttgggttatttgtttctttcccgtcttagccgaatttgaattgatttggtttctttgttttggccggcaaaaaagaaccagaaaacaacgagtctctacgcctcaaattcaattaacaaaagccataaaaaagtgacggaaaaacaaatgagatttaattattaattgaaccagagtcaaggtttctctgcgtcaagtaatttacatacagaggcatcgaaacatatgaatatccacatagtttttgtttataaggcgaatgaggccaagtgggctgatccgtcagatgattatagtttttggcagcaaatcaatctgaggcgtgtggacacgaagtgcgggtgtctgatggcaaatggtgatttttagtgggggaaatgctcttgagaattgtgtaaacaaaagaacaaggttgcgaatatgttggggatatttttgaaactgaagaggaccatgatatctcattcaagtttgaagttctccaaatgcggttaacccttatcaatttgttgggtacttgtggatttccaataaaatttattcttattatttattcgaatttaataaaccctttaattatatatattttatagaaatcgtaaaatgtagtaccgttaatattcacacctttttaaatcatttctaaacacacctccgcatttatcttgcgctccagtcatcagttcattgaaccaaataaagtaaaacctacggcaatgcgacaatcccatttgtcatctctggctgtcggttgcctctggggtaaacccggtgaccaggtcgcccaccaatctgccagatacccacccttttaccatcttctgtgacagtttacaggcgtcataaaaaaaaaacaagaacagaaaaaagcgaagagaaatgaactttttcgcacttgatggccattaatttcttatgtgttggcttgtttttttaatctttttgtggcgtgctccgagttcatgtggggcagactttattctgctgtaactgttgtgaactttgacatggatttttggctcgcgtgacccgagaaatggagagggtacccatatgctgcactaagtgaattgcaaatgtccaataaggctaatggcaaaagctctcgatcttggcaaaaaaaacttgtttttaagccgcatgaatatgtcaaatgactgatccgcttatgagaagccttggctgcgaatgtatctgagtatcttgtatctgaatctgcaatgctcgagtgagctttatcagctgcctgcgttttctttttttttctttttttttcaatttctgtgtcagctaatttccatggcattgttggctgaaataacaaataacaagcagcaaataacatttacatgggcacactgaacaaacgcttttcacacacccatgcagtcagattttcaacttttcttgccagcgaaagttggcaataacaatgcttttccggcatgccagtaggaaaagagatagccatagattgacagctggcagcagagtgagatggatacacgctaagaaagtatggagccaaactagttatatctcctaacaaaataaagaaaagctcttgatgagattttaggcagacctctcgatgtgcgtaatcacagacaaacattcaattcaaaacaccctttaatttgcctgcttcatatgcgaatttattcacgaaaaaagagtttctatcggaggagtagtaggaactattacaaggctgttgcgagtgtttttttttttttttgtatgtgtttcggcataaattaagcctaaggtcgttgcttgccctgttgaaaacaacagttagacagtgaaacggcacaaaagcagttaagaacacaatgccagcacataatctacacatcacacatagaagttaatcgccagtagatctctttggatggtgctgtaaaaaccagacggaatcgatggatgaaggtgggaaacaaagtcttatatcactcccagttacctgttagccatttcagctctgttccctgatcttgttctcttttgttcttcctttattttcttgttggcatgctaatgatcttcgatctcaagtcactttatttaaacacgccccattcataaataatttgccgctaattctcataattcttgcccagtaattttaccttttcgccttcttctttctgcagcttaatcaatgtaaacaatgttttccgcttgtcatttttcctccaaagttgttgctttttgaggggcacacaaaaactgaaagttgagctggccaaaccagctaactatcgaagcctaggcttgggatcaagctttggcttgaattagacgctttgtttaattccaaacactcactccatgcaactctagaaggtctcaagcaagttctgtggaaaaattctgctcgtcagggtatcaaatgatcaaaagtgtacagaaagtaagccaaggcgaagagttttaagcagaagtataatgattgttattcgagttcaacaaaatcagtcaagtacactacaagatggaatttgaaaatatttacgttttaatttgtactgttactaatttattaaaaactggaatgaaaacatactccatttcagaaggtgtattaattttatgtttatatataaaatgctggcttccccttaaccgggcaaccaaaaacccaattaatctcactctcttcgccaacttgaccctaatttgcttaacccccatttcgacgattgtcccgcttttggccagaagcgttttcgataatggccaaaatcggctgtgactggaatgctaaacttttcggggtgcaattacaattatcaacagctagaaacgacatttaattaggctaagaaggtttttatttgctttggcacattattaacccattaatggctcacagcgcttaggtcatcacaattagccaagttcatagaggcgttgggggatttttcctgctggaaataatttgattacagtgagtgcagcgatgacctcagcgtgtaatggaaaacccattaaaagggcttttatttttctttttcgcattatttacctgactttgcacctgttttgtgccaacgcgtgccaagtgaaagggagagagacagagatagagaagtttgaccgcaaagtataaaatttcaaattggcagctgccgccagcagctgacacctaaatttaggccaccaaaaaaggcaataattaataaaaaataaaccaaagccaatgtagcgaagaagaggaagtaaaagaagaaaaataaatccatttggaccggaagttccagcgaaactgagaataaaacaaaaccacagaaagccgaaaggcgagcataatgcatccttccgtcttggcttcctttcaacttcctctctggtccctctgtccctcttccctgtccagctgacagggatgattgagctcaccgcgtttcctttacacagggcgaaaaagttatggaaactcaaggattttttcattgcccacgaaagcaaaatctgttattctttgaaaatgcacacttactacttttatatacctactttacttttagttctttctgaaaacgactttaactacattttttccagtgcacgacgaatggacattcactggctctcggcatgacgtcaacaaactcattttctgggtcactctccgacacggacaacaatagttttattgacattttagcctgtcgaatgggggcatgggggtaaccctaaagacagagttgtgccacaatcgaattaatgattggttatgttccccaactacccctacatttatttacccatcccctgacgatgacaatgtgtgtttataagcggcatttattattttatgacaatgacgggctgaaagtcaactgatataagccaggaaaaggtggacgaggaggcgtgacagagccacgtgtcacaatttccagaacagttgggttcccaaaagtggagcaaacaaattgcgtgcgagtagtaatcataaatctcaccactcgaggagatttaaaattcattacagtttgacaagcacaagcgtagagcaactacagtttgcagttctgcaggttggggacagtggaaacccgcttactgtcaaccggcatcgtgccgtctccctcgtctaaagtgctggccaggccaagagcttgccataaattttaagccattgctagacatttttattaatgacgcaacgcaacgcagaattccagtcttatgcaaacaagtggcaagcggccaaagagtcgactaccaagacttgatttccttgtgcacggctagaaaaaatggaatcatttggagtttttccaaattgaactgagaagtttaatgaatagtgatcgtacaaattaaaaatacttaatatttaaagtagtttatctcttagggaactattggtgctactggtgaatctaggttactctagattcaagtacgatttttttcactgtgccgctcctttcccttctatttcctcctctcgactaaatttgttgtcttgtctggtggcagtcgtcgtctcaatctcaattgcagcctctagaacccaacttgcataattgcaaatgcaggcagagacacaacaacaacaaagtcgaggaaatccacaatagcaacaaaaagtggccattgcagttagccggggcttaccgttagccaggccaagtcgagagggaaaaacaacgaaattactgcagtagccgccgcagaggcttttccagcattttcccataatcaaagagtaacaaagttgcgtctaatgcaataaaatttaaggctcttttgtacaatggcagagaatagtggggagatagaccccctccccatctttcagacattgtgttactattataattatttgccaggccataaattatgggaacccatggcggcggacagggttgccacatcgcttaattacccaccgagctccacatgaaatgtgcgagtttttctcgggcactacagtttccccttttgaagcccccactgtaagctaatgaaacattttgccaggggagttcattaaacttgtctcataaagaaatcattgtgatgataccttgatgatgatatccaacgaaagctgcgtgagatgaagacattaaccatagtgtcgggcgatttggcgaaactcgcgtggttttgtctcaaaatgttataaaattcaaagctcaaaaagtcatctatcatatttgaaaaaaaaaaattcagttcaatcctcatatatcatatggaggaaataagctacaaatcttttcttacatctttgtctctggaatcaaaatgaccttgtaagtcaatgcctatgtatttatatttaaattaaatgttaatcgcttgacatgtaaatcaagcgattttccccagctccattaactcgctgactaattaatcaacatttgcttgattgcttaattgcgagctctaaacgctgagcatgaaaatgaaactgagacagatgagtatgagcgtctgagacgagtagtagagcaaacaattgccctaatgtgtgggcaaacaatctcaaaatggcccaaaacgctagatggatggcccaaaagtaatttccgttttggcctgatcaatggaaatgtcaacggatgtcgcatgtaattaaaacttgtcccagaagttgagctccatttgagttgcgagtttttcccacacgctacggatatcaatgcggatgcgtatacccaagggttatggccttttctaccataccattttcttgacagtaccaacggcattcatctggggaaataaagtcgaaaacttgtcagcgctgagacacatatcgattctgtctcggaaaagttctcccacagttttcaacgctagtgaaagtaaccaaaagttacagagttacagggaaaggaggggaagaaaatgtagagactctgggtcttatggctaattgagcgctacacctgtctcaggccaaagccgccaggtgaacgattattcgctgcctttggttcctaagagtgagccgatggcctaagccgcttaagagatttcattgtacacgcacagaaaaactattgtgtttttttttttaatattgccttgctgctctgtttttgtttgtatagaacgaggaaattaagacaaaaataaataatgtctagtaatcagggttttcgtaatataaataaattttgtgttactcaagtttctctctgtgtacagtgaaacctgcctaagcctgaccagaacggcttagctcccaactataaatccattgcggggaaagggaacgtgccacaaaatgccataaatgcctcaccaattacatttggcgaattaaaaatatgccgagataatataaaacccgtaccaggcgctctattgctttatcattctcttactaatcggatttagctcataattcatgagcattaaaattgcaaactcgctgtttttgacccatctccaccttttttttccgcgatcccattcatcatgtgcgttttttttttcggtactaacctgcaaagaaaaaagaggggaaaattttggttaggtttttgaaagtgagcaaaaaaacatttgaaaagggcagctgaaacgccccttcctaagttctgaaaaaaaaatattttttcatttccttttctccccttaaataaaactgcactgccagaggttggtttttattacagcgtgggaatcgagtcaaaaaatcgaggctaaaaacggtcagcgatttatgcgaaatgaatctttgatgcgcaaactgctggcaggcactgttaaaaggagatacttagatagataggaaaactgggtcgccgcaaggatttttcacttgctcaactgctactgatttgtaatgcaaatgaggcaaaagtcggtgggtaactagtccgaaaggataaacatccttgtgcaggcaggaaaacaaaaaggaaaaaaacatgaggaggcgtacgcagaaagagacagagtagcagagtacacttcatgggaaacaattgttccttgaagaggagcaggtgcagtcaagaacactgcactaaagccgggggagaagccaaaataataagtagacagctgttcagggtatgagatactgcaggcgaactcgagtggttttgcctcaccagaaaccgaaaaaaaaagaaaaaacgtacagaaagtaaaggaacatgccggaaaatacagcgaaacaaattgaaagcggatgtgggatgcgtgcaggactcacaagttgtaagagatatggatacaaagtgggttctggaacggatctggtcagctaacaggcttcacttacccgttgccaaaggagcaacatttgcaaaccacaacgaaacttcgttcaggaagtgcaactaatgaggtggccaagcccacgaaccagggataataaactgatgccatgatgggaaaacgttgtatcacagtaactccttgcactgtgcgaaattaaggtcgtttctattgcaaattccatacagacaatactcctatttcttggcttaggttaagtctcacagccatttgccaccagagggtgacctaagccaactcatgacctaacccaagctcgtacacaagtaaaccattggaaatcccttcaacaaatgatgatgatcatttgcaaaccctgccaaatgtgcgataaagtgggagtggtggctgcaagtagatagggaaatgttcgtgtttggacaacatgcttcattggaaatgtaacatgtgtaggcaccaatggactctcatcgttctgtcctccaacattcgcattctctgcatttggagcattggcaaaggattacgcaaacggcaccttggtccccctggagccccctctttcgaacaccctgcggacgcccctttctgccgcattcaagcctgaaattgttcgcatggcgaatgcctcgttgcatttaaatattaataaacatggcgtgccaagctgagagcgccgaatgccgcgtcccaaatgcgagcacagcttttttgctgggcatacatacgtgacttccatgagtcaaccaaaccggaggagtcagcctcccgctcgactccttgccccccttccccctcccataagtgctctgaactttggccaaaaaaatcgttgccgagtcaggcaacgaaaaatattcgccagtgccgcgttttccctggagccgctaaaggcgcaccttttttgctgccgcccatttaccactatacagccagcatatagaccccccccccccccttaggttatagccaacatctatccactaaccaccatctccccacccattcattccattcacacagttcttgtttcgcctcgttttgcggcttgtggattgtggcttgtttccatgtcataagcgagttgcctacatattaaatcatcatagagacccggcaaaaactgaaaacagcaaaagggttgagttggaggttcgatggtgggcagtgccccccctatatcattcttcgtttggtaacccctcttttgggacaggcgccggctggaaattacaataagcacatgtcgaaacgcccaaatgcaaaaatagcagcgacaacaaccagaattagccatgtcgggactaaaagaacagcaaaaggcattcaggaatgactacacactgcgaaagttgaaagttaacagcgcatttgaatgctcttaagtttgtatgaaaggcatgtccttaataaataacatttatattcaatctgaagattacgcaggcctcacccaaacactcttataaacaatttccacctggatatcgtctcataaatcaaccggcaaacatacccatatttatcatttaaagggtatacacatactatcatttcccccttttaaaaataactaattttaagagctcctcttaacatttccgttagggcacaaccgcggccaaaaccgacttggcaaccgtgccggcctttgtctatccgatatgacatcatgaccagctcaggcggcgatctgttgagccaaatgaaaggagacaaagacagcagggcaaaataaaaaaatataaaaagaccaaaaacagaagactgaccatttgacggctcgtttgagttggtcgaaggagctgcgcatttcccccgccacaaatcatcaacatcgtcagctgctggaaatttataggcagcgcgacagggaaaacaattggccaccaaacgatcgaagttgacatttaaatgttttataataaatgtcatttgacagctgacagaatggccaaggaagcgagggctttcacctggcgagctcctgagtttggccatgtaaggactggtttccttaattttcttttttctttcggttggctgctgtggttcagggaattgcgcaatctgcagaggaagctctttcaacccgcttcgaattttttttcgtttttacaactgcctcatttgctttatgtttacagcccatttgacctttagttcttgttgccgtctgttgttgttaagtgttaaagcgcgtcgagcaaacaagaacatataattttgtttacggtttcgggccttgttctgtttttatttggctgtggctaataatcttgtcaaatgaagtgacactagtttggttattacccccccaaaaataatctgatttcgggaggtgtgtctccactttgtcggcaacgaaaatcaatacttttatcatatgcaaatagacgaacaaaaccaatttggcccagcttttcgcttatctaatgtctgaaattctaatatttatttacgaggggtgacgtggaaaattttctggagcattgcatcgattatattgtgggttaaatgcattcaaactgagttccaaatcagcagtcataaaatgaaactgaacgtaaataaatgataagaccggcagaagggaaatcaacacaaattttaatgttctatattttttttattaaatagagcaaggcttcttcaaaattgcaatgtaattaaattagggcaacaaagtgcacagatcttttaaagtagtacaatttttctcctctgtacataactgcctcattaatttgcaaaactgtttgcaacgccatttcgacgtgaccagcctcacattcttaaaaaatatgtacatatatatgtatacaaacgatcgtaaataaattgaaattgtcgtacctggcgctggttttcagatgtcccccataaacatttcagaaaatatactttttacgagccaaacaaaaaaaagtcaaccataaacaattaactaaaaataaagaaaacccaagtaagagtcagaaactgaagcgtgtggcatgcagtaatgaggatttacgaaaggcggtgaccatagggctgtggatcgcgatcccgaacgtgacatcagcacatggctcgaaacacccgggaaattcaggtaggagaataaaaacctcggagcccatttcgtggaaggctaaacattctggaaggaggcaacgagacgagagacgcctgtcattaagtggcaggcgccagggacaggaaactgaattagtgccacctacgcgctgctgccacgcccacagcgcccacgcgtgtcctcctccgcaggatgtaaattgacttgactgcagcgcaaaaaaaaaaacgagaaaataaaaaaaagggaaaattgggaagagaaaaaatccatagcaaagttagctcaaagccaatttgcggcaattaaagatacattcgtatctgtgtatctttgtatctgtgcgacagcgtgtgcgaacgcaaaattggctgtccattagcaaaacgttgattttgtgttattttactcaatttacttgccattgacatttgaacttgggtggctttgattaaaatagaccaaagagagtgtgtgaatagaaatagcaacagaaatcacaaaagatttattgaaattagtcaaatacaatgccgagaaccaggaaagtgtatagatagtttgtatctatagtattggttccgaatttatgggacattgctgggcaatttattggttcttgggtgaatgactcaagaagcggctattggtcttttgatttcgttcattatttgatagttttccgagtgactcaactcacgactctgcctgtttcgattaggtaaaacacaatgtctagactgtcagaccgagcatgaaggataactaaggtttcaatttacagtccatatcaacaagacttcgttttctaagctattttagtgatgcactagaagaaaagtatgcatcagtctacatatcataggaattaacttgcccagtaaatacaatttaagcatagaaatacaaatgccacacatatgccatataaaaacttgaatttcttttggcaatccaattgtttttttttttcagtgattttcgcaactgaaaccttagtgcacccaaaggccattcgggtgggtggtttcaatcgcgatcgggtgactttgcgagtgttattgtgacgggtccgcaaaactgctgcttagacacaccttgcacacgaatttgccgcaaacaatgacgccagcaatacctggtaattagccacgtttgacttttcgttgagcaacaaacaatgcgaagtaaagcagcagaaaaatttttattttcaaatggtgcctttcgaatggtaagtgaataaaaattgttaaaatgatcaaaaaccggttttttcccccacagccacatgtccgtcaagagttgtgctaattgacctctgaaaattgaatctgcggtcggttttccaatccaatctcttggctagttatctgaaattgattttgattttgttttgcttctctttgcctcgctcctaattaaaatgaaagttttgcgaggcaaagtgaaattgttgcaaaaagtataatagagtggccagtggcttgaatgattgattcagaaaatatccgagccaattggcattgcaattccagcaattgcaaattgtcatagaaagcattcgagtcagtcagcgcgagtcgacaggcaaattgaaataattgccaacgcagagtgagataaatttcccgaagcgaatttgaaaaaaatgtatcagcagaaatctagctgagaaccaattatagaatttgaaagtgataaatgtcggccaaagaaagtgtctttgaaattctctgggagaaaagaatgctagaagattttcaagcgtcttaaacatccgttggtaaagcctataatgacatagcttatatttataaacaaaaacttaaccaagtatgaacagctttgattgtgcatagttctataattatatcctgactaatggcaaggcaaatcaaagcttaaattattattctttttctacatattggcagtaattacacactttgattgttgtattgttccagctcagctcagctgtctacagtttgacagccactatgtgaattatgattacataagcgggcaccgtcaacagctcgtttgaacggcaaatagctaactaaagccaaataaacttgttcgtttaacacgagaactgtgaaatcaactacgggtaaaaattgtttgtaaataaaactcgtttaccacggaaaaaaacaaaaaagtggtaaagaaacctgtacttagctaacatgtaaatttttaatggcacaagtttttcattaaacacatatctaccttttaaatggtgaagtaatgaagaaaaaaaaaaataaataaaagcttggcatgcgtaaagtggtgatggttatatatggataaagttaatgcaaattgtgcaagtgaaaaagttatgttactttgtctaatgcagaataatctctatgagctataaatctataaatctcttttacttaaatttgtttgaatattaattggtagcagataaaacaaaacaaacaagagatggatatttgaaactgccatttgcccccgtattcaacacataaatcagttggcccatgtacagcgaacgtcatgaccatatgctgaaccaattccgattcccacttgcatttcaactgcgacgacagacgaagactcgagaggccctctgaaatcgaagtggaaggggagtggcagtaaaatgaagcgacctggagcaaaacacttgcagctgttcccccgatccactgcggtcgcattcgggtactttacagccaccactggcaccatcagaaccgtcagttagcagctggtatgaaagcttttctgggtcaccaacgcatcgaaaacgaacaaaaagaaaaaaaaaccaaacaaatgctgctgcttatggcaacttttcacttctctttcccggcaaaacaaagacaacaaagcgtggcaagaagacaacagcgcaaaatgattctccagccatctcatctcggccagttggggataagcatctcgctttggctccacggcaggcatcaaatgcagcatgggcccgcatatctcggctttgccatctaggcccggcgaacatggcgtatgcgcaatatggcccacaaagcggacgcaacgaaagagccacgaagatgggataccctttttgctgctctcatgcgaaataaagatataatacattttggtttactgttctaatgacaagaagctaaaccattttacatgttgtgtgcatgatattcatatatgaaagtacaaataccctttacttagaagacgtattcaacaaaatggcaaacttgagcgtgcaatgccttagaggttcttctttgaagctgtgcctgccatgattatgatatacataaatctccggctcatagagagatgcagggaaatggagaacgtgtggaaagttcaaagaccgccagttggctaatagatttcatcgcagagttctcgacggccaaatcgccgttgctttaaaaattgaaattcctcggtcgatggatgaacggcagtgtgtgtgtgtgcgtgtgtgtgtgacccaaattgctttttagactctgtcgccaattaacgaaacagttgcagttagccaaatgtatctaatcatgacaaattacattgtgcaaataatcgaatcgggagacggcgaacgaagcaggcgccgccaattatgttaattgatagtaaaagtcaagtcgcgatctcaagactcgaactcaagctcagattgcgttcgcatctgtatctccagctaattaaaagcgaactccaaatgcaaaatgttgtaattagtttgtcaacaaacagacgcgacaaggtttccacttcgggccgtggaatttcgtttcgcttttgcccgcacttttggaaaatccgagcctactggcgtctgttggctcagctgctgcaatttaggccaagcgaggggaagggagggaagtgcggtgtggaggagcggcatgtgctaaatttgccaatgtttaaacaaaacttagagccagataacagatatgcaaatacttgccttaaacggagagacaaggaatgcgtataaataaaagtaatataaacgaatgcgatcaagaggagtacaaacaccggggggttcgaataaagttgagaaagttcgtatttactgatcgagataattgtactcttacctgatcaaatgcaacttattggcaggtaaattaagtaataagataagattttctgcatgtcaattatacaattatttaagaatattcttaaaaaaataagtagtactattttaagagctcaagaagtttctattttggcccaattttaatttgtatatttttacaagaccattttttcagccacaaaaaccgcaaccactggccacaaaattgatctgccgtatataatttgagttctacttgcatttttcactcgctggcagagtcgtgtcaaaatgtcaggcaatataaatggcctccagtttacggagtaccatgtggtcataaatcgagccatctagccagcctgcctgctccactgtgccaagctccactgtttgtacttttttaattcggtttttctgtttgcttggttctatttcgaatggctgcctcgtgtattattcttttttttatacgttttcaatttgggtcaataacatttggcaacttcagtgcgtcgccaacaagaaacggcgagaaaaaaggcgccaagttcgccgatcggaggccaaaacgaacatacaatggttgccaaagttaattgcaataaaatcgcaacaatggcaactatttttcattaatttcaaattgaaatgagcgcgagtaattttcacaaatttgccattaaaaaaaacgtttttcgtttgagctaagccgcttctatagaaacgatttgttttgtttagtctgggaaacaaataaagcgaaagcgattaaaatcagtgtgtgtgtgtgtgtgtgtataaacattcacatatcgatatagtttgcatatagaaaacaaagtgaaaatctgggcgacataataaaggtattaacagaatattaaatccgaatatctgggcttatttatgactgtctataatgaaaaaagaaacaacttttacttttgcttgaggtgggggcaaacaaaagatatagcggcacaaaggctgacagattcttttgagtgaaatttttggttgaaaaatttcataatttcgagctgttaaaaggtgtgggcctgtggcatatagtatatatttatagtccagaaccgatttcgccatataaccactttatttgtcaacatttgacgtcgactgtcgcaattttgtcagctttcaatttgtcaagattcttttttagatggtggaagtgtgtctctgatggccctcgaaaaaagaaatataaaccaagcagctgccccaaagtgttttcgcgcacaaacacgaaaattgtttaatcattaaagaaaagatacacaaataatgtgcgaccttatctacagtttaaatttgtatatataaataaagaagaatgataaaaatgtgtttcttctttatttcgggcaaataaaagcagacgaagacctccaaaatgatatcttatcttacagcagaaacagataaagatatacactgtggaaaggtgtggccaagatagcccactgaaaactgtgttaaggtagctaataagccagtgtcaatatttggccaaagcttccatttctgtaaccgcaaatgcacagaattgactttattgtctccccccaaaaagcaattttatattttcatttttatttactcatttttttttttgttatttgtgattgcttttaccgctgccatcagcagcaggtacaacaacaaaaacaatgctggcaagtcaatgtcgtcaacacaacttttaacattacacaataacagcagcagcaacagaaaccaaaacaacaattgctggctaggtttttcatgctttttaatgccgcattgtcatcacatttgttgccattacttggatatatgtatagtatgcatatatgtacatatggccatccatataagccattgtaaatgcagagccaacaattgctgccagcgcgaatgggttaaaaagggggggcgatagaaatggagaaacacgtgtggggagcctaggaataaatgaaactggtaacgctttggggtaaaatgttatgccaaattatagtaatgggtgtagaccctttacattcatgggcgacaatagcttatcataacgaaacagtcaatagcggcgatgcagtaatgccatttcttatgttataacattacttgttatattttcaaacacattttcctaatcatatattagttacctaatctattcgctatttatcacgcattgtagaccgtttttccaattatacccaactgtaaacagcaagcaatctatttctgtatatttttcttaccataacaagatcttcaactgatacctacaacacataccctgaacaacagttcttggaaggccatatccctatcgatagctactttctctgctcctcttgtgtgtttgtttaccattcattgatccatcagttgccgagtcttatctggtatataggatctcaggcactacctgcactaccttatcggtttctcttttctcctactgttagggcatttgcagtatcgtgtgggttatcctctgtctggtgttcccgtactcgattttaccgccttcttcctgcttttctccctcttgtgtgggcattgttgtctgcttttaatcagtctgaggcatggcataatcatcatcatcgttctcctgccaacatcgtcattattgtcaaagagaatcacacataatttttttttttttaaattttgcttcatttcttttttgcaaaatgcaaaatggatatccggtggtggtcgttcccagaaggaagtacgcggtggctttagcaattgactaactgaacgattgactaaatgacgctataccacgggccatgaatcactacagaaaagtaaaaaataagcgagcgcagacagaaaaggagtcttttcattagcagttctctgcccctctcatgcatactccttttttttacccattaatcgtgggccattatgcaagacactcgcctccagctcaactgcaatccatatgcattatatatatatatacatatacatatgtggtatatagtacatatagagggtagtgggggatttatgaggtataggagtcgcctgcacctctgcaccgatcgttagttacatgctggccatttaagggcagacagtcttcaagtggcgacaaaaagcgaaagcgtttccgagagaccttgaggcggtttcttcaactcgttctcggtttcagaattgtccaagccccttcccctgtacagtatcttgtatcattgtacgagtatcttgaagtgcacacgcagcaggaggttatgggtgggagaaaaacgcaggtctctaaacatttcaagtggtaccctctattcagaattagccggggaaaccttgacatcaaacgcagcgagaaatttccccagctgatatgtagccatcgaaagtatctggcagatacacaaagggatagcacatgtggaatgcttacgaaatcgaaagagggagatacaaatgtatctgctaagcaagcagcgaaagtttgcggctttttgtattcaacatcatcatctgtatcatcagcagactgaatggggcctgaaagagaatttttgctcggatacatgtgcacagaaaaccaaactgtcgccacctttcattcagttcttgggtaagaatttaaatgtggaatatgtatgaacttgggtcatgcatttattattacactttcgattaaactgcattttgtttttagtgtatcgaaaatctaaaacgaacaggctaaaaaaaagaaatgtacaaggtggcgataacaattttgggaattggggaattcgaatggagaacggggctaaaaacctcaattggagcgtgcgatctatctgtgtgtttggcgaaagttgtgcaagtcaaaagtatcttcgagatacatttgctgttacagagagaggggaagagaagcttggcgtagaagtaaaagtgcgtaggtaaaagcttcgagcggagaatgcggctaatgggcataatgatgatgaatgcaatcacaatctcaatcacaatcaacaacccaatcatcgtcatcataatgatgagtccctagacctcgtaccaaaaacttgattccgctttcgctgtggcgacggctgttgagtgatttatacgaaatgtgtcaactccggctgtctcttgtatctctcttcttctcatcgttttctagtcgattttccaatcgaccaacaaattgcctccgaagattcttgactttctaggtagtccggcaacaaattgcgttcactgtcttgcgacataaaaattacaaagcatcattcaacatgtgtgttatcagtgaggcgttcatggagttgttgactctgactttatttaaattaagcaacttaaaagcacacaaactacacacactcacagagagcaagtcatgtgtgaacagacgctgagtaacattttaatgaaaattacaataaaacgaacgtttttcattcatttttttggtattaaagcgggccatattcggtggcggttgataagccatcgagaacgatccggggaacacaccctacaatggtttcatggagcagtttcaaaagccattatcaggggtattaaaaagggggtttttaagtggaacttgggactggcaatggctcacaaactgtgaatacataataaggcagtgaacaatcgtataggggctttaacaattttagacgtaatatgatcttaaacgcagttttatagtactttttaaattgataacttttgatatgaactacatttattccaatcaaaacttatataaagaacacaatcaattcccttgatataaacaaaatcaatatagacaagtatttcccttgatgatttatgtatgaaaccaattagcaattataaacctttgtgctgaagggcacagctatctaatcacaaatatataaaaaaaacgattgaagtacaataataattttttgttagtttccaatcgctctcaaaactcgcatttcagctgcactttgacacccacacggtgcgcgattgctctcaaaaagtgcaacaacatgtttgtgactaaccgcaaacagagccaaaagtgaaaaaacaacaacggacaacgccagcgaacaacatcaattacaaacgcccaaattgcatttaattaatggaaatgtatcccaaacgtaatgccacgtttttgttgttgttgtcaaaacagaatcggaattggaattgaaaatgggatcgggtaacagatatatgtatattttatattcccacacatacctcgcgattgttgttgttgttcatattattgttgatgtgattgttgttgtgttgctgctgatgagcgttgttgttgccgctgctgctgttgctattgctgctgtggtggtgattgttgttgctgttgccgctgctattgccaattgagcccgatatccgcgatccgggggaatcgcgccatctcaatacccccatgactgcctgacgcacccaacgtctttcggcaccttcgctgtaaaatgccactgttgtttgttgctgctcggtgctgctgctgcagtaagtactgctgcggctgctcttgctgcgattgctgctgctgcttcaaaaagtttgtcctagtactgcattggttccgggtcaatcataagcttctgctccggatcttctaagccaaagtacagatgtaatcctttgaggttgcagttccagtttctttaacttggttacttgtattcgataaagtgcatattttccccttaaattttgaggatgtgtatagttcttaaagttgctgctgtagatattatatcttgtatgtcttcaagctattattttgttcttctggtgctgttgatgctgtggcttttttagtttacttcttgaagggtttctgctcctattgtgggcgtgcttagatcaaattactattttcccagatgctgctgatgctgaaattgcagttgctgcttcgttacttcacaaacttatagcactgcaatatctctgatagggttttttcttagagggcggttaaaaatatattctccggtaattgctataatttttgttaaccttttgctttcggcaattttgctctcacaaaacagtaacaattttttttccataaatatctctttttacgagttttttaacccgtttgacgggtttttgcgctcttgctcggtgactgtcaaactgcggcttatatgcaaatattgggggctttcaaatattcggccaaccaatttctaggcaaataatttcactcggatcggctcatgcatatagatgagagtatatatataggattgtatactttttgatgcgtgttttattttcgtagatgcaccgcactaacacacaccgaacaacgcatatttacaccgctgcagtttggtttattgcactcacaaaatcggtttttcggttgttgttgggttttatttcggtttcagcatggagaaaccgagaa

SEQ ID NO: 14474 - DNA, 2553 bp, DROSOPHILA
atgggggtattgagatggcgcgattcccccggatcgcggatatcgggctcaattggcaatagcagcggcaacagcaacaacaatcaccaccacagcagcaatagcaacagcagcagcggcaacaacaacgctcatcagcagcaacacaacaacaatcacatcaacaataatatgaacaacaacaacaatcgcgagaaccaccatcgcggcagtaatgcgagtgaggagcgcgtgccccagccacactcaccccacgacagtcacgcccatccgcacaacggtgggctgcagcactcgggatcgcgggcaacactgcgccactcgatgaatcactcgagcagctccacagtctcgggctccgcctgcagctcgacgcccgcctccccgcaactgagtggggtggtcagcgcctctggatgccagctgctgtccaacggacaccactaccaatctcagtcgtcggtgagctccaactcatcgatcgtttcggccattcccgcctcgcagagattgctggaggaggcgctggccaaaccagcaccgtaccccatgatcttgctgccactgcacggtggttactggatggatggcaccgaacatgagtgcggctacgatgcgagaggaaatcctctgctaccacagactacctggatggcaaagttcgagacggacgatacggccaagtgctacaggagattctatgccgccagggagcactcgaatttgattggactggatgagcagttgggaccgattttgctttctattaaaacggaaaatgtagccaaccaggagcacatgcgaatcctgatgagattgagaactggtacgatgcatgagcttctaccggtatcatgcctattaccacagccaagtccggcaaaaatggcgcatacactgaacgaaaatatcacagtcgagcatttcatgccgattttgtgccccaaggcctcgcaactcatcagtgtatacgacgagcatgttctcgtttcgcacttcaagtttggagtgctctaccaaagatatggacagaccaccgaggaggaacttttcggtaaccagcagacatcaccagctttcgacgaattcttggatgtcttgggtcaaaggatacgtctgaaggatcacaagggctacaggggtgggcttgacattcagaatggtcacacgggcgacacagctgtctatgaggtcttcaaggagcgagagatcatgttccatgtatccacactattgccgcacaccgaaggcgatccacagcagctccagaggaagcgacacattggcaatgacattgtggccatcgtttttcaggagactaacactccattctcacccgacatgatcgccagtcactttctgcacgctttcatcgtggtccagcccattgagccgaatacaccacatacccggtacaaggtcagcgtaaccgccagggatgatgttcccttctttggtcccactctgccgaatcccgcagttttccgcaagggacaggagttcaaggagttcatcttgaccaagctgatcaatgctgagaatgcgtgctacaaagctgagaagtttgcaaagttggaacagcgcaccaggacctctctgctccagaatttatgcgaggaactgcgggagaagactcgcgactttctgggaaccgatctttcccagacgtcggcaggaagtcctacacccgagaccccgaaagcagaaagtggtagtggcggcaatgccggctcccgctttatcgatacggtgaagaaggctttaatcatgagggtgcgctcacagagcgtggacaccggaaatggtcatggacctggacaaacggataaattcagtgtgaacacgaagctgggcacattgaattccaagaaggagacccatcccgaaatgcagacacccaatctaaatacctgcagtcgcacggcctccaagtcctcatccaagtcgaagtcatcgaacgagtccacttcctcctccccggacattacctctcgccaggcgaacaacaacaataccaattctataggtggacacctcccccaaaatggaaccggcgggggcgtggtagcagcggctgtgagtgccgcccaaaacggagtggtcgcagtggccaccatgtcggaaacgagcgatgattccagtctgaatagcgtggatctcgatccaatgatggcgcacttggacggcggagccacctacattgacagtgatactgggctagaaagcatgagttcggcagaggccaccaccaaggcgtgctccctgtgcttagatggtgtccagtccaccataatgggtagttcccccagcaacgagacgatcgtgaagatcgagaatctgcgccaggaggtcacacgtttgaagtgcgacaagctggatctactcagacagaatgtgacctgtcagcgcgacatcaagcgacttcgggagcgggaactttcccttcaaggcgatctatcggcagctggcagagaaatcctacgactgcgggatctcctcaaggaatatatgcccgatacagcttcagcaccactctccatatcgcccatctaa

SEQ ID NO: 14475 - protein, 850 aa, DROSOPHILA
MGVLRWRDSPGSRISGSIGNSSGNSNNNHHHSSNSNSSSGNNNAHQQQHNNNHINNNMNNNNNRENHHRGSNASEERVPQPHSPHDSHAHPHNGGLQHSGSRATLRHSMNHSSSSTVSGSACSSTPASPQLSGVVSASGCQLLSNGHHYQSQSSVSSNSSIVSAIPASQRLLEEALAKPAPYPMILLPLHGGYWMDGTEHECGYDARGNPLLPQTTWMAKFETDDTAKCYRRFYAAREHSNLIGLDEQLGPILLSIKTENVANQEHMRILMRLRTGTMHELLPVSCLLPQPSPAKMAHTLNENITVEHFMPILCPKASQLISVYDEHVLVSHFKFGVLYQRYGQTTEEELFGNQQTSPAFDEFLDVLGQRIRLKDHKGYRGGLDIQNGHTGDTAVYEVFKEREIMFHVSTLLPHTEGDPQQLQRKRHIGNDIVAIVFQETNTPFSPDMIASHFLHAFIVVQPIEPNTPHTRYKVSVTARDDVPFFGPTLPNPAVFRKGQEFKEFILTKLINAENACYKAEKFAKLEQRTRTSLLQNLCEELREKTRDFLGTDLSQTSAGSPTPETPKAESGSGGNAGSRFIDTVKKALIMRVRSQSVDTGNGHGPGQTDKFSVNTKLGTLNSKKETHPEMQTPNLNTCSRTASKSSSKSKSSNESTSSSPDITSRQANNNNTNSIGGHLPQNGTGGGVVAAAVSAAQNGVVAVATMSETSDDSSLNSVDLDPMMAHLDGGATYIDSDTGLESMSSAEATTKACSLCLDGVQSTIMGSSPSNETIVKIENLRQEVTRLKCDKLDLLRQNVTCQRDIKRLRERELSLQGDLSAAGREILRLRDLLKEYMPDTASAPLSISPI

SEQ ID NO: 14476 - DNA, 15166 bp, DROSOPHILA
catatattacatataatataaaattaaaaacacaattcataccgtttattttattacattacgtaaacgagaagtggactctaacaatggctcgatttttgccatttgtaaaccagttgctattgaatacataatcgccctcgggaagcggtacgtatttagtaaactgttggtttacaaagtgggtgggcagcttatccacaataatgtcgtgctgaaaaatatctcagaaattggttaagatcaatattacttacattcgaaaatgcttactgtatagggacaagaatggttgatgtttgagtagggtttaaataaggcaaagagaaataaaaccatgggatttccgacatttgcgaccatcttgcagccatcaaaggtaaaattttggttaaagggcattagaccatttgatcgcttgtgcaaccccagattcacctaaaagtggtactcatttattaaaatggttggcatacaaaatgtctatatcgcaccgtaaaatgatgtactggtatcttataaagccgaaccttgaccgataggtatttgtaagtgcgattcgtagcctttagaaagcaatattcaaaatcactgaattttttgtccatcgaagtacattttatattggtaaattcgatacgactactttccaccttaaaaacaaaacaattaggcaagcttttgtgcactgttaattgcacttaccaaatgcatttgaaaaaacataaaatatataacacctgctatcgtgatgcactggaaattcatcttagcctacgttccagatttcacaacggcgtcgatacgagttttaggtagaactgaaactaactactttgctcaaagccaataaacatttattatgacaaaggctaattaaaattcaattatatgcgcggcatcattattaaccgatttaaataaattcgctgattagtgtggatctttataacagtattaacaaaaaaaatttaatttgcaataagatcgattaattgttgtactttctgctaaaacgattaatttattcatatttaaaaaaccttacttcctacaaaaacacattacatttcgccttaagactagttattacagcactaaacaatcatttagacgacgaccaggtcggttagatttaattatacaacattatcatatcatcatcctactgactcctccgttcttgctctgctctggttcgttgtgaaaaaggtattacgtggatatggacaggttcgatatctgcagatcttccgaattgaggcgcagtatctgctgatcctctgagtttatgtgcaccaactgcccgctatcgaagctaagcagattgctgagcgttggcccattattatccgcttgattgccagcggtattattattgttattattgttattaaggttggcattgttgttggtgggcgcagtattgtcgtactgctgctgctgctgctgctgaagctgctgctgctgatgaagcgtatgctgattgtgctgcaagatggaaggtttcatgttcagaaatagtcatattttttttcttttttgttccaagtatttcaaaattgatatcttgcttcttaacccaccagatgatttgtggtcaggttccactgcagattgttggcgttgccaggacctccgcccgatgtcagcaggttgtgcatggtgaagggattgttgagattgctgagattattgctattgccgttggcaggtgctgctcctgtcgcagttgctgccgctgctgcaacagctgccgccgagaatttactttcccagctattgccgccaggattgccaaagggattggcatgaaattgcaaggactgttgctgttgctgctgctgctgctgctgctgctgttggtgttgctgctggtgctgatgctggtgctgttgctgctgctgctgatgctgctgctgctgggcaaggacctgctgggcaaacggattgtagttgctccccagatcagttgctccatattgctgctgttgctgttgctgctgtggatggttgggcgacatcagttgctgctggccattggtgggcgtgaccgcggaggccatgttgtagggcgagggcgtgctgttgtggttgtagttgctcgatggcgacagcggctgcggcgagggtgtgagctcaggaggcgcccgataagaaagcccaaagggttgtggcgaggtatctacaaagcgaagcgagccgtttttaataataatcagtcgaaattccatttacacttttaaagtaggccatttgatgtttatggaagttttaactaggttttttttttgtagttttagtgtataaaactcacctcttggttccgttttaatgggcggtatgttttgtgtattccagcaattcatgttagtttgtcctacaataaaaccagcaatcaaaaataaaaagttaacaaatcaagcagaacgtgtaaagcaaacaatataaaaaccaaagattgaagtaaaccataaaagattagatagtatttagattcgttagtgcggcgtacagattaaaaactctgcctgggcaatgggaaacaattaaaaatatcgctgtttttgataaaaactaaataagcaaaataataaaatgtaatcatgcatataaatttccgaaataaaacaaaaaaggtcaaagactgaaatgaactgttttgaactccgataaagacttactcagaactgtaaactcttcttggaagtaagaaatcctagagcaaaacttacttcaacctataaacagttcctttttaataaaataaactttactttttttttttgaatttttcttgattttttttttttgttttattaagctacaatattttatacaaaatatttttaccaaactcttaatttttcgtatataaaaatatcaaatattcttcgcatgtaaacgagtagaaaagcgacaaaaatttcatattgatttcgaatcaatctctcattttcttgactataatttcgactaatcatgtaaatcaatatataaatatagtggggacattacccccctttacgtagatttcatggtgttctgggtgagtggatttgtgcattgattgagtgctttctaatagtttctaaaagagtctattcgagtaatacgtcatcgggggcgatgatttgttaagtagtctttggtataccgaagaaaacatcaaatatatatgatgctatttgactaggtaggattcagttagatgtctagcatccatctcaaaacaaagtatgtgtacccaagtggattcaaacacatgggaaaaaatcgactcaaagtcgcgacagacacaatagaggatagagaagaccgacaccagtttgggaaaaatctcaacagtcaacttactgccatcctggtggtcattctgcaattgctgtttctgctgctgctggagcagcaggtgcatgggatcaccgccagtcttctgacgtttccgcctcaagtgcgctggatctataagacaaaatatacacaccgtgttgtaggtacatatgatcgggttttcggtttcaatttaaacaatatattcgattccattgggaaatcttacgctactctgaaaattgagtgatttcgcttaaatacaatagttaggttggccccttcaaatgggccacctggacaacaaacaaatcattgggtttgacccatttctttggggtcttttgcctggtatcacttacaaattattttggggatacttttagcacaattattaattataaaacaaatacaaattcattaaggtactgaagacattgcgctccagccggccttacaacaagtggacaatttgtggcgccagagttaatggaaacagattccgagaaatacaatgcaatttccactggcttgaagccaacttgcttcgttattgggtttcgttcgaggattttcctcggttcgtttgcctataaagaatataaacaatcaaatcaacaaatctagatgccatttgccgcagccaatcgcttggccacctcatccggcgttaaaatctcgccagcatccacgggagcatagtaggcggaggtctcgtcaaattcactggccgccgcaagtggcggaatactcgtgtacagggcaaagtgctcggcctcggtcagatccaaattggggtccagttggacattgaagtgaccctctatggagctgaccaaattgtgtagactttgtcgatcggcaatggcaaccagttccattccgccctcactaattggtatgtcagccagctgtagtgcagatgcagtgcgtctatccaacccagctcccaccgaaatcgtactggattgggagtagccctcggttcgctgttgctgtggcaaactattgacactgtcacctttcagcggtatatgcaccacatcagcattcaggtaggcgggtctctttccggaaacactgctcacactcctgcccacgggcttggtcagctttgatcctggtttcttggccttgacaggactggatttggcaggcgctggattcgagatgaacggggcagctgacttggaggagcgcagcgatgccctcatcgggtcttgcatgttaaagtgacctatacttggctccctgctatttgccttggaatccaatatagagctgttctcctgcccctgggccaaatctggtttgctcttgcggcgcgaaaaaagcttcgaaaagaatcccggcttcttctgcctgggcagtgtattaaagttcgggttctttggagcaggtgggagtcttttgtttagaggagactcgcctgtagatggcttggtctgaaccgtattggcctcgattgatcgattctcagcattgctgtcctgctttcgaattcttttcggtggcaatgggggcaacttatcctcttctggtggatattgaattgttagaattgccggcgggactggaggaactggtcgcatcggagtctccggcttgcgggcctgagagttcacctcgacgggatcgtaatgctgatgggcatcttcgggagcgcattgcgacatgggcggagttggaggcattatatcatccatgggtatgaggacgggattcttgaaggcaatctgtaagcttgtgtaggtggcagcgtcatcgaagctatcctccacctgcagcggcgcacgaccctgaagtcccgccaactcattttgtatggtattcttgtacgtatccctctgaactttgaagtccgtgtatatctcatccagttcggccacggtctcaaggagttcgtcaagggtcttatctgccttggatatctcaagggcggagtccaaaacatctgcctcagcagtgggactgggctcatggacttgctgttcaatctcactggacttcatccactcggtgatcttatcgttggccgtcaaaggacgtggctccaactgctgacccaaatccagttgctccagttctcgtaccttttcatcgataatggtgtcaatctctttttcctgctcggatcgcaggcgatgggcctcggcttctgcatgggcatccgccgcctccatgtcctcgggaatatgatctgaggtgtgatcgggcaagtgatctatagcctgatcgaacgattgctgcgctggtagttcctgatcctgttgcatcggttcttcgagctgaaaagattgctgctgttctagttgttgtaaatattgttcctgctgtaatgattgctcttgtgtatattgctcttgttgcaatgattgctcttgagtatattgctcctgttgcactgactgctcttgctcaagagctggctctgattgctgagattcctcatgattaaattccatttccgaaggtatctcacgttgcacatctattttcggtgtatccaaatcgataacctcaatcgttggcggctgcacttcccgtttggcgtccaacctgaggatctgctgaaagagatcttcgtccggcttccgcttgaggtgccgatgaagattccagaatgtatgtttacctgagtccattggcacgtactcgaagggcagggcctcgctggtaactccatccgagggacgtcgcagttgaataaaaacctaatggaacatagtttcttttaagagctgaggaatccttcttgataagctttaacgcaccttggcgggctctgtgatgtccagggtatgatagcgcggcgtcttaaaggtaatggcagtctgcttgtggacatccgtgtgctggaagtcaccaaaggcctcccaaacactctggccattcttctcctcaaagaatcgcacggagatgtcctccttggccaccttctcgcagagcaggatgatctgggtgttgccgaaaacggtggccgagcagctacacagccggcagatgaccaggtcggacatggccttcttatcgaagatgggctccgaaactaccggcggcagtggcgaggtgaatcgacccttctgctcgctctccatgaatacttgaaagcacaatcgcaccgaattcagatctatgctcgagggctggaaacgatgcgaaaagccagctaaagaaagcaaatgcaaagggttaaactttaaggctaacaatttttgtgttgtacaagaccacctactcttaaacggatccacacggatctcctcgcgcgccttgagcgccgcctcaatgtccttctttttgacacactggatacccaagttactgaacaccgctcgcattgtctcactgttgatctccagtgtacagacgcccttcttgcagccctccttgccaactaaattgtggggatgaggactgaaatgggaaagggaacacaattatttaattattttatacctacatatatatgtatccttaactcaccgatatggcgtatcctttgtgacgcaggagacaacaactacggcgcgtcccttgtagcccacaatttcgattgtcggataggtcttgttctccggcgtagagttcacgcccggaatggatcccgccgagcgtccctcgcactcgtagcgaaaccttagcgcctttcctgccggttgttcggtgatctttacgtagggcttctttcgcacatttttcgtggactgtgccaattgctgctgctgctgggcgggcaggccgttgtagttgaggctctgttggccatcaactgctggaccctgcccaggagcggctccattgttctggttcggaaacattacgtggccaaaatattatctaaaaattaaataagagtagcatacgttagaaatgtaatatttttataaataatagataagtattttaactagattcattgcaaagaataagaatatatattcttgataagatatagttgatctctgacaagtggccggctgtttgtctgtaaatggaatggaactcaggaactatcaatgtcgactcttgtttcgctttttaatcgttgttttgccaattcttattgatatttcaaataaatttgaaaatttctggctcgcttaggaacaagtttttaaatatatggtcttcgttaatcgtgagcatacaatatcaacatgtgtttcaagatctcacactaacttttcttatgggatcaacagaattcctcattttagaaataaaaatattaatgcaaagatttgcatttattgttgttgaaattttggtaatacttctgtgaattaatgcatatattgcttttgagttgatgtaatccactagaatagacacttttgttacaaagccagtgccgtctgatttaaagttatggccaatggcaaacgaggaacaattccttggcaagcagcaaatcgaaggcccccagacacgacaaacgatgacgacgccgatcgaaaataaagcctccaagactcgtgcagtgtgatctgctatataagtaagattctcctgaccacaggctatgacgaaccgaaccgtaaaacgtctggcagctaacggaaaaggtggaaaactctcccgcagacccgtcttttcagcgtgggtggtccgtattgccgtctgcgatagatggcattaattacaatattttaggggtcattagaaaaattgtatattttcataattctcatcggcatgtgatgcatgtgcagtgggtgcgtttttgcgatatgtttttcattttggccgggtccggccccggtctggtccggtgtagtccggctaaaggtccggacgccttgtttaaaaataacattttgcgtaacgcggccacaaagcgacaaaaactctgcctccccatatatatcaggtggtatatataggtgtatatatatcgatacatatacatagatcgcctcgcagactggcctccccggagctgggatggcattatattttgttttatttttcgcaagattggagcaattcaaacaaaacattttatcaatgatgccgcggcgaattgtcaacgaaacgagtcgtcgttcagtcgggtcgatcatttcaatacgcactaagttctactagatatatatatgaagactaagttgctgtgtgacctcagagtttgttctctgatcatgtctagacattggtctgccgttgacaaaagacgtcaatggctaaaaaaaaaaaaaaaaaagaactaatgcccgtgcattggtcccaaccaaacttggctgatttgtcgggggaaaaaggagaggaagccaggaaacgtgtgccaattctgttgatacatacaagtatatggaaatttaggaaacttatatgccttacacgaaaaaatatgaccgaagattgataccataaaaaaagatttcgttttcgtgccataaacatcattgtcatcaagattaaaataatattatcattagcagtttaatctttaaaatgaacacaaacttaaattcaaacaaatgataaacatagtcgatagcagtgattcattcctagtgcgattaataatatatctataatatataatatatttaaaagatcgtagtttttcttaagacttcgtcttactttcctttgcatttgttttagcttatcaaaatatatacgtattccattcacatctgttttatttctagaggaatttggtctaccaatcgaagtttcgcagctgccaaaggctttttgtgcgtcaactagaaatacatattttccttataaatcatgtccaatggagggacagtggtcaaaattacatattcaatggacacagcagcaaaccgataaactttatacaagatatagtataagaaatgaggacattttccacgcgccgttatttcacaaattagctttgccttgaaaatcaattgttgaggacaaaaaccaatcagcgtgcacaaaaatattggggtagtattacgtcatgaaataatttcagttttggcgaatatgaaaagctagttggacagaagccagcaaatgtaatacaaatgcaatccagttcatataaatattacacatgcgtatttatctttgtttcatttatgagaattgatcacctttcagttatcacggccaaactttgatggtaaaaacttcaccacacagataagatcgcaaattttcggatattaactaagttttattatttattaattctaatgttgacaacacaagttgattaatttacgagttgtttataatttatagtttataactatatgatccgttttttattgtagatggtagctttggtttttaaactgagcacctatgtatatattcgtatctataggtgctaccgagagaaatgttcttgtagaaccgatcaaacacacgcggaaaacgtcttgagtactcgccaaatgtctgaacactgaactgagaaaatgtttttgagaagaaacacagaattctttatgcacgcctgcctggcaaaagttttctcgtcgagctttctgctatttttattttcactaatattttaaaaatgtattttcttaacattttttttgcttgtgtatggatgtgtatttgtatcttgtcatgaatttatggcttttgcttgcaaggaattttctctttcgacgagcaagttgtccccatttttgagcaaaaaaatactcagacttcctttactacgtagcacgtcgcaagaaaatggaaattcaaacttaatttccgatgtcaataaactttagctggcaattgtgtaaacaaattgaaattattgagattggactcgagttttattgactcgtaggcaattgaatctaatgttaataaaaggttgctactttgtactacaatacaatgtaaaatatgtacaataatgaatttgttaactttgtgcttatatttgccgggtgataaattcgagcaattaaaatttaaaacaaaaaactaatcaaaatcggcaatttcctagaacataacattgtcactttttccaattgactatgtgttggccccaacaaaatgagtcacctttcattaagtggaaataaccgaatcgcacaaaatgcgcccaatctaatcaaaagatgcaaaggtagctaaaaattaacataaaatgcattagcagaggattgtttgtttttgcagtgaatataaacacacattatacaagtacatttgtttgtgtatctatagtaggcatttggttttaggctttggcatttccgtttcaatatccacggcaaaaacgaaaggaaaattcgccacttgtcaccgttcaatctgccttgagcacttggcgccagttgagaaagctctctaatgagtttgcaaaacccaattatacgatctatgctgggcagaggatatataggatatatgttaatatgaagatatgcctctgccagaatgaatggattgcattatattcgtacccagagatttttgaaaacaaaatatctcgattttgactgggacacgaatttccacgaaacacaatgagtcacaaaacaaatttcttgctatgtatgtatattgaaatatattgaaatatgcaaggaattcgctcgtgtgccacccactgtttggcaagaatcattcactaactacgtgactttctcattgagaacaaggtatggaactgaacgagaataggtcagttaccctgaaaattaaatctaatattttgaggatatcaaaatactggaaattcccatagtttcaatcgattaaccaatttaatatgtcattcaaaggctaacaagaattatactgccaccgaatttaattgcaatacactatttacgatggtttcatccgcagctatattgagattagaaccatttgcaaccacacaaatttgccaccgtttattcccgtcagatagaacctgcggcattcagactgataacgctcaggtgttgagcgtagaaaatccgaaaaaaaaactcaaagataaccaaaagtaagataagaatataaaaataaatctaaatgacgatggcctgagaatgtatcgatagatggtttttggtttaagtgttttgcaggggagttatattggaatttcctatggttttgcccttcgtttgctcaaaacaataaataatttatttgattagctattaattttcaccatgtcttgcaaaaatccacacgataaattcaaaagaaaaaagtctatgctgttaagccataaaatgaattaataaaataacgttctactcgttcaacgataactacttttggcgaaaaataaaaaaaaaaggtaagtaaacaaaataaaatgaacatttcgtttcgatcatttaacatgctaattttatgcaatttccaatagcaaagacacacagaaaaaagttcttttggcgccagcaccacaaattaagattaagatcaacatcaaagcatcagaagcagccaaaaattcctcagtgaaacgggttccgcaaaaaaaaaaaaaacaagaactccagacagacaaatgttttttaacgatcgttggcgtcaagcaatttacagctcaaataaaaataaataaccgatatgctgacaaatcgatggaactagttgccaaaagctatgttttgtatcgtatgaatacaagtccattatccttattttccacaccaaacaatgtttgttaaattagccgatcagggattattgtgcacatgtgacttccggcaaaaatgcagatacatatcttatccgtatctccaattataacggccacgatctttcttatcgagtggtttaaatgatattcgcctaaaatagaatccctattgattgatgatttgcatagcggagggccttacccacagccagatcgtgtatcaatcatgactcggatttagcatacggggaaactaccagtagatataaccaatattatctattgacttggccttagatctctgttagcacacaaatctctactcgagctttgtaaatcgccgatgacttgctggaaacgagttgagcgattttagcgctttgattttctttggtcccggagacgagagtctgatgttatgagtcagcacacggtttgcatttaacttggttgcacttttcgagtttacaccgtattagcagctaaaagcatttcttcattcttcataattacctgcgaatcaaaccaagaaccagtgaacactcatgacgaattcggtttcactttttgcttttatttgggccacaaaacgcacactaaccgcagtttgttctttcaaaatggtacttttcaaattattacttaaaaataatatcgaaccgttagggaattttaaaaatatttaataaaaataaaagaatgttagcgcaaacacgaccgcaggcgcatcgagtcgatcttagaatgaaacaattgaaaacctctccggcgtatttgagtggcagcaaaaaataaataaatacaaggggcaaaagcttttccacgagccccaccccctctgggccccacggcccccctcgcccacccacgtgcccgtaagaaactttcatttatggcgacgtcgaaaagccactgcgactgcgctgccatgtacacaggtgtttcggttgtattatttaagtttatcgtttgcattcaccgtagattatttaatacgcaggtggataattgccacccaaaaaacacaacaacaacaactgcggttacactacaaaggattgaatacgttctaatagtttttttttaacatcttaactattatttgtcatgcagaaattgtgagctattacaaatcttagcatccaggaattttaaacattgtcaaaatgttaaaactatttaggatgaaaaatattaatatgcgagaaaagtgaccagtcttggtttatcaaaccttaaaagtgtgaataatggttgataaatcacgatgttgttgctgtaaacattgttccgaaacgataaggcgtccaatgactcaataaggttatatttttaatatgtttaatgcaagatgcgtttctttgtaatgacattttgcgtctttggaagcaatagttgtgtacatatttattaaaatatcaagacccttctcgcaaaacgcagccattaggattttccaccgcactttattaatccgtgcaatcaatgttcagaatcaataaattaagctaggctctatagggggactcacctaagtcaaggagtgatctgaaatctcgcttatatgcattgatatcactgggtttgctaagtaaatcggacacctgaaattcaacgcgaaccaattagtacacttttatgtacattatttgttaagtttcttattgtgttaattggaaaattagtccgttgcacagcgagctaaataagccatttatttatagttgagaaatatggcgcttttttcatgttaatgttaacacatacacaagcacgcacggcaggaaccggtttatttattattttttatatataaataatttattcttccctccctttctcactcactctctctctctctctctttctgattcttcttattttattcttttttaacttttgcgcgcgcacaaagcgggtgcgataatatcgataataacgacaaaaacaacggatgggggagaacagttcgaacagaaactaatgaaaagttaagaaatcgaagtccgaagaaagagagagtgggcaaagagcgcgagagagcgcgtgacgtcgattttttctagggaattccgggctttatgcttatgcgatcatcgacgtacgactaccttttgtttttgtttttcgatttattcgatttataatttagggtaatttgttatcgcgctctgccctccattttctttggttattcttgcgatgtttgtggttaaagtgtcgatgtgccgtgtaatctaatcggtaaacgttcagttttaatagaaattatcaatacgtgcgccgagttttttatttttgttttttcctccgttatattggtgggtctcttttttttgtcactcgtaatacgaaaaagcaagtgaaacttgcttagagctcaattgaatttatgcgtttttatgcagctcttttacttttcgttttatttttatctactggtatttcaacctgccttcgagctccagaagagcgaaagagagcggaagcttaaagcacagcgaaaaaggtaaataaggcacaatttggaggtggagataaaatacccgtaacacacgcactaccaaccgatctcgacgcccgcgatttgaacactaactgcccaccaagaagaaacaggcgagccaaactttcaataccgtatgcgccactgaaaaataccgcaaaacttgcagatcgcgaagctttcaacggagttaagtagtcggccccaagctctgctctttgcagtctcgacttaagctcagaagagagacaatccgaagagcctagcttggcgaagagtgcgagatcagcatgtgctgagtcacgtacgattgaagttttccacttgcgacttatagcttacagatgtccacatcttccacaaatccgagtttcgaggaatacgcgatgattgcataaaggcgaaacaatatatacatacatataatataaatgtttttatctgactgataccgattagtaggaatgcaggccagttgtttctttcaaaagcttttaaaatgtgtcaccttttaaatctataacacgtattatattgaaggaatacctaattaattgaaaatgcatatctttttattaggagcatcccaaaggaatcggaaaatataaatattttgtttttcttaaatattgagaattcaactgtatggtaaccaatcatcaagaattcgattttcaatgtgagattcgtttaaatagccgaatattccaactatatatgcatattta

SEQ ID NO: 14477 - DNA, 2464 bp, DROSOPHILA
acacggcacatcgacactttaaccacaaacatcgcaagaataaccaaagaaaatggagggcagagcgcgataacaaattaccctaaattataaatcgaataaatcgaaaaacaaaaacaaaaggtgtccgatttacttagcaaacccagtgatatcaatgcatataagcgagatttcagatcactccttgacttagataatattttggccacgtaatgtttccgaaccagaacaatggagccgctcctgggcagggtccagcagttgatggccaacagagcctcaactacaacggcctgcccgcccagcagcagcagcaattggcacagtccacgaaaaatgtgcgaaagaagccctacgtaaagatcaccgaacaaccggcaggaaaggcgctaaggtttcgctacgagtgcgagggacgctcggcgggatccattccgggcgtgaactctacgccggagaacaagacctatccgacaatcgaaattgtgggctacaagggacgcgccgtagttgttgtctcctgcgtcacaaaggatacgccatatcgtcctcatccccacaatttagttggcaaggagggctgcaagaagggcgtctgtacactggagatcaacagtgagacaatgcgagcggtgttcagtaacttgggtatccagtgtgtcaaaaagaaggacattgaggcggcgctcaaggcgcgcgaggagatccgtgtggatccgtttaagactggcttttcgcatcgtttccagccctcgagcatagatctgaattcggtgcgattgtgctttcaagtattcatggagagcgagcagaagggtcgattcacctcgccactgccgccggtagtttcggagcccatcttcgataagaaggccatgtccgacctggtcatctgccggctgtgtagctgctcggccaccgttttcggcaacacccagatcatcctgctctgcgagaaggtggccaaggaggacatctccgtgcgattctttgaggagaagaatggccagagtgtttgggaggcctttggtgacttccagcacacggatgtccacaagcagactgccattacctttaagacgccgcgctatcataccctggacatcacagagcccgccaaggtttttattcaactgcgacgtccctcggatggagttaccagcgaggccctgcccttcgagtacgtgccaatggactcagatccagcgcacttgaggcggaaacgtcagaagactggcggtgatcccatgcacctgctgctccagcagcagcagaaacagcaattgcagaatgaccaccaggatggcagacaaactaacatgaattgctggaatacacaaaacataccgcccattaaaacggaaccaagagatacctcgccacaaccctttgggctttcttatcgggcgcctcctgagctcacaccctcgccgcagccgctgtcgccatcgagcaactacaaccacaacagcacgccctcgccctacaacatggcctccgcggtcacgcccaccaatggccagcagcaactgatgtcgcccaaccatccacagcagcaacagcaacagcagcaatatggagcaactgatctggggagcaactacaatccgtttgcccagcaggtccttgcccagcagcagcagcatcagcagcagcagcaacagcaccagcatcagcaccagcagcaacaccaacagcagcagcagcagcagcagcagcaacagcaacagtccttgcaatttcatgccaatccctttggcaatcctggcggcaatagctgggaaagtaaattctcggcggcagctgttgcagcagcggcagcaactgcgacaggagcagcacctgccaacggcaatagcaataatctcagcaatctcaacaatcccttcaccatgcacaacctgctgacatcgggcggaggtcctggcaacgccaacaatctgcagtggaacctgaccacaaatcatctgcacaatcagcatacgcttcatcagcagcagcagcttcagcagcagcagcagcagcagtacgacaatactgcgcccaccaacaacaatgccaaccttaataacaataataacaataataataccgctggcaatcaagcggataataatgggccaacgctcagcaatctgcttagcttcgatagcgggcagttggtgcacataaactcagaggatcagcagatactgcgcctcaattcggaagatctgcagatatcgaacctgtccatatccacgtaatacctttttcacaacgaaccagagcagagcaagaacggaggagtcagtaggatgatgatatgataatgttgtataattaaatctaaccgacctggtcgtcgtctaaatgattgtttagtgctgtaataactagtcttaaggcgaaatgtaatgtgtttttgtaggaagtaaggttttttaaatatgaataaattaatcgttttagcagaaagtac

SEQ ID NO: 14478 - protein, 677 aa, DROSOPHILA
MFPNQNNGAAPGQGPAVDGQQSLNYNGLPAQQQQQLAQSTKNVRKKPYVKITEQPAGKALRFRYECEGRSAGSIPGVNSTPENKTYPTIEIVGYKGRAVVVVSCVTKDTPYRPHPHNLVGKEGCKKGVCTLEINSETMRAVFSNLGIQCVKKKDIEAALKAREEIRVDPFKTGFSHRFQPSSIDLNSVRLCFQVFMESEQKGRFTSPLPPVVSEPIFDKKAMSDLVICRLCSCSATVFGNTQIILLCEKVAKEDISVRFFEEKNGQSVWEAFGDFQHTDVHKQTAITFKTPRYHTLDITEPAKVFIQLRRPSDGVTSEALPFEYVPMDSDPAHLRRKRQKTGGDPMHLLLQQQQKQQLQNDHQDGRQTNMNCWNTQNIPPIKTEPRDTSPQPFGLSYRAPPELTPSPQPLSPSSNYNHNSTPSPYNMASAVTPTNGQQQLMSPNHPQQQQQQQQYGATDLGSNYNPFAQQVLAQQQQHQQQQQQHQHQHQQQHQQQQQQQQQQQQQSLQFHANPFGNPGGNSWESKFSAAAVAAAAATATGAAPANGNSNNLSNLNNPFTMHNLLTSGGGPGNANNLQWNLTTNHLHNQHTLHQQQQLQQQQQQQYDNTAPTNNNANLNNNNNNNNTAGNQADNNGPTLSNLLSFDSGQLVHINSEDQQILRLNSEDLQISNLSIST

SEQ ID NO: 14479 - DNA, 3740 bp, DROSOPHILA
atcagatcaaactgaagactttctggttgcagaatctctcgacgcactccatcattttcaagcactttttcgacaagaccaagggtatactggttgatgtattcaaattcattccatgtgcccttccggtttgttagatttccaacaatttctgaaaggatgttttaaatacattttcgcataggtatattttaagtaactcttaagtattacttaccctctatattgtcaaataattccggaactggaatatcatgtatattagccacaggttctttcaatggaaatgggcttacagaagttatctcatggcccaaagatgccaatttctttagataaggtagggcgtgatagtaatgcgagtggcttggtatgggaaacacgccgaggatacgcgctccttccaagagaacaggcagcagggccaccaccagaactatcaatctcagaaccaacatactcataggcattcagccggaagactgaatcgttaagctagaccaacatattccgtctggctgatacgatttatcagttccagacaaatattttacaagttttctggttgattagcaagagacactaaccttgttataacgcaacataatcgcttatctgcttcataatttttctgtcccctataaataagtcaaaaattatttatacaccaaccgagtgaccctctaaacgtgttgaatatctcgattaaaagaagcacttgcttttcatgattttaagctttcatttctaaaacggtttctgaaaaacatttattataattatagaacggttaacaacgaacataatcagatgttctctaatctttacttcagtaaagcccgcttagcaaatttttgttagctgataagataatgagcctacatttgcaacagaaaaactttgataaagctctccatataagtgctattgtaacccattcactgatatctttctaatctgcttcacataataatagcaaaaattaactagacttaaaattgacggacttcaattattttattcctttatttagctgtagttttaaagttacatttacaaatatcacgaattgcgtccttcaaagaaatcttgccttacttcgattttagctttttctttgcatttccaaaatccgtaagcttgccaaggactcccacaatgatcgcaacaagtagaagagctccgcccaaaaggactccaatgacatccaggctgtggtaggcgaagaaacccaaatcctggccagccactctcatgtggtaggcacctttgtgccgcagaacgtattccgtccaccaaatggcggtgtccagtggactcattggctgatcacgatatcgttccgacatctgcctagcaatctgcgcaaatctcggctccttgagcaatatctcgatggtctccttaagttcctgctgtgtcattgtcgtgtgatcgagtcccaatccaaaacccgcctgcgtggcccgccttacattcaggaattgatcgtaaaagaagggcagacccaagaccggtttgccatgatgaatgctctcgatggtgctcaacaatccgccgtgggtgataaagagcttgaccttgggatgggccaggatatccggctgaggaaaccatttgctgataaaaacattggacggtttgccaggcaacttgtcgtcctcgaatttccagagcactcgctgcggcaagctggcgaaggtttttaggataagatctttcctatctgccggtagatccttactgagaacattagagcccagtgaaaagtatatcacaccgtgctctccggaaccttgaataaactcttccaagtccttgggcagaggagccggcttgtgggatatgtgcagacctccaacctcgatcatgttcggaacgtacggacgcgggaagctcaacgaaaagtgctgattcagcaatactagcgagaagtttctattcaaatcggtgagttgaacccttttcgaggcctcgggaaagtatttcgcatacattttctcctgctctgacatatgaacaaatctgtagttaagccaggcaaccgtagtatccacaaagttggacagacgctccaagaaagtcattcgatccgtaagaccccccgttgctagcggagtatacgatagaggagattcattgcccactagcgcatcaatattccaatcagttccaaaggtggatatgccaattataggtgcattgaagtgggccgcgaatccatagtaggcatccgagcgtagagcctctacaattataagatcgaaatgatcctttcccggtggcaaaagggtttctgtaacctctttgttggtaagaacacagcgtgtaacgcttacaaagaatttattgatgaagttgttctcttgccacaaattcattggtccgctcagttcgtttatcaattcttaaagattgttacaaaattgtgtaactgaaaatgtgttacatacaagtatgtttttatcatctatcttacccttataattgttaaatacatctgggataaacacatctctgaagttaaccactggtttcttttgcggaaacgcattaaccgaggtcacctggtgaccccgattagccagttcctttaaataaggtaccacattaatatactgtgatggccccggaaacggaaatatagccaatatcctggcagcttgcatagaagctggcagagttagtaacaaaaaacctatccgtagagcgagcatctcaaaaatcgtctgcacttcgcgatctcactttgtaaactgaatcggcaaacgcatcacaacatagttctaagctgttagataacactgcatgccactgacatgcaatagtaattctcgacagatgagattacgtaaatttcgtaggcgatccacatctcaccgtcgcaccccatcacaatttgtttccctgtcttatcccctttaatcccctaaacaaacacaccgctcttctgaattaacaattgtgtgcactcgaagaaaaaaaagggttagtttacaattcaagtgaaaaaattcaaaaaataggttcttactttagcttaaaacctcgattcttctttaagggtatgcatatcaaattaaaaattaaattttctatgccttacatagcttttaaagtagtcagttaataatagagctttaagctacggttaagtagaggccaaggttcatgcgtgcactatatgattataatgacagcacttgacgtattagcagtagtttcttttgaatgaatttaaataattagtcgccccaatgagcatttttttttgctatgatgtctaaatagctaatatgaaaacaatttaatattttttttttcatttatttatttaaaaattaattcacaggtgctggtaacaaaacaaaaatgcaaatgtttactgctctaagaggaaacataagtcggtggcggcatgaactcaaacagttaatcgactttaattgattactgggtcttcaatttactcgcctccgcacgattttttcggattttacttataagcgaaacgaagaccctttgtaagcatttaatcaaaataacgacgatcagtagggagacaaaagtgattgcgatgaggagcccccaggtgtccagtccgtggaactgaataaaatccagatcacgcgaagcacatctcaagtgtttggctcccttatgccgcaatacgtactcggtccaccaaatggcgcgctccaaagcggtttccttctgatctcggaataatttggatttag

SEQ ID NO: 14480 - DNA, 1668 bp, DROSOPHILA
gcgaagtgcagacgatttttgagatgctcgctctacggataggttttttgttactaactctgccagcttctatgcaagctgccaggatattggctatatttccgtttccggggccatcacagtatattaatgtggtaccttatttaaaggaactggctaatcggggtcaccaggtgacctcggttaatgcgtttccgcaaaagaaaccagtggttaacttcagagatgtgtttatcccagatgtatttaacaattataaggaattgataaacgaactgagcggaccaatgaatttgtggcaagagaacaacttcatcaataaattctttgtaagcgttacacgctgtgttcttaccaacaaagaggttacagaaacccttttgccaccgggaaaggatcatttcgatcttataattgtagaggctctacgctcggatgcctactatggattcgcggcccacttcaatgcacctataattggcatatccacctttggaactgattggaatattgatgcgctagtgggcaatgaatctcctctatcgtatactccgctagcaacggggggtcttacggatcgaatgactttcttggagcgtctgtccaactttgtggatactacggttgcctggcttaactacagatttgttcatatgtcagagcaggagaaaatgtatgcgaaatactttcccgaggcctcgaaaagggttcaactcaccgatttgaatagaaacttctcgctagtattgctgaatcagcacttttcgttgagcttcccgcgtccgtacgttccgaacatgatcgaggttggaggtctgcacatatcccacaagccggctcctctgcccaaggacttggaagagtttattcaaggttccggagagcacggtgtgatatacttttcactgggctctaatgttctcagtaaggatctaccggcagataggaaagatcttatcctaaaaaccttcgccagcttgccgcagcgagtgctctggaaattcgaggacgacaagttgcctggcaaaccgtccaatgtttttatcagcaaatggtttcctcagccggatatcctggcccatcccaaggtcaagctctttatcacccacggcggattgttgagcaccatcgagagcattcatcatggcaaaccggtcttgggtctgcccttcttttacgatcaattcctgaatgtaaggcgggccacgcaggcgggttttggattgggactcgatcacacgacaatgacacagcaggaacttaaggagaccatcgagatattgctcaaggagccgagatttgcgcagattgctaggcagatgtcggaacgatatcgtgatcagccaatgagtccactggacaccgccatttggtggacggaatacgttctgcggcacaaaggtgcctaccacatgagagtggctggccaggatttgggtttcttcgcctaccacagcctggatgtcattggagtccttttgggcggagctcttctacttgttgcgatcattgtgggagtccttggcaagcttacggattttggaaatgcaaagaaaaagctaaaatcgaagtaaggcaagatttctttgaaggacgcaattcgtgatatttgtaaatgtaactttaaaactacagctaaataaaggaataaaataattgaagtccgtc

SEQ ID NO: 14481 - protein, 516 aa, DROSOPHILA
MLALRIGFLLLTLPASMQAARILAIFPFPGPSQYINVVPYLKELANRGHQVTSVNAFPQKKPVVNFRDVFIPDVFNNYKELINELSGPMNLWQENNFINKFFVSVTRCVLTNKEVTETLLPPGKDHFDLIIVEALRSDAYYGFAAHFNAPIIGISTFGTDWNIDALVGNESPLSYTPLATGGLTDRMTFLERLSNFVDTTVAWLNYRFVHMSEQEKMYAKYFPEASKRVQLTDLNRNFSLVLLNQHFSLSFPRPYVPNMIEVGGLHISHKPAPLPKDLEEFIQGSGEHGVIYFSLGSNVLSKDLPADRKDLILKTFASLPQRVLWKFEDDKLPGKPSNVFISKWFPQPDILAHPKVKLFITHGGLLSTIESIHHGKPVLGLPFFYDQFLNVRRATQAGFGLGLDHTTMTQQELKETIEILLKEPRFAQIARQMSERYRDQPMSPLDTAIWWTEYVLRHKGAYHMRVAGQDLGFFAYHSLDVIGVLLGGALLLVAIIVGVLGKLTDFGNAKKKLKSK

SEQ ID NO: 14482 - DNA, 2256 bp, DROSOPHILA
aattcttgtttgtgttccgcctctctttctttttgctgtgctttctcgcgattcccatggctgctctactaatgttgctgctgctgttgatgcggctactagttgtgcggttgctgctgctgcagatgttgctcctgttgctgttgctgttggatttgcttctttcaatgatgctgctgctgctactgctggctgtacgcatattgccgccgttgataataatatcatagcgctgccatggcgctgctgtttgtctagcgcttcaattgggaaacactcgagcgtttttgtttgccgtgggtcaacggggcgtatgcgcgatatgctttcattggccttagccagaccagtttataccgcatccgtgacgtggctcatccagccaatgacgtcatggccgctgtcacagctgtcacgcgcagaaagtgttcaaagactatttatagacgaaacggcctcccgcaccgaacgccgccaaccgcccattcgtccatcagctgctgctgctaatttttgcaagtgtttttcttagcgcttttcttggatagcagctgaaaatagacagaaacagcggagagtgtgaggaagaaattgtcgtttttgtgtgtgaagctcattgaaatgtttgcgcgtactcaatttttattcgcatctaaatatacatgcacaagtgtagtatactacagagaatggcaatcgatggcaaccgtgattactcatacgccccgcgagccaagcagatgcaaaatgcaaattaaattgcattcgagtgcttttgcattccaaatgttggctcaatcacagttgccattatgatttatggattgaataccattgaagaagccttaaacaccgaacaatcagcgaggtacaatttcaattgcagctacctcataattctggttcagtgaaactgtgattgctaattgcccgccctccagttacctgtgtcttttggcccccttcagcgtggaattaatttaattacccaatgacaagctttgatgttcagttttggtttaattgtattaattttatcaatgtgttaacgacatcagcagtgtgaatttcccactgtcaatttaataaattggacccggtcttggttggttaggattgaagggcgacggcctcgtatcgaaaatgggtccctggtgacgatgaggctctgccagcactgatgtagccgtggccatcacacccagcagggccagaaaaatcgctccaagattaagttgcatcttagctcggtggcgggaattgattgatgctttgagcgttgagatggtgaggcttttatagctcagtcccagacaaacgagtcgcagattggggactttttatttgagcttctgcgataagcagccgaatgaatgacgggcaagtgtcagccgggggcagataaccgattgtggccaggggaacccagccagcaccacccaaaggggacttcccacggtcccggattatcagcctagactaaatgtaaatatgacgtttctcgctgaatatttatgttgcccccagtgaccatctccacctcccacgaaaacactctcctttttagcgccctgttggtttttctgcattgcaaattacccaccgacaaccacggcagccattcaaaggcatagtcaacatgcgtcaacacggagccacgcccactgccctacgcccctcgcagcttctgccttctaagccgtacacagaaagaaaactaataaataaaatattcatatttaatcagatcctatagaggattgtcttgaagcttttaatcatcttttttctcttgtttgtcattttctaccaacatttacgatatgcgcgaatgatttatatctgttttgtggggcaatatacacgcaataaagcaacaaaaatgaagcaattaaagcggaaaacccctgtccgtgaaaataaaattagtctctgtatggaaacgtcagcaactacaaatgtttttaataactgagcagctagttttacaacagataattcggcctgtccgtgtgccgatatctttcacattacctaattttaaactatttcttgtaaaaatttggattctttttcagtgcatgatgagaacatctagaaagcgggtttttgggtgcacggatgcggaggtgcaaagtgcagctgcagcaacacaagaaattgccccttggctcgattagagcactttgttagttttctcgcagcagaatggggctgcaaaagaggttgaacgtggcgctaccctttaaatgactc

SEQ ID NO: 14483 - DNA, 256 bp, DROSOPHILA
cgccaccgagctaagatgcaacttaatcttggagcgatttttctggccctgctgggtgtgatggccacggctacatcagtgctggcagagcctcatcgtcaccagggacccattttcgatacgaggccgtcgcccttcaatcctaaccaaccaagaccgggtccaatttattaaattgacagtgggaaattcacactgctgatgtcgttaacacattgataaaattaatacaattaaaccaaaactgaacatcaaa

SEQ ID NO: 14484 - protein, 52 aa, DROSOPHILA
MQLNLGAIFLALLGVMATATSVLAEPHRHQGPIFDTRPSPFNPNQPRPGPIY

SEQ ID NO: 14485 - DNA, 10429 bp, DROSOPHILA
tgccgtaaatgtcaaattccggaaaatagccaccccaagaatcagtctgtgaaaatttagtgtaccatttggattggaaattaggaaaacgtatagtttcatcttaaaattgctcaaaatgccgtgcgttggttgtggaaaaggtgagttgcatctcgatcaaaaggaatctttcccagcaaatgaaaaaaaaaataatccagattgcaagtgcacgccggagaagtgctgcgagaactgcaagtgccaaaaacccggacagtgtggatgcaatccgtcgaatgccagctcctcgggcggatgttgcaagaaggatggcggcgacacagcgggcggcgatgccaagtcaagttgctgtggctcaaagaagtaaaagcccaaccccccattgatgtcagtattggaaaaaaaaaatacgttttttccatttatttttcgatggccataactgctagtgagctgttatcattaaatacatttattgtttaatcgaaacaaaaccaagagttctataaattttactgcacaagataaactaatgacctataccagcattgctccttcgcgttgaactttaatgggtggcaatgacttctattttattttcttcgtgtttttttgttttttttataattttaaataacaaaaggtggcaaaatgaggcgcttagcaaaccagccaacaacaatgtgcactctgtttatacatagattgcttatggaattctataccaaagatgagataagatggaaaaggaggcgggtaggtggggggagtacgccttggatggaaattaaacaaattaaattcgttagcgatttctttatattacagcgttaaatttcatatatccgtttcagacgcatatcgtttgtaaaaaaacaatttaaaatttcacttttcaacagacacgagccacttactaatgatgcacttactcttaaatatacgtaatatagaccatctacacttcaattaatgcaatataaaaacaacttcctttaagggcaattaatagctagacgtttgtgtttccggttctcacgcactatagaagggtttagatttatacaaattagagggggagtcgtcctttcgaaaatcgaaccattctacttggtccatggacacctaattgcgcttcgctttgcgcttcttgcgactatttggcgcctgggaggaagaggacggggtcgctggactttgggtgctgacttggcccttctcttcgttgctgccgccgaacttgcgccagatgttgtgaatgaaaccgtcggcctcgttaatgttgttgctcctgtttgatttgtatgccacattgttgttgttgttattattattgttgttgttattggttcttgccgacggcggctgcgacggcaccggctgctgcgttttgtgctgcgctccttgggcgtattctcatgaccgcttcaccttgccattggacgcattcaccgaggtctgggagcggtaggaggctgcgcctccgccgacagccatttcggtcgcatgagtggcaacatggtggatgcccttctccatgcagccgtgatagatgggtcgcatgaactgcaagcatagcgtaggttagtacacgaacatcttcgctagattcccagctacttactttctcccacaatagcgttgcaaagtcatccaacttgccgccaaagtcgctgagctctccgctatatctggaattgataaaacatcgttggcaaaattatcatcaaaagctcaagctaaatcaacctacctaatgtaggcccacagagccagcgttagaagcgccacacccataaccaggttgcagaagttggcgaacgtatagagacccaccaatccaaagatgccgctaaggatgtacatgatgacggcgcaggcgaagtacaccgccggtgtccgtgctgccttaaagatgttcttgctctcgttgtgtgcttggtagttggtgaagacctcctcaagatcatcttccagttgcttgcggaatttctcggtgaactcctcaccacccatcttgcgcttggcggcgaactggaacagtgccttgtccttcacccgcaggtgctccgtctggagatgggcggtgcttaagtacggccgcgttccaccgcacacctcctccatgagctgtccgtacagctccttggcggcggccacggcagtcaaatggttagcctctgcggtggccaccagcatgctcttcggctcgggcagctcgttgcccttgtagatgttcatgtacgattggaagtactggatgagatcgcgggcccgcacccgctgtccgctgatctccttgtagacaaggttgtccggtgccagcagcatgggcaccagggagcgcaggctactcttaaactcgggcgtgatgtcctgcagccgaccgtcaaatttaggattggtggccacattgagacctggatggggcatcaggaagcaggccacctccgtgaaacaggacgaaatgtggcgacgcagggactgtagttctgggtgctgtttgtcggacacctccagacgtcgtttcagaatcttatccccgcccagtgcaccatattccgcctcgtagggaaagctccagtcccggacgaggaactgcagacgctggaacggctttttgccggtgtcggccagcgcgaggcgaccatactcagtgaagagctgcaggtgctgcaggtcgtcctcctggatgttctgtgacaggttgtatatctgcaccgaggacagcattgtgctcaacgcaaaaacggtggcacaatcgcgcaccgtgctctggctgtcgaaggcgccctgtgtgtccagcagaatgatggctatcttgtcgccgttgggatagtcgtgcaggaatatgtcggaccacatgagaatgccggtggtgtcgcgctcagatccgccgcgccaggagaaaccctccagcggatctgattcgcctcccagccagtctgtcgcatcgtgatgcacatactaaaatgttcaaaagagtgtggtaaatggaagatgcttgcagtggcagcaatttcaagactcacctttgaatacatatagcgcagaaaaaagtccagcaggaagctcttgccctttcggaaggctccagccacggagacaacgcagacgaaccgatccttgacctcatcccgcattaggacctcactcagcgcatcctcgttgagcacaaatgtgtgctcctcggaggcgttgatcacctgcactgccgatccgcccattatggtgtttggaatccttgtctgctattccgtttgctgtctctgttttaccggctatttttgcctccgttgggaaattctttcttattaatcttttggatttcgacctgtcaactgcaagcataaacagacagctagataagtatggagaaaatgtctgctctgtttttcagcgatttttccatttccggcaaagggaaaatttgcgagtctaggccaacatttaattgcgcaagcctctgcgccgtgagttcatttaaatttggcacagccacgagacacgagcgacggacagaaaggcctgcaattatgagaggtggccaaaaataaacccaaacatgcgctgctccccgatcgcagaagatgtcaacgtcaaccgaaggggcagtggggcactatgtaagcggattgttcaggtgcgtgggatatatgtacatatgtatgtatgtaccaatctatccgaggaatggtacttggtagatgtgtaatcaatcagtaatcaatgtttagatacaaccttaccattcaattagcatatggcaatctggttttcaaactatagttgttgcttataaaatcaactgtttttaggaacaaactaaacagattcggctgaagacacaagtatacaatttaaaggcatatggttttgattgtcactttagaaactacggctactaaatgataagaaaaccggtttattactactactactgactaaactttcaacattaaaacagatttcacggtgtattttacagcccatatggagaaaacatattcaattatttcagatactcaaaataacttggaaagaaattcatcggaaaccggtctttcggtgattttattgaccttattaaagttcttgattgatgtgttgtttttttgcaacacgatcacttattcatttgttccttttgggttttatcacaccaaatggcgaatgtgtactcaaagggtttccaaatcgggttaaacgaattcagcacagttgactgttcgtatgtaagccgtaggaagggaacacattaaaattaatttcgttagctgcgttgtgatgacgtcgacaacttttgtcgcgctacgcagtttgaccacttgaattctaattagaaacgcagccaaaacaagtgaagaacataccacattaagacaagagatcggtggggaattatgccacactcccgattatacaggccacataaaagttatgcttgcgtctaattgagtccgattcggatgcggaatgggaatatgaatataaatacacgaccagcgcgaccgtcaaccaaatcaaactgcaagcacaacacgcaagtcaccaatgaatcggctacctcaaaaagagagcgaagcggtactctctcttttccgatcaactctcatttgccgtcgccacatggcaaaataggaatagacaccgtggtggaagggaggtgggtaatgcaattggtccggcggcagctgcaacgttagcaaaatcgcgtctgtccaattaacacattgccacttaattaagaccaactgttgtccgagactttggcgcgctgaatgggaatttaaaattcaaaataacaatcacatctggcaatgccgtttggaaccaggcttgtccagcaggtgtgtgagcggtgccgccagatacggacgatcttcgcaacacaccagttgtcccacttacacttgcagcttttgcaactagcgggcgatgtaaacaaaggtgttggagagtaacagcaacagttgtgcggcctgcgtcgacgtcggcagagcgattagtcaactggaaatggaaacacggttgccgagagcaacaacaacggcagtggaagaagaagcagcagcagaagcgcttggaaaatgttgagcggggaaaaagaataaaagtttttaatttgcctaaattggctgcccgtgaaaagtgtttaattggcagtcctagcccccaaagaagcaacagaaagcccaggcggatatcagtcatccggcgtgcaggagcttagctgctcattcgagatttgcaagccatggaatgcggttcacacagcggacaccgcccaattccgatttggctttcgagctgcctcgtggccatgtgcttgggccttccgctaggagcagctgtcccccaggaagcacctgcctactactacgttggttgctacacggcacgaacggatcttctccatgaatcggtgtacgccaagacaccgcagacctgcatcgagatctgcgagcatcagggtcaccactatgccgtgctggcctccgagaagtgcttctgtgcaaatgtcctggagccgcaggagcaacaggatgaacagctctgcaacactcgctgcctggccaacaaagcgcagtattgtggcggagttggtgtgcactcgtactactccaccatactgaccaaacaaccgggtccgcatcatctaagaatctcgaacaaaacggagaacagcctgacccttagctggaatgcgtacgaggcgaggaaactactcctggccggcggcgcggaggcagtgcttcccaaccagctactggacaacttcctgatcaaagctcaggtcctgaagacctactcctcgttgcccgccttcccgcagcctgagtttatggtgcagagcacggaaacgcagtttgaactcacagacttgcatcccgccacgctgtacaacatatccgtgagagccatgtgcaaggatgcccaagtaggtcaatctgaatgcggacaggcctcgatagaagccaccacggaggttggtaatgcttgaattctaacgagaatcctaaccaataacattactactccaaatttcaggtgggccttccaagtcccgtgccagcacagccgaaaatcctcagccggactgaccgcactgtaaccatcgagttgtcgcccattcggaatgacaatggaccgctgagcaaactgctcgtcatcgtggaatacgtggacaacgccctgagtcagccattcgatgcccagctcctgggcagctggcagcaggctcaacaagatggagtgccctactacatagccgccgaattggactacgatcgaccggaggacaatcgcacccggcgctttgtggtcggcgatggcaagcgttacggacgatttaccaataagccgttggatcaaccagatgcacatgtccacatcagtctcggattggtgagtaatgcattaaattcgaatgaatatctctgtaactatttatattctaggtgagcacactggagggcgttaccaagacgatgtacagtcgtggaactcacgaccagcatgtgacatccctagacgactttagttacgccacctttgagaagggtcaatcctcggtggttgccctagctgtcacctgtgtgatcttcggctcctgcctcctgctcagtcttattgcctacttctatctgcgctacaagacctgccgcgggcgacgattgactggtggcaatacgcacgagatgacgctgcaaacgcccataatcgagcgggaaaataacggataccttgtggaggacgatccactgccacactcgccggaaaacttcaagcagcagttgcaacagttggtggaaggatacgaacggataccaaggaatgcactacgactaaatgtgaacgatgtgatcggagacggacgctttggtgagattataaccggaaaggtttccacaaacgattttgccagagattgcaccctgcacgtgctctgtctggacgatctgaatggtactacacaggcacagttgctgagagaactacgtcagttgtctcaattgaagcgccaggagcatttgctagatttctatggagtatcagcaagtcccgattggttctacctaatcttcgagcagcaacgcatgagtctaaagagaaaactggtggagagtcgcctgatggcaccgtcgccacgcttgacttccctctctgagcagctagtgctgcagtggatctacgagcttgccagtgccatgaattatctatccagctgccaggtggtgcatcgacagctctgctcgcacagcgtcttcgttaccagcgatttcaagctaaaactgagcgtctttggaccgctgccctacatgaacattgctcgccagcagccagaccacaaccggtggctggccccggaggtgctgcgccatcagcatcaccattccacccgttctgatgtctggtccctggcctgcgtggcgtgggaatgctgtgcccttggcggtactccctatgccaatgcagtggcaagtaaccaacagcttctagaggccattcgggctgcagtgcgtccggcgcagccagcctacgtctacggggatctctaccagctgctgctcaactgctggcagctggagccgagcgagcggagcagctgtgaggacgtggccttcggagtacgtcagctgatgacctcaccgcgtcatgccctcagctttgatcgagtggccggcggactagacaccctgcctccgtacctgccgcaactggaagccgttgctacgatgggctgaggtgcagccgaatagtataattagctttagtcagcgagagaccacattcgcatagagtagatttcggttctgagtcactgctgctaagagaaaacatcacttcatttcgattttagatgagttcactttcagtgttctgaagagaaaataatttgttttagaatttacacattgatttaataaagctcataaattgttattatccatataatattagaagtgagcatttatgaaacacaattcgatgtttattgttaatacgcacaaacttcctacaaataaaagagtgttctatgccagagcttatcagatctataaggtagttaattgcttatctacaacccgaaagaaaggaatcgactttcccccacgcgaaacaaagttcaagcgaacgtgctcgatggagagcgcgatagataaaagactactgacagtctggcccccaaaattgtgtaataaattgagggatccatagcgaatggatctaccaacagaccagcgactgtgattcccccgccgatcgctgatgttgcacaaaccagacaaaagcgaaaactaaaagcaaaaaaaaaaccaagggagagagccgcgaatgcgaaactttgatcgctggcgagcagcaattaataatagaaaataaacggcggtgttgcttaagtgtgagtggatcaaaattgacgattaatcagtttaaaggtcttgcattgcatctattgtttgttatgttgtttaagaattaattagggaaattgttggcagcagcctagatgcggttacatgcattattagtcatccgaaatagtagggcactttatgtatgtatattccattggtttggacaatcatcttataatgaagctacatagcaaaaaaaaaaaaaaaatctaaatctgtgtatattcttccgatatgcacttttcaaatgaaatgttcaaaattcgttatcagtacttaaaatttctcactatgtacaagcttatctcgggatccttcccaaagaagataagccattgtttctcttgtcgacgtgtaactattggatccaccaaaaaacccaaagcacatggctcacccggaatttagagcgactttcttatagagtatatggtaaatacggtaaatgaagcgcaacgatatccatagcgacttttggacgcttaccttgcccgcaattcaaggtgaaatgacgacgaacaattgaagtcactgaaatgtgtatacattccgagcaaatgggcaattattattaataaatcgagctgaatggctgctatcggaattcaggggcttcgactgccgaccatgctcatgaatatgtggaagatgatgatgatgatgaggttcatccggtattggccaactttgcgagtgttttgcattcgcctggttaaattgttattgtttttgttacatatacacacatggagattatgaggaatccaaggaaactggttgctcacacacgcacaccaacgcactgcgacggagccactcacgcacactaccaaatggtcggctaactgcgcaaataatgcggcttctgtgtcggcctttgttactcactttacttaaccatttacatcggacactggacttcactgcgctgcgatttttcgacactttggaagcagaaaagtacgtattttgtttgtgctctgccaatggtgtgaccgtacaccgttgggcgaaaaatcacctataagtgtgggggtgaaaattcattagccaacactgaaatgcttatcgataacatttagctatttttagtattagctaactggtatatattaacggtcatcataaggtcacactgcaaacggttaaacgaacggccacattgtgttggaccgatgatgtggatttaaaagttaaatatttcaaacttagttatagcaaatagctatggacatcacccagagcttcaaggccagcgtaatgacggtgcgcctgcagcgcaaggccgagctggccggaaaggccaagcccgccacagtgccgacaaaaactggaccaattggcccaaaggatgacttcgccaagcaggccaaggaggtgtgcaacaagatcacttcgctgcgcaatgtgctgatcgagaaccgcaccgcctacatgcgcattggccagcacctcaagtccgccgcacacatgaccgacgcgcagcgggatctgattgatcgcgagtcggagaagttcgtcaccttttacacgcagcacctggccaagatgcgcagcgattggaagagcgccaagcggaagccgcaggagcgtcagcacatcgacgccgtgctggacctgctggtcagctatttgcacagcgtggaacagatctatctggaccaaaagaagtaccgtgtgcaacacgaactggaaacctataggctgctcaagctggcggcggacaaaaagaagataccagtgcgtccggcgggcagcaacagtggcaagctgggcaggcgccaggtcagcaacgatgacagcgaagccacgaagtcatcttcacaagcaaatggcaaccacgacgagtccgccgacaatgactggaataacgacgcctggggcgactgggatgaagacgaggaaggcgacgaggtggacgatcacgatggcgagaagggcaaggaagccaatcaggccaatcaacacaaaccgcgtacgcgcaaacgaagcaaagccaa

SEQ ID NO: 14486 - DNA, 2267 bp, DROSOPHILA
tacggtcacaccattggcagagcacaaacaaaatacgtacttttctgcttccaaagtgtcgaaaaatcgcagcgcagtgaagtccagtgtccgatgtaaatggttaagtaaagtcgaaatccaaaagattaataagaaagaatttcccaacggaggcaaaaatagccggtaaaacagagacagcaaacggaatagcagacaaggattccaaacaccataatgggcggatcggcagtgcaggtgatcaacgcctccgaggagcacacatttgtgctcaacgaggatgcgctgagtgaggtcctaatgcgggatgaggtcaaggatcggttcgtctgcgttgtctccgtggctggagccttccgaaagggcaagagcttcctgctggacttttttctgcgctatatgtattcaaagtatgtgcatcacgatgcgacagactggctgggaggcgaatcagatccgctggagggtttctcctggcgcggcggatctgagcgcgacaccaccggcattctcatgtggtccgacatattcctgcacgactatcccaacggcgacaagatagccatcattctgctggacacacagggcgccttcgacagccagagcacggtgcgcgattgtgccaccgtttttgcgttgagcacaatgctgtcctcggtgcagatatacaacctgtcacagaacatccaggaggacgacctgcagcacctgcagctcttcactgagtatggtcgcctcgcgctggccgacaccggcaaaaagccgttccagcgtctgcagttcctcgtccgggactggagctttccctacgaggcggaatatggtgcactgggcggggataagattctgaaacgacgtctggaggtgtccgacaaacagcacccagaactacagtccctgcgtcgccacatttcgtcctgtttcacggaggtggcctgcttcctgatgccccatccaggtctcaatgtggccaccaatcctaaatttgacggtcggctgcaggacatcacgcccgagtttaagagtagcctgcgctccctggtgcccatgctgctggcaccggacaaccttgtctacaaggagatcagcggacagcgggtgcgggcccgcgatctcatccagtacttccaatcgtacatgaacatctacaagggcaacgagctgcccgagccgaagagcatgctggtggccaccgcagaggctaaccatttgactgccgtggccgccgccaaggagctgtacggacagctcatggaggaggtgtgcggtggaacgcggccgtacttaagcaccgcccatctccagacggagcacctgcgggtgaaggacaaggcactgttccagttcgccgccaagcgcaagatgggtggtgaggagttcaccgagaaattccgcaagcaactggaagatgatcttgaggaggtcttcaccaactaccaagcacacaacgagagcaagaacatctttaaggcagcacggacaccggcggtgtacttcgcctgcgccgtcatcatgtacatccttagcggcatctttggattggtgggtctctatacgttcgccaacttctgcaacctggttatgggtgtggcgcttctaacgctggctctgtgggcctacattagatatagcggagagctcagcgactttggcggcaagttggatgactttgcaacgctattgtgggagaaattcatgcgacccatctatcacggctgcatggagaagggcatccaccatgttgccactcatgcgaccgaaatggctgtcggcggaggcgcagcctcctaccgctcccagacctcggtgaatgcgtccaatggcaaggtgaagcggtcatgagaatacgcccaaggagcgcagcacaaaacgcagcagccggtgccgtcgcagccgccgtcggcaagaaccaataacaacaacaataataataacaacaacaacaatgtggcatacaaatcaaacaggagcaacaacattaacgaggccgacggtttcattcacaacatctggcgcaagttcggcggcagcaacgaagagaagggccaagtcagcacccaaagtccagcgaccccgtcctcttcctcccaggcgccaaatagtcgcaagaagcgcaaagcgaagcgcaattaggtgtccatggaccaagtagaatggttcgattttcgaaaggacgactccccctctaatttgtataaatctaaacccttctatagtgcgtgagaaccggaaacacaaacgtctagctattaattgcccttaaa

SEQ ID NO: 14487 - protein, 541 aa, DROSOPHILA
MGGSAVQVINASEEHTFVLNEDALSEVLMRDEVKDRFVCVVSVAGAFRKGKSFLLDFFLRYMYSKYVHHDATDWLGGESDPLEGFSWRGGSERDTTGILMWSDIFLHDYPNGDKIAIILLDTQGAFDSQSTVRDCATVFALSTMLSSVQIYNLSQNIQEDDLQHLQLFTEYGRLALADTGKKPFQRLQFLVRDWSFPYEAEYGALGGDKILKRRLEVSDKQHPELQSLRRHISSCFTEVACFLMPHPGLNVATNPKFDGRLQDITPEFKSSLRSLVPMLLAPDNLVYKEISGQRVRARDLIQYFQSYMNIYKGNELPEPKSMLVATAEANHLTAVAAAKELYGQLMEEVCGGTRPYLSTAHLQTEHLRVKDKALFQFAAKRKMGGEEFTEKFRKQLEDDLEEVFTNYQAHNESKNIFKAARTPAVYFACAVIMYILSGIFGLVGLYTFANFCNLVMGVALLTLALWAYIRYSGELSDFGGKLDDFATLLWEKFMRPIYHGCMEKGIHHVATHATEMAVGGGAASYRSQTSVNASNGKVKRS

SEQ ID NO: 14488 - DNA, 2611 bp, DROSOPHILA
gtgtatgtgcatgtttgagctcgtgttactttagcaagttgacttttgggatcatcattagagagcggagtgggtatgtgtcagtgtttgccaacatgcagcttgcggtttgagttttctctttagcacaatcccgatgacgtcagaagcttagcatcgaaggcacgccacaaagaaagttatttatggaaataatgttaattatcacagtaagcaggaaagttgattccatagtaacgtccattgcgatggcattaatttgctgaaatcctaaactttgctggcatttatttgtggttaaataataaggtatgccgtagaataaataatatagcataaccgatgcatccctttccatctccaccctcaagctataagcaatgtgaaagcggaaatgtcagttcactaatatcttcgattaatttaaagcctagcaaattctgataaatatataaatccacgatttaatattttaatggcattagacacttctcataaaactaccatcacaacagtcgctgaatgccagtgaaaaaatcggaagccactagaaaaccagttacaacccttttgccacacatgctcccccctatccactgataccaccggcagctctgcatcaataggcaaatgggtggtggtgctgggaatccactttcagtggcacatgtatgctggaacgattcgacaaaatgctgaaaacggaatttgcaaaatgtcacgtctgacgttcgctggcaactaagacggaaatttaccactaaatgacgaccaacccccgaaacgaggtgccactgatacgaggggcaacctcagagctcgatgaagtgcaaaatggaagcccagacgagtaactgccattatggggaacttcttcaagagagatgaatacttttacagtagtcatgcagtacgtacattgattgaaacaaattcgaataaatcaatccacatttaatttcattaattgttttggacaatgttacagaggataaaggactcaatcggtaagactccagccaaaggtatacggcttgttggcatccattggctgcatcatggcatagccgtcccagccgcaggaatcaccacccgcattcgttggcaggttgtagtagccgcaaggactgcccatggaggtttgcatttgctggcgctgtaaaatctgcgcctgcaacggttgcatcatcgcgagattgttagacggcgagtgctgctgcaccatgactgggccaggacaactcacagagctctgttggcttggcttggacatgtatgagggcgcaggataccgggtctccattcgttgatatataggttgttggacaatggacttggggcagttggtatgtggcgcctgtggctgtacctgctgcatctgcatgcgctgttgcattgctgcctgatgagcacctaagggtggctgtattggctttccgtccaccaataccggataaactttcccgccaaagacgagcccgctgccataggtgaccatgccattctgtggcacttgcggtgaactgtcttgcacagttgagtttttcattgtaatggtgtctctttttttttattagaattttctaattcgaatttcagcaaccgcactcctaaaagttgatcaaaatactgacgagagatttagatagatctgacaacagaatctcagcactcgcttgaaaatccctcggcctgctaattaatgtggcttaactctgagcaaccaccctatatttgcaagaaagaaaaactcagaggattttcgaccttatcatcacgtacactccgaattgataaactttgtcagctctctaggaagcgggagtcatttttaattaagccgagagtagaacttgaagaaggcacccgagattgtcagagataaaaagaaaaacaagaaagggataaccaagattacttgaatgtaaaataacaatgtgaattcatgtggccacaccaattatgtatacacaaataacagagaaagaacctaaaacagagtgattgccttaatggaattgttcaagactagtataaactgatttttgtgtcagttcgtttgagatgccttaatcgaaaagccaatcaaaaattagaaaaaaatagtttggctttccgacacaaacacaagaaattaccacatcctggcccataccttctaaaatttaatccgaatcaggtaagtttttgtgggttctgggtgtttaagaggttaaggtcaaacacgtaggtcccacaggaaattgccaacctgtctacccaacatgtttcctgatgacttcgacgtagaacccttcaatccattcaatgtgggaccacccaatagtggagcccgatctgaattcaaaatacctacatgcgttacgtatccgccaccggtattcgtacccaagtccgaatatgtacaaccatcagaggagttggtttcccggaagagcaaccaaagtataggcaagtcgactatcggcgaggtggacatttccaaggccatcaatgaagagatggccgtggccaagaagcaggccgaagttctcaatgaaaaagatcgcattgatgcgggtggtgtttcaacaacgaagctgtccaaggtatctcaatcaaaggaagcggt

SEQ ID NO: 14489 - DNA, 611 bp, DROSOPHILA
ggagtgcggttgctgaaattcgaattagaaaattctaataaaaaaaaagagacaccattacaatgaaaaactcaactgtgcaagacagttcaccgcaagtgccacagaatggcatggtcacctatggcagcgggctcgtctttggcgggaaagtttatccggtattggtggacggaaagccaatacagccacccttaggtgctcatcaggcagcaatgcaacagcgcatgcagatgcagcaggtacagccacaggcgccacataccaactgccccaagtccattgtccaacaacctatatatcaacgaatggagacccggtatcctgcgccctcatacatgtccaagccaagccaacagagctctgtgagttgtcctggcccagtcatggtgcagcagcactcgccgtctaacaatctcgcgatgatgcaaccgttgcaggcgcagattttacagcgccagcaaatgcaaacctccatgggcagtccttgcggctactacaacctgccaacgaatgcgggtggtgattcctgcggctgggacggctatgccatgatgcagccaatggatgccaacaagccgtatacctttggctggagtcttaccgattga

SEQ ID NO: 14490 - protein, 182 aa, DROSOPHILA
MKNSTVQDSSPQVPQNGMVTYGSGLVFGGKVYPVLVDGKPIQPPLGAHQAAMQQRMQMQQVQPQAPHTNCPKSIVQQPIYQRMETRYPAPSYMSKPSQQSSVSCPGPVMVQQHSPSNNLAMMQPLQAQILQRQQMQTSMGSPCGYYNLPTNAGGDSCGWDGYAMMQPMDANKPYTFGWSLTD

SEQ ID NO: 14491 - DNA, 4769 bp, DROSOPHILA
gttttatacatgtcacaaccttaaactgcgaaattaaatctagaaacgtactcgtagaactcctcgcaagatttatgaacaactactatgcacaatctacagtttgtttagcctgaaatttccaccgtacatctacatctccagatcgtctctctacctgctgagcaatttatcttttatcttggccgcaacacaaacacgaaattcatacctgaaacttcagcgaaataacctgcgaaaaggtgtacccaagaatccaagcacatacatacacacacaaatttgggcattatctttttttttttttgttttttggtttctaccttttcataagccaaagcttgatgtgaaatttcagcagtgtgtttaggaagatatgaaaaacctcgcgtcatgtgatggccacatggaactgaagttctggatgggtagaagccaagtacacacaactagactaagctgaggtcaatcacgtcggattcagattcggactcggtctcggaatccgaatggacagctacggatccaatccgattggatcaaatccgtacggaacgaggctctgaccttgccatgctcgccgtctgctgaattacatactatgtacgctggctggctggccggtttagtattcagctagtacgacccaccaagtgacacataactgatgttgaagggctggccatatgcgataaataattcatctgggggcatcgaaatgatcgtggatcgccgagaaacgtttgttttccgtattgagttgttggttgctgaaatggttggctgcctcagttgttggcgcctggttgcaaggcattcatagctgatattgcatttttttttatttgcaaatatacatatcaatttttgcaaattacgctggctcatgaataattgattggcggcgggcgtttggcggagaaatggaaaagttcgcgcccgataaggatgcttcccttttggccaccaccggcaccactatctatgattcatgcaccacctacacttctaaaaaaaaaaagacaaaaacaacagaactatgtggaaggcagccaaaagtgcgaaaggaacacatgttgatatatgggtcagtggcgataacagtgacggcttccaaagggggttacgcatccggaatacaacttaaatatttcatatccctcaatgcgcaatacaaatataaaatctaatgacgttatgtgtaaggtgataagagtatttatttacgcaaaatgtaagctgtgtacgtcgaacacgtggattgtaattgtaactatgatcgtttggataagtctattgatttaaatagagagaatgctagagataaagcatacgcgatgtgaagactcatccacgttgtcttcccccttgaaatcttatctagccccgccagtggatgataagcattctggcccgtttgataacactaattccattgattttgcgtaattaggctctgaagatagcgagcatggaaatggtatcagaattgcgctgaattatgtatagaacacattgatgatgtcgatcgaaaatagcataaaaacgtgctgaatatcagtgtagttacgtgtgcatctgcgtatgtgtgtgtacaacaaatacatatggatgtaagtgagcgggtgtcaaaatcacacgcacatggaaatgtcccgctataaataaatacgagtgggtggtggtgggtggattttgggcggtgggaggtggaatgggggcgcgtcgcatgcactttccattctgaacgaacttatgccaagattaaacaaaggcgaataattaatgcaagcccactactaactcacccgtaaatttgccggactgtttagcacatcgcacactgtaacacacactcacacaattcccactagagttattgcgggatcgaagataatgctggacgattctgggagctatagcttttgccgatgcggtgggcgtgaatgaaagaggccgtagagattacgccgagtgtcaattacgttgcaataatctcggtttggcacgggaaatcgaatcgaagcgagtccgcatggagcggcgagatttgcacgggatacggagtacgggatgcggccaccaacaccaacacgggctcagttacgcaagggcgagcttactgtaaacattttccggacacgctaaacatatgccgcagcagccatctctctttcgctcacaccgccaaacacaagaaatccgcaactaaaacaattttgttataacaattatcgataggcggtagggatgtggaaaaacaccgaatcatccgcgataggtatcggtgttccgttgctatcaacgctacacatcgatggcgatcaatgtaacctcttgcagcaaatattaaaaacgataaatataaattgattttagattaattatgtatatacaatatgtatttggagcagtgatgcaaatagtctattatggatatataaccataaattattgaaattaaagtcctaaataatagatgaatagatgactgaattatatttaaaaaaattaaagttgtaaaaattaatatttaagattaagatagatttttttaaaccgattaaataataattgattaaaaatacatcaatcctgtaaaaagacaatacgttatcgagccaccttaacgtttactgtcaaatatcgataattgtcataacccgcaaaacaggttgtgttcctttccagaaaaaattgtattgccaatatgagcaatactcagcacttaactattggttagtataagttactaagttccaaattcacatttaaaaggcgcatatatattgcaggctcgccaaagcccgtatttccggatgatgggatcttaaagctgtattcgatgcgcttttgcccctatgcacaccgtgtgcacctggtcctggatgccaaaaagattccctaccacgctatctacatcaatcttcgcgacaaacccgagtggttctccctggtgagcagctccacaaaggtgccggcactggagctggtcaaggaacagggaaatcctgtgctgatcgagtcgctcattatttgtgactacttggacgaaaagtatccggaggtgccattgtatcccaaggatctgcttaaaaaagcccaggagaagattttaatcgaacgtttcggacagttcatcaatgccttctactacctgttgctgcacgacaatcccgagcagctggttgacaccgatcactatgccggattggtcgtttatgaggaggaactgaagcgacgttgtaccaagttctttggtggcgacagcccaggcatgcttgactacatgatgtggccctggtgcgagcgctttgactctctgaaatacacttttgaacaaaaattcgaattgagtccggaacgttttcccactttggtgggtcctattggttttctaattatgtcttttaaattaccgagattgttctactgcagattaagtggcgcgacttgatgatccaggatcgtgctgtcaagtgtttctatctggatggacagacccatgccaaatacatgaactcccggcgatcgggccaggccgattataatatgctatagtaagatttgaagattatacatataatgtgtgactgatccatttctcgtttctagcaatgaggccaaacgtgtcaaattggggtagtctacgggatgatggcgtttccacttcagcattgtaccttttgcacatataacatgtaacacatgtacctactacggcagcattattgtgattgaaaaataaatctttgcattttcattgtttatacgggttgtaagtacgtttgttttagaattagattaatgaaggtatgaatgataaatggatatgaaaatacttatcttagagtagtcgtttgtagtctttaatatgtggtcaaacaattttcttaaatatgagcttaagaattttaaattcacccgctcaacaatcgaaatatattcgataaattcactcgtccggcgactgcgaccactttataaggtaccggaatccctctatttgttgtcagtcgatcggaactactttgccaccaacatttcacgtcttgggaattattttaaaattgttaacaaaatggccctgccgcaaaagcacttcaagaggggtgagttgggggcacttcaaggtcatcgggatagtgacgctgcaaaagttggcaattgatttcatagttttatctagaccccactttgagaggcgtaaattacgcagagatagagctttaattttagccaaagcataatggaaaactttctgctgacgtcacaaatcacccttcaacaggttcgcccaaaccggagatccccgaggatggagtcctgcgttactattcgatgagattctgcccgtactcgcagcgtgccggtttggttttggccgccaaaaagattccacatcacacggtttacattgatcttagcgagaaaccagagtggtacatcgactacagtccattgggcaaggtgccggctatccagttgccaaatctgcctggacaaccggctttggtggagtccctggtcattgccgagtacttggatgaacagtatccgggcgagggctcccttttccccaaggatccattgcaaaaggcgctagacaggattctcatcgaacgcctgtcgcccgctgtcagcgccatttaccccgtgctgttcaccaagaatccacccgctgatgccatcaagaactttgagaccgctctggatgtcttcgagcaggagatcaccaagcgcggaacaccatactttggaggcaacaa

SEQ ID NO: 14492 - DNA, 954 bp, DROSOPHILA
ctacacttctaaaaaaaaaaagacaaaaacaacagaactatttccagaaaaaattgtattgccaatatgagcaatactcagcacttaactattggctcgccaaagcccgtatttccggatgatgggatcttaaagctgtattcgatgcgcttttgcccctatgcacaccgtgtgcacctggtcctggatgccaaaaagattccctaccacgctatctacatcaatcttcgcgacaaacccgagtggttctccctggtgagcagctccacaaaggtgccggcactggagctggtcaaggaacagggaaatcctgtgctgatcgagtcgctcattatttgtgactacttggacgaaaagtatccggaggtgccattgtatcccaaggatctgcttaaaaaagcccaggagaagattttaatcgaacgtttcggacagttcatcaatgccttctactacctgttgctgcacgacaatcccgagcagctggttgacaccgatcactatgccggattggtcgtttatgaggaggaactgaagcgacgttgtaccaagttctttggtggcgacagcccaggcatgcttgactacatgatgtggccctggtgcgagcgctttgactctctgaaatacacttttgaacaaaaattcgaattgagtccggaacgttttcccactttgattaagtggcgcgacttgatgatccaggatcgtgctgtcaagtgtttctatctggatggacagacccatgccaaatacatgaactcccggcgatcgggccaggccgattataatatgctatacaatgaggccaaacgtgtcaaattggggtagtctacgggatgatggcgtttccacttcagcattgtaccttttgcacatataacatgtaacacatgtacctactacggcagcattattgtgattgaaaaataaatctttgcattttcattgttt

SEQ ID NO: 14493 - protein, 254 aa, DROSOPHILA
MSNTQHLTIGSPKPVFPDDGILKLYSMRFCPYAHRVHLVLDAKKIPYHAIYINLRDKPEWFSLVSSSTKVPALELVKEQGNPVLIESLIICDYLDEKYPEVPLYPKDLLKKAQEKILIERFGQFINAFYYLLLHDNPEQLVDTDHYAGLVVYEEELKRRCTKFFGGDSPGMLDYMMWPWCERFDSLKYTFEQKFELSPERFPTLIKWRDLMIQDRAVKCFYLDGQTHAKYMNSRRSGQADYNMLYNEAKRVKLG

SEQ ID NO: 14494 - DNA, 15504 bp, DROSOPHILA
catatattacatataatataaaattaaaaacacaattcataccgtttattttattacattacgtaaacgagaagtggactctaacaatggctcgatttttgccatttgtaaaccagttgctattgaatacataatcgccctcgggaagcggtacgtatttagtaaactgttggtttacaaagtgggtgggcagcttatccacaataatgtcgtgctgaaaaatatctcagaaattggttaagatcaatattacttacattcgaaaatgcttactgtatagggacaagaatggttgatgtttgagtagggtttaaataaggcaaagagaaataaaaccatgggatttccgacatttgcgaccatcttgcagccatcaaaggtaaaattttggttaaagggcattagaccatttgatcgcttgtgcaaccccagattcacctaaaagtggtactcatttattaaaatggttggcatacaaaatgtctatatcgcaccgtaaaatgatgtactggtatcttataaagccgaaccttgaccgataggtatttgtaagtgcgattcgtagcctttagaaagcaatattcaaaatcactgaattttttgtccatcgaagtacattttatattggtaaattcgatacgactactttccaccttaaaaacaaaacaattaggcaagcttttgtgcactgttaattgcacttaccaaatgcatttgaaaaaacataaaatatataacacctgctatcgtgatgcactggaaattcatcttagcctacgttccagatttcacaacggcgtcgatacgagttttaggtagaactgaaactaactactttgctcaaagccaataaacatttattatgacaaaggctaattaaaattcaattatatgcgcggcatcattattaaccgatttaaataaattcgctgattagtgtggatctttataacagtattaacaaaaaaaatttaatttgcaataagatcgattaattgttgtactttctgctaaaacgattaatttattcatatttaaaaaaccttacttcctacaaaaacacattacatttcgccttaagactagttattacagcactaaacaatcatttagacgacgaccaggtcggttagatttaattatacaacattatcatatcatcatcctactgactcctccgttcttgctctgctctggttcgttgtgaaaaaggtattacgtggatatggacaggttcgatatctgcagatcttccgaattgaggcgcagtatctgctgatcctctgagtttatgtgcaccaactgcccgctatcgaagctaagcagattgctgagcgttggcccattattatccgcttgattgccagcggtattattattgttattattgttattaaggttggcattgttgttggtgggcgcagtattgtcgtactgctgctgctgctgctgctgaagctgctgctgctgatgaagcgtatgctgattgtgctgcaagatggaaggtttcatgttcagaaatagtcatattttttttcttttttgttccaagtatttcaaaattgatatcttgcttcttaacccaccagatgatttgtggtcaggttccactgcagattgttggcgttgccaggacctccgcccgatgtcagcaggttgtgcatggtgaagggattgttgagattgctgagattattgctattgccgttggcaggtgctgctcctgtcgcagttgctgccgctgctgcaacagctgccgccgagaatttactttcccagctattgccgccaggattgccaaagggattggcatgaaattgcaaggactgttgctgttgctgctgctgctgctgctgctgctgttggtgttgctgctggtgctgatgctggtgctgttgctgctgctgctgatgctgctgctgctgggcaaggacctgctgggcaaacggattgtagttgctccccagatcagttgctccatattgctgctgttgctgttgctgctgtggatggttgggcgacatcagttgctgctggccattggtgggcgtgaccgcggaggccatgttgtagggcgagggcgtgctgttgtggttgtagttgctcgatggcgacagcggctgcggcgagggtgtgagctcaggaggcgcccgataagaaagcccaaagggttgtggcgaggtatctacaaagcgaagcgagccgtttttaataataatcagtcgaaattccatttacacttttaaagtaggccatttgatgtttatggaagttttaactaggttttttttttgtagttttagtgtataaaactcacctcttggttccgttttaatgggcggtatgttttgtgtattccagcaattcatgttagtttgtcctacaataaaaccagcaatcaaaaataaaaagttaacaaatcaagcagaacgtgtaaagcaaacaatataaaaaccaaagattgaagtaaaccataaaagattagatagtatttagattcgttagtgcggcgtacagattaaaaactctgcctgggcaatgggaaacaattaaaaatatcgctgtttttgataaaaactaaataagcaaaataataaaatgtaatcatgcatataaatttccgaaataaaacaaaaaaggtcaaagactgaaatgaactgttttgaactccgataaagacttactcagaactgtaaactcttcttggaagtaagaaatcctagagcaaaacttacttcaacctataaacagttcctttttaataaaataaactttactttttttttttgaatttttcttgattttttttttttgttttattaagctacaatattttatacaaaatatttttaccaaactcttaatttttcgtatataaaaatatcaaatattcttcgcatgtaaacgagtagaaaagcgacaaaaatttcatattgatttcgaatcaatctctcattttcttgactataatttcgactaatcatgtaaatcaatatataaatatagtggggacattacccccctttacgtagatttcatggtgttctgggtgagtggatttgtgcattgattgagtgctttctaatagtttctaaaagagtctattcgagtaatacgtcatcgggggcgatgatttgttaagtagtctttggtataccgaagaaaacatcaaatatatatgatgctatttgactaggtaggattcagttagatgtctagcatccatctcaaaacaaagtatgtgtacccaagtggattcaaacacatgggaaaaaatcgactcaaagtcgcgacagacacaatagaggatagagaagaccgacaccagtttgggaaaaatctcaacagtcaacttactgccatcctggtggtcattctgcaattgctgtttctgctgctgctggagcagcaggtgcatgggatcaccgccagtcttctgacgtttccgcctcaagtgcgctggatctataagacaaaatatacacaccgtgttgtaggtacatatgatcgggttttcggtttcaatttaaacaatatattcgattccattgggaaatcttacgctactctgaaaattgagtgatttcgcttaaatacaatagttaggttggccccttcaaatgggccacctggacaacaaacaaatcattgggtttgacccatttctttggggtcttttgcctggtatcacttacaaattattttggggatacttttagcacaattattaattataaaacaaatacaaattcattaaggtactgaagacattgcgctccagccggccttacaacaagtggacaatttgtggcgccagagttaatggaaacagattccgagaaatacaatgcaatttccactggcttgaagccaacttgcttcgttattgggtttcgttcgaggattttcctcggttcgtttgcctataaagaatataaacaatcaaatcaacaaatctagatgccatttgccgcagccaatcgcttggccacctcatccggcgttaaaatctcgccagcatccacgggagcatagtaggcggaggtctcgtcaaattcactggccgccgcaagtggcggaatactcgtgtacagggcaaagtgctcggcctcggtcagatccaaattggggtccagttggacattgaagtgaccctctatggagctgaccaaattgtgtagactttgtcgatcggcaatggcaaccagttccattccgccctcactaattggtatgtcagccagctgtagtgcagatgcagtgcgtctatccaacccagctcccaccgaaatcgtactggattgggagtagccctcggttcgctgttgctgtggcaaactattgacactgtcacctttcagcggtatatgcaccacatcagcattcaggtaggcgggtctctttccggaaacactgctcacactcctgcccacgggcttggtcagctttgatcctggtttcttggccttgacaggactggatttggcaggcgctggattcgagatgaacggggcagctgacttggaggagcgcagcgatgccctcatcgggtcttgcatgttaaagtgacctatacttggctccctgctatttgccttggaatccaatatagagctgttctcctgcccctgggccaaatctggtttgctcttgcggcgcgaaaaaagcttcgaaaagaatcccggcttcttctgcctgggcagtgtattaaagttcgggttctttggagcaggtgggagtcttttgtttagaggagactcgcctgtagatggcttggtctgaaccgtattggcctcgattgatcgattctcagcattgctgtcctgctttcgaattcttttcggtggcaatgggggcaacttatcctcttctggtggatattgaattgttagaattgccggcgggactggaggaactggtcgcatcggagtctccggcttgcgggcctgagagttcacctcgacgggatcgtaatgctgatgggcatcttcgggagcgcattgcgacatgggcggagttggaggcattatatcatccatgggtatgaggacgggattcttgaaggcaatctgtaagcttgtgtaggtggcagcgtcatcgaagctatcctccacctgcagcggcgcacgaccctgaagtcccgccaactcattttgtatggtattcttgtacgtatccctctgaactttgaagtccgtgtatatctcatccagttcggccacggtctcaaggagttcgtcaagggtcttatctgccttggatatctcaagggcggagtccaaaacatctgcctcagcagtgggactgggctcatggacttgctgttcaatctcactggacttcatccactcggtgatcttatcgttggccgtcaaaggacgtggctccaactgctgacccaaatccagttgctccagttctcgtaccttttcatcgataatggtgtcaatctctttttcctgctcggatcgcaggcgatgggcctcggcttctgcatgggcatccgccgcctccatgtcctcgggaatatgatctgaggtgtgatcgggcaagtgatctatagcctgatcgaacgattgctgcgctggtagttcctgatcctgttgcatcggttcttcgagctgaaaagattgctgctgttctagttgttgtaaatattgttcctgctgtaatgattgctcttgtgtatattgctcttgttgcaatgattgctcttgagtatattgctcctgttgcactgactgctcttgctcaagagctggctctgattgctgagattcctcatgattaaattccatttccgaaggtatctcacgttgcacatctattttcggtgtatccaaatcgataacctcaatcgttggcggctgcacttcccgtttggcgtccaacctgaggatctgctgaaagagatcttcgtccggcttccgcttgaggtgccgatgaagattccagaatgtatgtttacctgagtccattggcacgtactcgaagggcagggcctcgctggtaactccatccgagggacgtcgcagttgaataaaaacctaatggaacatagtttcttttaagagctgaggaatccttcttgataagctttaacgcaccttggcgggctctgtgatgtccagggtatgatagcgcggcgtcttaaaggtaatggcagtctgcttgtggacatccgtgtgctggaagtcaccaaaggcctcccaaacactctggccattcttctcctcaaagaatcgcacggagatgtcctccttggccaccttctcgcagagcaggatgatctgggtgttgccgaaaacggtggccgagcagctacacagccggcagatgaccaggtcggacatggccttcttatcgaagatgggctccgaaactaccggcggcagtggcgaggtgaatcgacccttctgctcgctctccatgaatacttgaaagcacaatcgcaccgaattcagatctatgctcgagggctggaaacgatgcgaaaagccagctaaagaaagcaaatgcaaagggttaaactttaaggctaacaatttttgtgttgtacaagaccacctactcttaaacggatccacacggatctcctcgcgcgccttgagcgccgcctcaatgtccttctttttgacacactggatacccaagttactgaacaccgctcgcattgtctcactgttgatctccagtgtacagacgcccttcttgcagccctccttgccaactaaattgtggggatgaggactgaaatgggaaagggaacacaattatttaattattttatacctacatatatatgtatccttaactcaccgatatggcgtatcctttgtgacgcaggagacaacaactacggcgcgtcccttgtagcccacaatttcgattgtcggataggtcttgttctccggcgtagagttcacgcccggaatggatcccgccgagcgtccctcgcactcgtagcgaaaccttagcgcctttcctgccggttgttcggtgatctttacgtagggcttctttcgcacatttttcgtggactgtgccaattgctgctgctgctgggcgggcaggccgttgtagttgaggctctgttggccatcaactgctggaccctgcccaggagcggctccattgttctggttcggaaacattacgtggccaaaatattatctaaaaattaaataagagtagcatacgttagaaatgtaatatttttataaataatagataagtattttaactagattcattgcaaagaataagaatatatattcttgataagatatagttgatctctgacaagtggccggctgtttgtctgtaaatggaatggaactcaggaactatcaatgtcgactcttgtttcgctttttaatcgttgttttgccaattcttattgatatttcaaataaatttgaaaatttctggctcgcttaggaacaagtttttaaatatatggtcttcgttaatcgtgagcatacaatatcaacatgtgtttcaagatctcacactaacttttcttatgggatcaacagaattcctcattttagaaataaaaatattaatgcaaagatttgcatttattgttgttgaaattttggtaatacttctgtgaattaatgcatatattgcttttgagttgatgtaatccactagaatagacacttttgttacaaagccagtgccgtctgatttaaagttatggccaatggcaaacgaggaacaattccttggcaagcagcaaatcgaaggcccccagacacgacaaacgatgacgacgccgatcgaaaataaagcctccaagactcgtgcagtgtgatctgctatataagtaagattctcctgaccacaggctatgacgaaccgaaccgtaaaacgtctggcagctaacggaaaaggtggaaaactctcccgcagacccgtcttttcagcgtgggtggtccgtattgccgtctgcgatagatggcattaattacaatattttaggggtcattagaaaaattgtatattttcataattctcatcggcatgtgatgcatgtgcagtgggtgcgtttttgcgatatgtttttcattttggccgggtccggccccggtctggtccggtgtagtccggctaaaggtccggacgccttgtttaaaaataacattttgcgtaacgcggccacaaagcgacaaaaactctgcctccccatatatatcaggtggtatatataggtgtatatatatcgatacatatacatagatcgcctcgcagactggcctccccggagctgggatggcattatattttgttttatttttcgcaagattggagcaattcaaacaaaacattttatcaatgatgccgcggcgaattgtcaacgaaacgagtcgtcgttcagtcgggtcgatcatttcaatacgcactaagttctactagatatatatatgaagactaagttgctgtgtgacctcagagtttgttctctgatcatgtctagacattggtctgccgttgacaaaagacgtcaatggctaaaaaaaaaaaaaaaaaagaactaatgcccgtgcattggtcccaaccaaacttggctgatttgtcgggggaaaaaggagaggaagccaggaaacgtgtgccaattctgttgatacatacaagtatatggaaatttaggaaacttatatgccttacacgaaaaaatatgaccgaagattgataccataaaaaaagatttcgttttcgtgccataaacatcattgtcatcaagattaaaataatattatcattagcagtttaatctttaaaatgaacacaaacttaaattcaaacaaatgataaacatagtcgatagcagtgattcattcctagtgcgattaataatatatctataatatataatatatttaaaagatcgtagtttttcttaagacttcgtcttactttcctttgcatttgttttagcttatcaaaatatatacgtattccattcacatctgttttatttctagaggaatttggtctaccaatcgaagtttcgcagctgccaaaggctttttgtgcgtcaactagaaatacatattttccttataaatcatgtccaatggagggacagtggtcaaaattacatattcaatggacacagcagcaaaccgataaactttatacaagatatagtataagaaatgaggacattttccacgcgccgttatttcacaaattagctttgccttgaaaatcaattgttgaggacaaaaaccaatcagcgtgcacaaaaatattggggtagtattacgtcatgaaataatttcagttttggcgaatatgaaaagctagttggacagaagccagcaaatgtaatacaaatgcaatccagttcatataaatattacacatgcgtatttatctttgtttcatttatgagaattgatcacctttcagttatcacggccaaactttgatggtaaaaacttcaccacacagataagatcgcaaattttcggatattaactaagttttattatttattaattctaatgttgacaacacaagttgattaatttacgagttgtttataatttatagtttataactatatgatccgttttttattgtagatggtagctttggtttttaaactgagcacctatgtatatattcgtatctataggtgctaccgagagaaatgttcttgtagaaccgatcaaacacacgcggaaaacgtcttgagtactcgccaaatgtctgaacactgaactgagaaaatgtttttgagaagaaacacagaattctttatgcacgcctgcctggcaaaagttttctcgtcgagctttctgctatttttattttcactaatattttaaaaatgtattttcttaacattttttttgcttgtgtatggatgtgtatttgtatcttgtcatgaatttatggcttttgcttgcaaggaattttctctttcgacgagcaagttgtccccatttttgagcaaaaaaatactcagacttcctttactacgtagcacgtcgcaagaaaatggaaattcaaacttaatttccgatgtcaataaactttagctggcaattgtgtaaacaaattgaaattattgagattggactcgagttttattgactcgtaggcaattgaatctaatgttaataaaaggttgctactttgtactacaatacaatgtaaaatatgtacaataatgaatttgttaactttgtgcttatatttgccgggtgataaattcgagcaattaaaatttaaaacaaaaaactaatcaaaatcggcaatttcctagaacataacattgtcactttttccaattgactatgtgttggccccaacaaaatgagtcacctttcattaagtggaaataaccgaatcgcacaaaatgcgcccaatctaatcaaaagatgcaaaggtagctaaaaattaacataaaatgcattagcagaggattgtttgtttttgcagtgaatataaacacacattatacaagtacatttgtttgtgtatctatagtaggcatttggttttaggctttggcatttccgtttcaatatccacggcaaaaacgaaaggaaaattcgccacttgtcaccgttcaatctgccttgagcacttggcgccagttgagaaagctctctaatgagtttgcaaaacccaattatacgatctatgctgggcagaggatatataggatatatgttaatatgaagatatgcctctgccagaatgaatggattgcattatattcgtacccagagatttttgaaaacaaaatatctcgattttgactgggacacgaatttccacgaaacacaatgagtcacaaaacaaatttcttgctatgtatgtatattgaaatatattgaaatatgcaaggaattcgctcgtgtgccacccactgtttggcaagaatcattcactaactacgtgactttctcattgagaacaaggtatggaactgaacgagaataggtcagttaccctgaaaattaaatctaatattttgaggatatcaaaatactggaaattcccatagtttcaatcgattaaccaatttaatatgtcattcaaaggctaacaagaattatactgccaccgaatttaattgcaatacactatttacgatggtttcatccgcagctatattgagattagaaccatttgcaaccacacaaatttgccaccgtttattcccgtcagatagaacctgcggcattcagactgataacgctcaggtgttgagcgtagaaaatccgaaaaaaaaactcaaagataaccaaaagtaagataagaatataaaaataaatctaaatgacgatggcctgagaatgtatcgatagatggtttttggtttaagtgttttgcaggggagttatattggaatttcctatggttttgcccttcgtttgctcaaaacaataaataatttatttgattagctattaattttcaccatgtcttgcaaaaatccacacgataaattcaaaagaaaaaagtctatgctgttaagccataaaatgaattaataaaataacgttctactcgttcaacgataactacttttggcgaaaaataaaaaaaaaaggtaagtaaacaaaataaaatgaacatttcgtttcgatcatttaacatgctaattttatgcaatttccaatagcaaagacacacagaaaaaagttcttttggcgccagcaccacaaattaagattaagatcaacatcaaagcatcagaagcagccaaaaattcctcagtgaaacgggttccgcaaaaaaaaaaaaaacaagaactccagacagacaaatgttttttaacgatcgttggcgtcaagcaatttacagctcaaataaaaataaataaccgatatgctgacaaatcgatggaactagttgccaaaagctatgttttgtatcgtatgaatacaagtccattatccttattttccacaccaaacaatgtttgttaaattagccgatcagggattattgtgcacatgtgacttccggcaaaaatgcagatacatatcttatccgtatctccaattataacggccacgatctttcttatcgagtggtttaaatgatattcgcctaaaatagaatccctattgattgatgatttgcatagcggagggccttacccacagccagatcgtgtatcaatcatgactcggatttagcatacggggaaactaccagtagatataaccaatattatctattgacttggccttagatctctgttagcacacaaatctctactcgagctttgtaaatcgccgatgacttgctggaaacgagttgagcgattttagcgctttgattttctttggtcccggagacgagagtctgatgttatgagtcagcacacggtttgcatttaacttggttgcacttttcgagtttacaccgtattagcagctaaaagcatttcttcattcttcataattacctgcgaatcaaaccaagaaccagtgaacactcatgacgaattcggtttcactttttgcttttatttgggccacaaaacgcacactaaccgcagtttgttctttcaaaatggtacttttcaaattattacttaaaaataatatcgaaccgttagggaattttaaaaatatttaataaaaataaaagaatgttagcgcaaacacgaccgcaggcgcatcgagtcgatcttagaatgaaacaattgaaaacctctccggcgtatttgagtggcagcaaaaaataaataaatacaaggggcaaaagcttttccacgagccccaccccctctgggccccacggcccccctcgcccacccacgtgcccgtaagaaactttcatttatggcgacgtcgaaaagccactgcgactgcgctgccatgtacacaggtgtttcggttgtattatttaagtttatcgtttgcattcaccgtagattatttaatacgcaggtggataattgccacccaaaaaacacaacaacaacaactgcggttacactacaaaggattgaatacgttctaatagtttttttttaacatcttaactattatttgtcatgcagaaattgtgagctattacaaatcttagcatccaggaattttaaacattgtcaaaatgttaaaactatttaggatgaaaaatattaatatgcgagaaaagtgaccagtcttggtttatcaaaccttaaaagtgtgaataatggttgataaatcacgatgttgttgctgtaaacattgttccgaaacgataaggcgtccaatgactcaataaggttatatttttaatatgtttaatgcaagatgcgtttctttgtaatgacattttgcgtctttggaagcaatagttgtgtacatatttattaaaatatcaagacccttctcgcaaaacgcagccattaggattttccaccgcactttattaatccgtgcaatcaatgttcagaatcaataaattaagctaggctctatagggggactcacctaagtcaaggagtgatctgaaatctcgcttatatgcattgatatcactgggtttgctaagtaaatcggacacctgaaattcaacgcgaaccaattagtacacttttatgtacattatttgttaagtttcttattgtgttaattggaaaattagtccgttgcacagcgagctaaataagccatttatttatagttgagaaatatggcgcttttttcatgttaatgttaacacatacacaagcacgcacggcaggaaccggtttatttattattttttatatataaataatttattcttccctccctttctcactcactctctctctctctctctttctgattcttcttattttattcttttttaacttttgcgcgcgcacaaagcgggtgcgataatatcgataataacgacaaaaacaacggatgggggagaacagttcgaacagaaactaatgaaaagttaagaaatcgaagtccgaagaaagagagagtgggcaaagagcgcgagagagcgcgtgacgtcgattttttctagggaattccgggctttatgcttatgcgatcatcgacgtacgactaccttttgtttttgtttttcgatttattcgatttataatttagggtaatttgttatcgcgctctgccctccattttctttggttattcttgcgatgtttgtggttaaagtgtcgatgtgccgtgtaatctaatcggtaaacgttcagttttaatagaaattatcaatacgtgcgccgagttttttatttttgttttttcctccgttatattggtgggtctcttttttttgtcactcgtaatacgaaaaagcaagtgaaacttgcttagagctcaattgaatttatgcgtttttatgcagctcttttacttttcgttttatttttatctactggtatttcaacctgccttcgagctccagaagagcgaaagagagcggaagcttaaagcacagcgaaaaaggtaaataaggcacaatttggaggtggagataaaatacccgtaacacacgcactaccaaccgatctcgacgcccgcgatttgaacactaactgcccaccaagaagaaacaggcgagccaaactttcaataccgtatgcgccactgaaaaataccgcaaaacttgcagatcgcgaagctttcaacggagttaagtagtcggccccaagctctgctctttgcagtctcgacttaagctcagaagagagacaatccgaagagcctagcttggcgaagagtgcgagatcagcatgtgctgagtcacgtacgattgaagttttccacttgcgacttatagcttacagatgtccacatcttccacaaatccgagtttcgaggaatacgcgatgattgcataaaggcgaaacaatatatacatacatataatataaatgtttttatctgactgataccgattagtaggaatgcaggccagttgtttctttcaaaagcttttaaaatgtgtcaccttttaaatctataacacgtattatattgaaggaatacctaattaattgaaaatgcatatctttttattaggagcatcccaaaggaatcggaaaatataaatattttgtttttcttaaatattgagaattcaactgtatggtaaccaatcatcaagaattcgattttcaatgtgagattcgtttaaatagccgaatattccaactatatatgcatatttacgaaaagtaaaatataaatggaaaaaataacttccgtcatttatctcagtgtctttcacatgtgactcatctccacgagcgactgcctccgaaaagctttttcagcttttatgaatgaaacagcacggtgagcactaactatctgtgtgtgtggctgcgagctatccatttaagaccccactcccacccatgcggttggggggtctgaatcagcgtacgattcctggaaaaaggataatatcctgcgccggcatttgttgtggcattaatttccactgcggcagagtctcaatgccgtgactcacttgcttcgtgctcagcattccggagcagctttc

SEQ ID NO: 14495 - DNA, 2462 bp, DROSOPHILA
atcggttggtagtgcgtgtgttacgggtattttatctccacctccaaattgtgccttatttacctttttcgctgtgctttaagcttccgctctctttcgctcttctggagctcgaaggcaggtgtccgatttacttagcaaacccagtgatatcaatgcatataagcgagatttcagatcactccttgacttagataatattttggccacgtaatgtttccgaaccagaacaatggagccgctcctgggcagggtccagcagttgatggccaacagagcctcaactacaacggcctgcccgcccagcagcagcagcaattggcacagtccacgaaaaatgtgcgaaagaagccctacgtaaagatcaccgaacaaccggcaggaaaggcgctaaggtttcgctacgagtgcgagggacgctcggcgggatccattccgggcgtgaactctacgccggagaacaagacctatccgacaatcgaaattgtgggctacaagggacgcgccgtagttgttgtctcctgcgtcacaaaggatacgccatatcgtcctcatccccacaatttagttggcaaggagggctgcaagaagggcgtctgtacactggagatcaacagtgagacaatgcgagcggtgttcagtaacttgggtatccagtgtgtcaaaaagaaggacattgaggcggcgctcaaggcgcgcgaggagatccgtgtggatccgtttaagactggcttttcgcatcgtttccagccctcgagcatagatctgaattcggtgcgattgtgctttcaagtattcatggagagcgagcagaagggtcgattcacctcgccactgccgccggtagtttcggagcccatcttcgataagaaggccatgtccgacctggtcatctgccggctgtgtagctgctcggccaccgttttcggcaacacccagatcatcctgctctgcgagaaggtggccaaggaggacatctccgtgcgattctttgaggagaagaatggccagagtgtttgggaggcctttggtgacttccagcacacggatgtccacaagcagactgccattacctttaagacgccgcgctatcataccctggacatcacagagcccgccaaggtttttattcaactgcgacgtccctcggatggagttaccagcgaggccctgcccttcgagtacgtgccaatggactcagatccagcgcacttgaggcggaaacgtcagaagactggcggtgatcccatgcacctgctgctccagcagcagcagaaacagcaattgcagaatgaccaccaggatggcagacaaactaacatgaattgctggaatacacaaaacataccgcccattaaaacggaaccaagagatacctcgccacaaccctttgggctttcttatcgggcgcctcctgagctcacaccctcgccgcagccgctgtcgccatcgagcaactacaaccacaacagcacgccctcgccctacaacatggcctccgcggtcacgcccaccaatggccagcagcaactgatgtcgcccaaccatccacagcagcaacagcaacagcagcaatatggagcaactgatctggggagcaactacaatccgtttgcccagcaggtccttgcccagcagcagcagcatcagcagcagcagcaacagcaccagcatcagcaccagcagcaacaccaacagcagcagcagcagcagcagcagcaacagcaacagtccttgcaatttcatgccaatccctttggcaatcctggcggcaatagctgggaaagtaaattctcggcggcagctgttgcagcagcggcagcaactgcgacaggagcagcacctgccaacggcaatagcaataatctcagcaatctcaacaatcccttcaccatgcacaacctgctgacatcgggcggaggtcctggcaacgccaacaatctgcagtggaacctgaccacaaatcatctgcacaatcagcatacgcttcatcagcagcagcagcttcagcagcagcagcagcagcagtacgacaatactgcgcccaccaacaacaatgccaaccttaataacaataataacaataataataccgctggcaatcaagcggataataatgggccaacgctcagcaatctgcttagcttcgatagcgggcagttggtgcacataaactcagaggatcagcagatactgcgcctcaattcggaagatctgcagatatcgaacctgtccatatccacgtaatacctttttcacaacgaaccagagcagagcaagaacggaggagtcagtaggatgatgatatgataatgttgtataattaaatctaaccgacctggtcgtcgtctaaatgattgtttagtgctgtaataactagtcttaaggcgaaatgtaatgtgtttttgtaggaagtaaggttttttaaatatgaataaattaatcgttttagcagaaagtac

SEQ ID NO: 14496 - protein, 677 aa, DROSOPHILA; identical to SEQ ID NO: 14478

SEQ ID NO: 14497 - DNA, 3650 bp, DROSOPHILA
tggctttgtttcagctatttttgggaaatactttttgtaaagtgcctcatgcttttgctcataacgccagtgccagttgaaccaagaaatggcgacttccacaacgtgtgccacgcgacccccaaaagtatccaggttgtaaaggtaagatgagggcgactgaagataggacatcggcgatggattaccaaccatttcgtctattttccaatcgattccacagggagctaatccgataattggagcctcaaaataggcggcaaggctataaaaagcatcgtacttccatatgtccacaataatcagatcaaactgagcctttcccggcctgagtatctctcgtcgcactccgtcgttattaaatacatctttagtaatattatacacaaattcattggttgcgtcgaagaactcccacgtgtttttcggggttgtcatttgtttcaatagttctaataagaatataaacgtatagatgcaaaaatctgattgtatataaaatatatattgccttacttaccgtcaaaactatttaacacttccggaacataaatgtcgtatatatttttcactggttcttcagatggaaatggacttactgaagttatttcgtgacccaaagaggccaagtttttgagatatggaagggcatgataatagtgcgaatgggagggaaccggaaacaaagccaaaattcgagctccatacaagaaaccaggaaatagtaaaattataaggtaaaacaagcccgatgccaacatttttagaacgcaactttgcttttatcaagatttcaacgaagactaagtgaatttcagccacaaaccattttaaaataaatattgataagattaacccgataagagtgttaggaagtataatatattttagcattaactaacaacatgcttacatcttcctaatctatatgtcataaatcatacatctacctttctacgaatgtacacagatatgtattctctattgatatatttgtaagttaatttattttttgcttgggtgatatattaccctttttactctttaagatagcccttaacagtttaattgcacaaaggacaacaatactaaggatcgcccaaacggccaggagaaaagttcccaaaacatccaagctgtggtaagttataaaatccagatttctgcccgctacccgcatatgaggtgctcccttgtgacgcaggacgtagtgagtccaccagatcgccgtatccaaaggattcattggctgatcccgatacctgtccgctgttctttttgccttgacaccaaaactcttctctgtcagcaactgatgaatggtgtccttaaattcatcgcttgtcatatccctatagtttaaaactaaacctatgccctgcgctttgatgtgttccatatttctgaactgatcgtagaagaacggcaatcccagcatcggtacaccacgatggatacattcgactgtgctctgtaagcctccatgagtaataaacagctttacgtttggatgagcaaggatgtcctgctgcggaaaccacgggctaattagaacatttgagggtacatctgacaactcatcagcatcgaatttccacaagatgcgctgtggcaggctggcaaatgtgtcaatcaatattttcctgcgatccttagacaaatttctacttcttacattggtgccgagcgaaaagtaaattactccatgttcaccagccccttggataaagtcctccaggtcctggggtaaagctttaggttgttgatcgacatgcataccaccgacttcaataatattgggaacatacggacgtggtggtgccatcgtaaagtgttggttaaccaaaatcaaggcgaaatttctggtgatctcggacagcgaacgtttatcggcaatttttgggaagtactttctgtagaccgcctcatgcctttcctcgtgccgccaatgccagttaatccaagccatggactgatccacaaagtgacccagacgtcctccataggtgtcgagatcaaaccagttgaaagacggagactgcaggtatgctaaaggtgatacattgcccactagttcatcaatcttccagtcggttccataagatgcaattccaatgatgggggcatcaaaataggccgccaagccgtatagagcatcaagccgccaaagatcgacaatgatcagatcaaactgaagactttctggttgcagaatctctcgacgcactccatcattttcaagcactttttcgacaagaccaagggtatactggttgatgtattcaaattcattccatgtgcccttccggtttgttagatttccaacaatttctgaaaggatgttttaaatacattttcgcataggtatattttaagtaactcttaagtattacttaccctctatattgtcaaataattccggaactggaatatcatgtatattagccacaggttctttcaatggaaatgggcttacagaagttatctcatggcccaaagatgccaatttctttagataaggtagggcgtgatagtaatgcgagtggcttggtatgggaaacacgccgaggatacgcgctccttccaagagaacaggcagcagggccaccaccagaactatcaatctcagaaccaacatactcataggcattcagccggaagactgaatcgttaagctagaccaacatattccgtctggctgatacgatttatcagttccagacaaatattttacaagttttctggttgattagcaagagacactaaccttgttataacgcaacataatcgcttatctgcttcataatttttctgtcccctataaataagtcaaaaattatttatacaccaaccgagtgaccctctaaacgtgttgaatatctcgattaaaagaagcacttgcttttcatgattttaagctttcatttctaaaacggtttctgaaaaacatttattataattatagaacggttaacaacgaacataatcagatgttctctaatctttacttcagtaaagcccgcttagcaaatttttgttagctgataagataatgagcctacatttgcaacagaaaaactttgataaagctctccatataagtgctattgtaacccattcactgatatctttctaatctgcttcacataataatagcaaaaattaactagacttaaaattgacggacttcaattattttattcctttatttagctgtagttttaaagttacatttacaaatatcacgaattgcgtccttcaaagaaatcttgccttacttcgattttagctttttctttgcatttccaaaatccgtaagcttgccaaggactcccacaatgatcgcaacaagtagaagagctccgcccaaaaggactccaatgacatccaggctgtggtaggcgaagaaacccaaatcctggccagccactctcatgtggtaggcacctttgtgccgcagaacgtattccgtccaccaaatggcggtgtccagtggactcattggctgatcacgatatcgttccgacatctgcctagcaatctgcgcaaatctcggctccttgagcaatatctcgatggtctccttaagttcctgctgtgtcattgtcgtgtgatcgagtcccaatccaaaacccgcctgcgtggcccgc

SEQ ID NO: 14498 - DNA, 1584 bp, DROSOPHILA
atgcctatgagtatgttggttctgagattgatagttctggtggtggccctgctgcctgttctcttggaaggagcgcgtatcctcggcgtgtttcccataccaagccactcgcattactatcacgccctaccttatctaaagaaattggcatctttgggccatgagataacttctgtaagcccatttccattgaaagaacctgtggctaatatacatgatattccagttccggaattatttgacaatatagaggaaattgttggaaatctaacaaaccggaagggcacatggaatgaatttgaatacatcaaccagtatacccttggtcttgtcgaaaaagtgcttgaaaatgatggagtgcgtcgagagattctgcaaccagaaagtcttcagtttgatctgatcattgtcgatctttggcggcttgatgctctatacggcttggcggcctattttgatgcccccatcattggaattgcatcttatggaaccgactggaagattgatgaactagtgggcaatgtatcacctttagcatacctgcagtctccgtctttcaactggtttgatctcgacacctatggaggacgtctgggtcactttgtggatcagtccatggcttggattaactggcattggcggcacgaggaaaggcatgaggcggtctacagaaagtacttcccaaaaattgccgataaacgttcgctgtccgagatcaccagaaatttcgccttgattttggttaaccaacactttacgatggcaccaccacgtccgtatgttcccaatattattgaagtcggtggtatgcatgtcgatcaacaacctaaagctttaccccaggacctggaggactttatccaaggggctggtgaacatggagtaatttacttttcgctcggcaccaatgtaagaagtagaaatttgtctaaggatcgcaggaaaatattgattgacacatttgccagcctgccacagcgcatcttgtggaaattcgatgctgatgagttgtcagatgtaccctcaaatgttctaattagcccgtggtttccgcagcaggacatccttgctcatccaaacgtaaagctgtttattactcatggaggcttacagagcacagtcgaatgtatccatcgtggtgtaccgatgctgggattgccgttcttctacgatcagttcagaaatatggaacacatcaaagcgcagggcataggtttagttttaaactatagggatatgacaagcgatgaatttaaggacaccattcatcagttgctgacagagaagagttttggtgtcaaggcaaaaagaacagcggacaggtatcgggatcagccaatgaatcctttggatacggcgatctggtggactcactacgtcctgcgtcacaagggagcacctcatatgcgggtagcgggcagaaatctggattttataacttaccacagcttggatgttttgggaacttttctcctggccgtttgggcgatccttagtattgttgtcctttgtgcaattaaactgttaagggctatcttaaagagtaaaaagggtaatatatcacccaagcaaaaaataaattaa

SEQ ID NO: 14499 - protein, 527 aa, DROSOPHILA
MPMSMLVLRLIVLVVALLPVLLEGARILGVFPIPSHSHYYHALPYLKKLASLGHEITSVSPFPLKEPVANIHDIPVPELFDNIEEIVGNLTNRKGTWNEFEYINQYTLGLVEKVLENDGVRREILQPESLQFDLIIVDLWRLDALYGLAAYFDAPIIGIASYGTDWKIDELVGNVSPLAYLQSPSFNWFDLDTYGGRLGHFVDQSMAWINWHWRHEERHEAVYRKYFPKIADKRSLSEITRNFALILVNQHFTMAPPRPYVPNIIEVGGMHVDQQPKALPQDLEDFIQGAGEHGVIYFSLGTNVRSRNLSKDRRKILIDTFASLPQRILWKFDADELSDVPSNVLISPWFPQQDILAHPNVKLFITHGGLQSTVECIHRGVPMLGLPFFYDQFRNMEHIKAQGIGLVLNYRDMTSDEFKDTIHQLLTEKSFGVKAKRTADRYRDQPMNPLDTAIWWTHYVLRHKGAPHMRVAGRNLDFITYHSLDVLGTFLLAVWAILSIVVLCAIKLLRAILKSKKGNISPKQKIN

SEQ ID NO: 14500 - DNA, 4537 bp, DROSOPHILA
gacattcgtccgcgtaaagcttttaattaggtccttgatcagcgttgtctttcccactttgggtggtcccaccacggcaatcagtacgggtggcggtacgttcggagtttgatcgacaaccggaatatgctgcttcttggccgtaaggtcctccttgcgccggaagttcctctctgctcgctgcgccgagttgatggcgaacgccttgggattcctctgcctggcggtcaactcgggctccttctggttggagtccttcttggccttcagctttttcttgtccgccttcacgccggactggcgggcgcggtgctgctttcgcttgtcctggccggcatcgtcggccattgttacagcctttaaatatattaaattattaaattatccgctgtttgcgcgctgcacgtggagccagtgttgccagattatgaaacagccccaaatcaattggtttcatccagccctgaatacatatcgtaaataaatagtacgatagactgactatattttgtttgttgcggcctacgaaatctattgagtaaagtaatggttttgaacgtattatttatttcagcatatgttatacgctactaggaatcataagcactttgtttgtaacacgtataagcgtaaccaaaatcgcaatcgtcaaactcatgaaaaatggtatacaaatcagaaacgtttaaaacacaaattaagaaataatttatttagtaatgaccgtttttaagtaaaatgtcaaataatacacatttcgacttccaccttacaacgacaagaaagaaacttacaaaattaacgtatctgtctattttctgatatattttgataaaattgtaatacaatttttgaatagcataattgtattgttttccacctctactggtatttcctcaagtgtcatcactacctcgcggcgtttcgctgtgagcgctttttcggtatttcgccacatatacggtcacacttctgcactgtggatttttcgcaatttgactttaattttattcgatcggatcgggcaaaatgtaccgcactcagatctgcaggccctaagcagacgcctaaggttcaactctactccgttcgcagctgcatcctttcacctgcgcaggtgaaacgcaagaacggcaaccagagccctggtgaaacagagtcggcgaaggagtgttcaagaggggggaggagcagtgcggcggaaggcaaaagtcttttaaggcgaaacagcgcacaaaagccaggtaaccaaagatagaatctggaaaatcggacattttcagccggttgaaagggggaggcgtaatcccacatgtgagttggaagtcactggcagtggtgggctgtgggtggtggtggtggcgatggcgatggcctgccagcctgtgcaaacccttccttcgccgaccttgcccttctatcgatttccgaaaaattgcatcaagccagatgcacagaaaatcacagctgaaggttaaacttttgcatcggatcagggccaaaaccaaacaccaccaccgaccgatttctttattctttgttcctcacggggcgcagacgaattcaagaataaagaacagccagtcgccacatatatatgtactcatgcacatatgtataatatatatgtgcttaaaaagcgactggcatacattatttctcgtcatacatatatgtatatgctcaaaaaacgtaatggcactgggccatttacctttagttttgcaggcatggaaagtccctgtgaatccgaaagttcgctggacggtggcaccatgctgccaccaagcccagtttcccgggagcaactccagaagaggatcgaatcgctcacccagcagaacaagtaagtcagacactatttttaaaatgcatttttaccacaaataatatgactctacgcttctagggtgctgaaagccgaactggataccttcaagaccaagtgcaaagtggtgcaagaggagaatcgctgcctcaagcaagcctcagtcatcattgttagtactacttttatgttatatcaaattgaaattgagtttcacaaaagttgcctcaatttacctttgtttactttcacagcaagccaaagccgagcaggaggaagaatacatctcaaacacgctgctaaaaaagattcaggccctcaaaaaggagaaggagactctggcgcaccactacgagcgcgaggaggagtgtctgaccaacgatctctcccggaagctcgaccagctgcgtcaggagaagtgcaagctggagcagacacttgagcaggagcaggagtgcctcgtcaacaagcttatgcgcaagattgagaagctccaggcggagacggacaacaagcagaccaatctcgagcagctgcgccgcgaaatggtcgagttggagaacacgcttgagcaggaacaggaagctcttgtaaacaagctgtggaagcgcatggacaagctggagaccgagaagcgttcgctgcaaatcaagctggatcagccggtttccgatccgactacgccgcgagacatcacaaacaacgcccatgccaatggtggcgatacggccaccagtttgagtgctcatatccagattctgcgctccgaagtgcttcgctatcgctccgacctggcgagcgctcagaaggaagccactatcaaaacacagcagtatgcgcaggaagagaagtcgattcgcgaggaaaacgctcgccttcagcgcaagctaaagcaggaggtggagcgccgcgaagccctatgccggcacctctccgaatcggaatcctcgctggagatggacgaggaacgcttctacaacgagaacctgatgggaggcggttcgttcgctgtagcgacggcagcagccgccgccgcagcttcagcggtgagcgcccaacgtcaacgcaccatcagcagtcccgtctcccacagtccctcgagtagccgacctctaagtccgggcacggcggtgcaaaaccgctgctatgcctgcggccagctagtggtgagtacgatattgtgaaatgttgctttccagatttgtaaaattaaaaattcttcgtttcagaatcgtcgtgccagcgaacgcttcataaagccagcactgccaacgcccatgctgggcctgaacacttccgcaccgaacgtgctgacctcaaccaacccactgctgggcattttgggaaccggcagctcctcatcgtccgcgtccgtatcagctgggaatgccgctggcggctttctctcgaatctgggaggcgaacgcctaagccttggctcgtcaaattcggctggcggcagtgccaccttcttggccggcggtggaggtggaggtctgctggcccagctcactagccactccagcgcttcgtcgtcgtcgtccaatttgatgaacatcagcctgaacaactcgtccagcggcaatcttgttaacagcagcagcaactcctcactgtcggcgtttacgccaaccaatccgcccagctcggcggccacggcctttatccagccagccagtccaatggacacgtccacctgcaaggactaggaggatgcagtagctctcgcacagggatacagaaaaatcatgacttattcacacactttcacacgaaaacacactatattcataaacacgcacgcatgcaagcaaccagtttaacgatcctaaaaacataagaaaacacagaaacaaaagatgagaaagtaactatcgtaagcttctccagggcgactcaaagtcgccacatttatatatggttaatatgtatatgtatgttctatttgatcaaaatctcttaaaacctttcaataacggaattcctaggcgaacgaatatttagcgctaatgtttaagatttgaatgtttttctaatttcgctcggttccagttaaagttaagtaaaacacagctaataatgagatatggaggatatagaggatgagaatgaggatggacagcacacgctaaccagatcgtatgaatttataaaaagggtgaattctattcatgtcgaaaccattttcccacaattccttcgcatgtgggcctaaaaaattttgaagtatgtttatgtaagccaacaaaaataaagttcaacaatttaaaattaaataaaaattcgtccagaatttttttaaattaaattttgtttaaattcgaggtgcaaggttttcaaaattgtagaaagtacaactgtagacactacaatatatgaattgtaaacatcatctgataggtttttttaaaatatgttttcagaaataacatttttttcttttgacgaaccacaagaacaagaattttcgaatttccgttaaatgcacgacaaatggtggggcaacacttaaagtatcccctaaaactgccttcatacttctgccacttggcgtgcacacactggcgcgcagctgcagctaacttcgcgttgcaaaatgctcttgtgttgtttgtgtttgtgattgtaaataaaggccaaacagtcagcgcgaagcgttaagaccaaagactaacctttgggccaggccaaaaagcggagtgtaacacc

SEQ ID NO: 14501 - DNA, 1853 bp, DROSOPHILA
tttaattttattcgatcggatcgggcaaaatgtaccgcactcagatctgcaggccctaagcagacgcctaaggttcaactctactccgttcgcagctgcatcctttcacctgcgcaggtgaaacgcaagaacggcaaccagagccctggtgaaacagagtcggcgaaggagtgttcaagaggggggaggagcagtgcggcggaaggcaaaagtcttttaaggcgaaacagcgcacaaaagccagttttgcaggcatggaaagtccctgtgaatccgaaagttcgctggacggtggcaccatgctgccaccaagcccagtttcccgggagcaactccagaagaggatcgaatcgctcacccagcagaacaaggtgctgaaagccgaactggataccttcaagaccaagtgcaaagtggtgcaagaggagaatcgctgcctcaagcaagcctcagtcatcattcaagccaaagccgagcaggaggaagaatacatctcaaacacgctgctaaaaaagattcaggccctcaaaaaggagaaggagactctggcgcaccactacgagcgcgaggaggagtgtctgaccaacgatctctcccggaagctcgaccagctgcgtcaggagaagtgcaagctggagcagacacttgagcaggagcaggagtgcctcgtcaacaagcttatgcgcaagattgagaagctccaggcggagacggacaacaagcagaccaatctcgagcagctgcgccgcgaaatggtcgagttggagaacacgcttgagcaggaacaggaagctcttgtaaacaagctgtggaagcgcatggacaagctggagaccgagaagcgttcgctgcaaatcaagctggatcagccggtttccgatccgactacgccgcgagacatcacaaacaacgcccatgccaatggtggcgatacggccaccagtttgagtgctcatatccagattctgcgctccgaagtgcttcgctatcgctccgacctggcgagcgctcagaaggaagccactatcaaaacacagcagtatgcgcaggaagagaagtcgattcgcgaggaaaacgctcgccttcagcgcaagctaaagcaggaggtggagcgccgcgaagccctatgccggcacctctccgaatcggaatcctcgctggagatggacgaggaacgcttctacaacgagaacctgatgggaggcggttcgttcgctgtagcgacggcagcagccgccgccgcagcttcagcggtgagcgcccaacgtcaacgcaccatcagcagtcccgtctcccacagtccctcgagtagccgacctctaagtccgggcacggcggtgcaaaaccgctgctatgcctgcggccagctagtgaatcgtcgtgccagcgaacgcttcataaagccagcactgccaacgcccatgctgggcctgaacacttccgcaccgaacgtgctgacctcaaccaacccactgctgggcattttgggaaccggcagctcctcatcgtccgcgtccgtatcagctgggaatgccgctggcggctttctctcgaatctgggaggcgaacgcctaagccttggctcgtcaaattcggctggcggcagtgccaccttcttggccggcggtggaggtggaggtctgctggcccagctcactagccactccagcgcttcgtcgtcgtcgtccaatttgatgaacatcagcctgaacaactcgtccagcggcaatcttgttaacagcagcagcaactcctcactgtcggcgtttacgccaaccaatccgcccagctcggcggccacggcctttatccagccagccagtccaatggacacgtccacctgcaaggactag

SEQ ID NO: 14502 - protein, 532 aa, DROSOPHILA
MESPCESESSLDGGTMLPPSPVSREQLQKRIESLTQQNKVLKAELDTFKTKCKVVQEENRCLKQASVIIQAKAEQEEEYISNTLLKKIQALKKEKETLAHHYEREEECLTNDLSRKLDQLRQEKCKLEQTLEQEQECLVNKLMRKIEKLQAETDNKQTNLEQLRREMVELENTLEQEQEALVNKLWKRMDKLETEKRSLQIKLDQPVSDPTTPRDITNNAHANGGDTATSLSAHIQILRSEVLRYRSDLASAQKEATIKTQQYAQEEKSIREENARLQRKLKQEVERREALCRHLSESESSLEMDEERFYNENLMGGGSFAVATAAAAAAASAVSAQRQRTISSPVSHSPSSSRPLSPGTAVQNRCYACGQLVNRRASERFIKPALPTPMLGLNTSAPNVLTSTNPLLGILGTGSSSSSASVSAGNAAGGFLSNLGGERLSLGSSNSAGGSATFLAGGGGGGLLAQLTSHSSASSSSSNLMNISLNNSSSGNLVNSSSNSSLSAFTPTNPPSSAATAFIQPASPMDTSTCKD

SEQ ID NO: 14503 - DNA, 2881 bp, DROSOPHILA
ctccagctcccgctgctcttgctgttgtttttaagagccatttgtccgatgcccgcggctatttacagccattgtacagacttggcgaatttatcaagcatggcggagtcgctcagtgggtcactggatggtgaatgttggtgaactggattcgggatgccggatactagatgctgcagctgacgttaccgccatttttccgcttttccttcacttcgcttttggcttaatttcaaaacagttgcgcttatattggcagttatgctgcaaatttattggcatgctttgtaaactgggttagttgcatatatctcgcagccgcaagctgcgagccaaacgattaacgttgagtaacccaaattgatgtcaccacccatcgaccgcagctaacagcccgcaccacccaccgccaccaacatttgcccgctggagcatcattttttcccactcagcaaagtttccgtagcggctggttatagcccataaattctcatacattgtcaagtaatagctaaaccctgtttaccccctgacaggcacaagttcatagagataaagaaaaaatgtggcacaatttggtcacaacttttttagaaaagagataaccaatttcttttcatagtgagattgcttaggtcttttaagaaatttcaactatggaaaagatgatcggcacttgatcttgaaagtgtggttttatgccccgttttccttcagtgttttttgagcgtaaacccaaagcagttccaagtttataaaccggcgacaaagaacgagaatctctctggcagtgcaacgcctgacacgggttaatccggtatgcgtggtgcttctcatttaacggtcattaacatagccagccggaatgcttggatagactgtgctttcgagcagttccgttcagaagactgaagaccctcgtgtctcgtggactgcaaatcgctttccggcagttcggcagggagtatttttgaatcgaggatccagaatgcggcacaacatggtggcctacctgtactgcctggtcagggatctgtacgccgagcacggagatccccgagtggcgcacttgcccctgctgggcaatctatggatcgtgctggccattgtggcgctgtatgtggcctttgtgctccactacggaccacgttggatggcgaaccgtgctccctttgagctgaaacgtgtgatgcaggtgtacaatgtggtgcaggtgctggccaatgccacgatattcgtcattggcctgagcaacacctacctccagccgggatacagttggacctgccagccagtggatcacacggacagatcaccggccatgatgaagacattgtacgcctcgtatgcgtactacatgctcaagtatctggatctgctcgacacggttagttgggggctatataccgtctatataccttctatacccatatacaaatgcattcccaggtattcatagtgctgcgcaagaagaactcgcaggtgagcttcctgcacgtgtatcaccatggcggcatggtcttcggcgtgtccatcttcatgaccttcctgggtggatcacactgcagcatgctgggtataatcaatctcctggtgcacacggtgatgtatgcctactactatgccgcctcattaggcgcggtgaagaatcttttgtggtggaagcagcggattacacagctgcagctgatgcagtttggctacctcacctttcatttcctgctcgttattgtccggaatccgtgtcagtttcccgtgttcatcgccttcatcggcttcattcagaacatcttcatgttctccatgttcttcgacttctactgcaagacctacatacgcaaacagcgcaaatcggcggagcacaagctgaaagccagctgagctgtactgccgttgaaaatgaggttcaagttcgcgccgcgtcatttccatattaaattgtgtaataagctggtcggtcgcttatgcaaatgggcaccgatcgaacccaaaatgcctggtataaataaacatttcggattgtttcccaacccctccgtttcatcgccacaaaatacatatcgctcaattgttttgcttttgtaatcaatttcaatttgccagcggctagattcggaggctccttaaacttttctcgaaaacttcttaaccgcctgggaaaatcgaaatggagcacggagagcgaaggcggcgacaagttatgaagtaagttagccgggcatatcttttattaaagggttaaatgaaatatcgatgaagtcggcaccagttatggccgccacgtgttcccgacccacatttctctatatgcttcggccatgtgtcgcatgggcccctgggccaccttttaactttctggccagcgttgtttttttctggcccccttttcaaagccaaagagtggaaaaaccagctagcacacccacagtgttaccccatgttgaacacatttgcctagaaggctgcctcattcatattttttccccctctttttttttgtttttgccatggcattttttctttgccagaagttttacatctgctttcgctcccaaaaaaaaaaaaaaaatggaaaaccaaggggcgaaatgagggaaaccgctttaaaaatgcttgtaagcaggcagcaagtggaaagccgcagggcagcgtttgtgcctcgtttaggaccgcccgcacaatattttttcagttatgtaaatttttggcccagtccggcgaatacttctcttaggcgacggcggcggcatcatcaaactttgctgctcactcggccgagagccttcgatggcaaattaaaagccaacagtccgaaggtcgccttatatttgcggctggcgcaaatggagcttattaagtggcaacagcagatcattgccag

SEQ ID NO: 14504 - DNA, 819 bp, DROSOPHILA
atggtggcctacctgtactgcctggtcagggatctgtacgccgagcacggagatccccgagtggcgcacttgcccctgctgggcaatctatggatcgtgctggccattgtggcgctgtatgtggcctttgtgctccactacggaccacgttggatggcgaaccgtgctccctttgagctgaaacgtgtgatgcaggtgtacaatgtggtgcaggtgctggccaatgccacgatattcgtcattggcctgagcaacacctacctccagccgggatacagttggacctgccagccagtggatcacacggacagatcaccggccatgatgaagacattgtacgcctcgtatgcgtactacatgctcaagtatctggatctgctcgacacggtattcatagtgctgcgcaagaagaactcgcaggtgagcttcctgcacgtgtatcaccatggcggcatggtcttcggcgtgtccatcttcatgaccttcctgggtggatcacactgcagcatgctgggtataatcaatctcctggtgcacacggtgatgtatgcctactactatgccgcctcattaggcgcggtgaagaatcttttgtggtggaagcagcggattacacagctgcagctgatgcagtttggctacctcacctttcatttcctgctcgttattgtccggaatccgtgtcagtttcccgtgttcatcgccttcatcggcttcattcagaacatcttcatgttctccatgttcttcgacttctactgcaagacctacatacgcaaacagcgcaaatcggcggagcacaagctgaaagccagctga

SEQ ID NO: 14505 - protein, 272 aa, DROSOPHILA
MVAYLYCLVRDLYAEHGDPRVAHLPLLGNLWIVLAIVALYVAFVLHYGPRWMANRAPFELKRVMQVYNVVQVLANATIFVIGLSNTYLQPGYSWTCQPVDHTDRSPAMMKTLYASYAYYMLKYLDLLDTVFIVLRKKNSQVSFLHVYHHGGMVFGVSIFMTFLGGSHCSMLGIINLLVHTVMYAYYYAASLGAVKNLLWWKQRITQLQLMQFGYLTFHFLLVIVRNPCQFPVFIAFIGFIQNIFMFSMFFDFYCKTYIRKQRKSAEHKLKAS

SEQ ID NO: 14506 - DNA, 3828 bp, DROSOPHILA
ggaatatgctacaaggttaagtataagtataaaaacaataatatttttaaacaatttaaaaatctttatgctttaattccttctcttagctcaacctaaatgtttaaatagtagaatatatagataaccatttcagatatgcatttttcaacttgcgcttttcgctcagtgcacaaacacactcggaaaagctgtcgtgtgtgttgcaagtggggaaactctgtctttttggcatttcatttccttcatttcagccgttttgcacctcggagcggtttcctttactttattttatgattttctcctcttttttgttttttttttttgatcggcgggagtggtgttgtgaatgtgggcggccggtacagtgacactccttgtgttttcctatcccgggactcactcgttctgactggttttcagcgacctacgtatattgatgctgcttaatttaatgctcgagtgcctatttaaattttgccccccatctcatcgtctgcatttccaattttgttttgtcatttgcgtttggtttgaattttactctcgtttcgcttgctagcgaaatcaatcagcggccggcacgtgtgtgcattgataacgtggccaataatagaaaagcgaaatgtatttttgccagcccatgaaaatacatctcaacttttcgatgcgagttagcgattgtttgtgcgctgggtggaaaagatgaaaacaattttttgcagcatgctgttaggcagtaatttgcttgtggcatcaggaaatggatgtggcacaatggaaatggaaacggttgaccagaaattcaaatgtttggcaattacatctgtttgttcgagataaattcacattatggttttcccaacgatctgaatgcacaaaccatatcaccatatcaattactctttatatagaatttaataacatagcatgcttttaatactttagtgtggaaacttatttatcatagatttttatacaaaagtgcaaagctacatttctagttgcgtttgactttagtgctttgagttctctctcctttgagtaataactttttaagcagcttatagatagtaattggcagtacaattagcaacagaaccattactacaaaaataattaggagcacatcaacattgtggtactgccaccagttcagcctttgtgccgcacttttcaaataggcagctccttgatggcgggtcacatgttccacccagtatatcgcattttcaattggcgtttgttgttgatcccgatatcggaaggatatgccctgcaccactttggtgtaggatggctcacttgtaatccgctcgattgctttccggaattctacggcattcagcgtcttgaagtccagcattatgccatagccgttttgctcggcatgagccatgttgaaaaactgatcactaaagatcggcaaaccgatcacgggtttagcatgataaatggactccgtggtgctcagcatgccgccgtgggtcacaaatgccatgatcttgggatgggccaatatgtccgtctgtggaaaccagtcggaaatgtagacattctccggtttgttgggcaggttatccagctcaaatttccagagaacacgctgtttgagcccacctaatgctttcaggatctcttgaacctttgatgggggtaagtccttggtcttgagattcgatcccatggaaaagtaaatggctccatgttctgactcattgatgaatctctcgatcttctcgggcagtggattccactttccgtcgatatgcatgccacccacttcaatcatgttgggtgagtgcggtcgcggaaaacttagtgaaacatgttgattgatgagcaccaaggaggcatttcggcgcatcttatagaaacacctcttgttgcccggaaagaactccttgtataacttctcctgagtcggtaagaaatagtagtccagtagaactctttcatagccaagaaaagccacgttcaaaaggcgttcgtacagcgacatgtgatcgttaaagggtagcattatgtggggcacgaacgaagctggagcgggggaaccaacctgaaaaagttaaaatatatttagtatttcaaataatccttaaataatattataaactaaagatcatcatttcaccaaatgtgaaatacgactgacttcaacataatgcttttctttcgtttatgaaatttgaactttcattcatatgatatagaagattccttttttgttcgttagaacaaatctgtttatcctttacttaccatatctgtgataaatgtcagacctccaccggtggccaatccaatcagtggagcattaaaatgctctgccaagccatagtgggcatcattgtagaaagtctcacatatgatcgcatcaaagctttggttgctcttcagaaaatcctggaaattggagtcctcgaaaaggcctctggtgatgcgaaatcccatttgataatgatcgatgagattctgagtatatgtcttttggatagatgcccacaaggctccaatgtctcctaaggaaataaccggtttttaaaaaaagtatactaaaacaactatacataataaaagtacttacctcccatgacttcgatcacatttggcacacttacatcagtataaccaggaatgggttttttctgaggaaagacggacactacggtgattgtatgcccagccttgaccaatcccttggccaaagcgtgtcccacattaaagtgggaacgaccggcggaattcagaaccatcaggtaattgtatccacttgagtatcccaagctgcacaatagtcccaagatcaaggtgaacgtacgcatggtgatgaaaatcaaccggcgaaccaataaccaaaccgaactgagcgcgtttctgcaacacactgataatgcctactatgctcaacatggatctgagtatatatacaatcattgtgaaattaaacttttgtaaattcaacgagagacccagcatggaattcgcaggaatcaaaaggtaagcacacaattttgattgtggaaaatcgtgctcgtcaagtcgactgttgaatgacctatatttatctatatcaatatattttaagttggctaatacatttataatacattatatacttaattaaattattagttcatatacaattgtattactttacaattattactcacttttaaagagtagtgcgaaggggtggaaatgcgctgatcaatcagcattaagttctcatgtttttgcaaattctcaagagaactcaagcaaacaaaaaagtttttcgctcaataaaaatctttcagttaagagtaatttataatcaaagagagaagaacgaatgctataagagagaaactttaactcaactaaacaaacatcgatagaaaataaaacaactttttaataaattagttattatttaagcaacgaggttataaatatatcactttaactattaaaaataaaatttattaaaaccatattattatatattaactataccatgtatcattttctcaatgaatatacagacacacaaagttgtaaaagaatattctttgtggggcagccgccacttcaaacgtttcactaatctactgacaaagtttcttatcaaatactataactactagaaattaagtaaacctgcttcagtctgttttttaaccttcaaagacgctgtcgcaatgcgttggctcctaaattcgtggcttttgctaatcttagccctttttggccaatcatggggctattcctacctgatgatcagccatactgcatcgaaatcgcactacgccgtctgctttgcattggccaaaggattagccg

SEQ ID NO: 14507 - DNA, 1560 bp, DROSOPHILA
atgcgtacgttcaccttgatcttgggactattgtgcagcttgggatactcaagtggatacaattacctgatggttctgaattccgccggtcgttcccactttaatgtgggacacgctttggccaagggattggtcaaggctgggcatacaatcaccgtagtgtccgtctttcctcagaaaaaacccattcctggttatactgatgtaagtgtgccaaatgtgatcgaagtcatgggaggagacattggagccttgtgggcatctatccaaaagacatatactcagaatctcatcgatcattatcaaatgggatttcgcatcaccagaggccttttcgaggactccaatttccaggattttctgaagagcaaccaaagctttgatgcgatcatatgtgagactttctacaatgatgcccactatggcttggcagagcattttaatgctccactgattggattggccaccggtggaggtctgacatttatcacagatatggttggttcccccgctccagcttcgttcgtgccccacataatgctaccctttaacgatcacatgtcgctgtacgaacgccttttgaacgtggcttttcttggctatgaaagagttctactggactactatttcttaccgactcaggagaagttatacaaggagttctttccgggcaacaagaggtgtttctataagatgcgccgaaatgcctccttggtgctcatcaatcaacatgtttcactaagttttccgcgaccgcactcacccaacatgattgaagtgggtggcatgcatatcgacggaaagtggaatccactgcccgagaagatcgagagattcatcaatgagtcagaacatggagccatttacttttccatgggatcgaatctcaagaccaaggacttacccccatcaaaggttcaagagatcctgaaagcattaggtgggctcaaacagcgtgttctctggaaatttgagctggataacctgcccaacaaaccggagaatgtctacatttccgactggtttccacagacggacatattggcccatcccaagatcatggcatttgtgacccacggcggcatgctgagcaccacggagtccatttatcatgctaaacccgtgatcggtttgccgatctttagtgatcagtttttcaacatggctcatgccgagcaaaacggctatggcataatgctggacttcaagacgctgaatgccgtagaattccggaaagcaatcgagcggattacaagtgagccatcctacaccaaagtggtgcagggcatatccttccgatatcgggatcaacaacaaacgccaattgaaaatgcgatatactgggtggaacatgtgacccgccatcaaggagctgcctatttgaaaagtgcggcacaaaggctgaactggtggcagtaccacaatgttgatgtgctcctaattatttttgtagtaatggttctgttgctaattgtactgccaattactatctataagctgcttaaaaagttattactcaaaggagagagaactcaaagcactaaagtcaaacgcaactag

SEQ ID NO: 14508 - protein, 519 aa, DROSOPHILA
MRTFTLILGLLCSLGYSSGYNYLMVLNSAGRSHFNVGHALAKGLVKAGHTITVVSVFPQKKPIPGYTDVSVPNVIEVMGGDIGALWASIQKTYTQNLIDHYQMGFRITRGLFEDSNFQDFLKSNQSFDAIICETFYNDAHYGLAEHFNAPLIGLATGGGLTFITDMVGSPAPASFVPHIMLPFNDHMSLYERLLNVAFLGYERVLLDYYFLPTQEKLYKEFFPGNKRCFYKMRRNASLVLINQHVSLSFPRPHSPNMIEVGGMHIDGKWNPLPEKIERFINESEHGAIYFSMGSNLKTKDLPPSKVQEILKALGGLKQRVLWKFELDNLPNKPENVYISDWFPQTDILAHPKIMAFVTHGGMLSTTESIYHAKPVIGLPIFSDQFFNMAHAEQNGYGIMLDFKTLNAVEFRKAIERITSEPSYTKVVQGISFRYRDQQQTPIENAIYWVEHVTRHQGAAYLKSAAQRLNWWQYHNVDVLLIIFVVMVLLLIVLPITIYKLLKKLLLKGERTQSTKVKRN

SEQ ID NO: 14509 - DNA, 12558 bp, DROSOPHILA
gaatattgacctatcgacggccctacccggcgccgatgccatcaatcagataattgccgatccggagcatgtcaagacgctgatcgtgcacctgcccgagtcggaggatgtggacgatgatcgcaagcagcagatcaaggacaatatcacctccccgcagttccagcaggctctggcccagttctccagtgccctgcaatcggcccagctgggacctgtgatcaagcaattcgagttgtccaacgaagcagtggccgccgccttctctggcaatctagaggattttgtgcgtgctctggagaagagtctgccccccggtgccaccatgggtggcaaaccctccgccagcgagaagaaggccagcgatcccgaaaccccaacttcagtggcccgcgatgagaacacagatcccgctaccgaaaaacaggaggagaagcaaaagtagcttacgtgtgcggcttggtagtcattgatatggaatccgaaagcaaattttttcatgtgctgagtgatttttggatgctaaataaattcaaatgggagttaatcggtagttatctatctaattgtgtgtttgatatacatcaaaacggcttattaatttatatttaaaatattactactttaataaaaggatacgcgttttggtaagtactcgtccagctcttttcagaatgcatcattatactcattatacttgggtttttggcttacctaatttaatttaaaaaaacaaagtctaacgtgtacaatttattttaaattttgaagttaataatggggggatatatggaagtaacggtaatattaatcccgacaaggtcattttgttggtgtccccctaacaaaagctcgctgccccgctctctcatcgcaacacactggtcgtccctttctggcgcgaattgcgcgctctctcagcgagagccgtctcacacagatatatacacacacaggcacacgcaacaatatttattttattcaattccaaaacggccagcaaataagttgtgtttgtgcaaaactcgcgcgttcgcaattttccgaagctgactctcaattctcatacataacgatctcaagcgatctccgccaggcgaatcaaacccggatatatccagatctgcagtaattgccatattttttcgccaatttttgcgttgcgggctggatgtttttgtatctgttgttgttggtgctttcattttgcagcaatctctgtgcctgtgtgtgtttgtgtgttggtgcttttggcggacgtgagaaggtgtgtgtgtctagtggcagcctgtatgttttttttttgcatgactgcttcgcggagctgtggggaaagcttttccctccaaagtagttgtcataaaaaagttaaaagccgcggcaaaaacaaaaatcaaagcaaacacagaaagcgcgaagagagagggcagtgagacagagagagagagagtcgagtgcctaacgcacaccgacaacctttgactcacacgcacacacacgcgcgctgttaaacaggcctggaagcttgcaaaaaataaaactaaataaaataggagctgcttaagagtgtgtgttgtcaaatagcaaagtaaacaaaaagctccccggactcgcaatttcatgcatatctccggcgcaacgatctggcaacactaacaacaacagcagccgcacaaactgcgttttaaccaattccatttccatttcctgcacttatctttctcgtttcttccaattagcgctggaaaagtaacgtccgcaacggtttaaatccagtcgagacgcaaaccccactcaactccttaatgagttcccctccattaaacggaattcaccaaaaaaaacgattgatttgccgctgataaagctgataaaagcgcacacacacaccaaagtcagctgcaattttgcgataaggtaagtacaaaattatgaatctttcaatttgccggcaaatggaggcttccagaacagctgcaggagctgcaagtaaaatggaagtgccccaaaataaaaaaaaaaaaaaaacaaaaatacaggaaaccaaaacactaatggcgcctgagcatatgctttgggaaattttcaagagcgccaagcgtgtgagcgcgggggtgcgagagggacgaccgtacagacagtgtttatgttttggtagaaaggtcacatccttagcttccaatagaactttcgttcgttaatatccccgccatccacgtccctcgcgaattacgtcacgaatcgacgaagaagttcgtgtcgacaggtttacatgctcttgaacttttaacaaactaataatacccttttatacagttattgcgataggattatatgatccaatcctaaaccgattaaaatcttatcaaaacattggggagttaaaatttatatgagttactaacttataacaaaaaccagtaatttaaaaccaatttgtaaggacttatgctataattaaacaaagctttttaacgtttctagcgacatattaaaaaaaggttttataagtataaaaaacttatcggtttcaaaaacttaaatttgctatgttattaatgcgcaagctccaatttgcaatcttatgatcgaagctataatacctcgttcgcaacttcaaaatttaaaagtgggtggtgaaagtttttacgacgtgactccttcaaaacggctggcgaacaggcggggagaaagcttgcagcctgacattgaacttgggggcactctgaacagaattctattaatcacagggtgccgcagctttttggggcaactttcaccaaccatttttgcagctgccacactccaacagattgttgccagttgcagccatcgatttcgtcgcaaatacgtacatattcacacatttagagcgcgccatttcaaaactttagctcaaagcttgaactgcacagtgcactttcttccttgctcccccattagaataagacttcaattcatctcaacagctgtcttggcaacagagaagctttctccactgcctgttgcatccttgttgtcattacaagaatgcagatgatcattcacttggagcagtaacaaattaatgccacaattcatgaacaagtctgtagtggtccaccccagccacgtccaccgtccactttgcatggcccatttggtcgacttcctgcggtccaattaccattggctcctcccgccccattgtgattataagctttgggacggcaggcggctctccgatccgctgacatcagcaagcgcagcaaacagcagccgctgcagcagcagcaggagcagatgattttccggtttgccagggaccgaaaaactggtttcgaatggcgaaaaaaaaatgaaacaaacgacaggctgaccgaatcgaatcgagcgctgcccttttgcacagtcgggccaaaaagacaatacagtgcggagtgtttgttacatgttagagcgtatatatattttgaaaagtacgtgtgcggaattgaacaatacaattggcttagaaatcgacgggcttgatggtgatgaaccgggagagaatgaaggccaccagaatggtggcgcacacgaaacagaaggcgaacatgtagaagctctcctcggtgaagatgtcggagaatgcgggtatatcctggtagatcttctcgatcaccgccagtgttcctttgtgcttcctcaccatcctgatggttacttcttcttggttgccttctttccgccgccggcgcctcctgctagtttctgtttctccgccttggtcaggaccttgttggtgatctcctcgcgcggtgccaagctggacacgtgcttgttgcacagctgcagcagctctagtgtgtttaggttatcgctgttgaagcggatctccttgacttgggcttgttctgtgaatgatataatatcaataagtgtttgctctttgaatgttgcagtttcaaaagggttaacttagttgcccacgctaaaaggaaaccaatttttcaatacatatttcatatgtattttggttccttttagttagatatttcagctgtcccagtttaggtattcttaccttgcgctgaatcaatcagggcaaacttgatgttggccggctggcgatcgcagacgatttctggcttgaccacgcacttgggattcgtagctgccactttgggtgtggagagcaggaagaggaattccctgaaattagaattgaaatagatatctagattattgatttatcatcacgatttacttgatttttcaggagcagcgacgccgcctcaaactgacgccgacaccgactaaaatgtccacggagcgtgagctggctcccggtgggccagctcagctccatccgcacacgctgccgctgacttttccggatctccagatgacctccaccgtgggcatcattgggaaagtctacggtgagtgtggcacgcatttatttcattccccaaccccatcacctttttagccctcgaaggatcggtttttctggtgtgaatacttcactgcaccctttttggtttttctcagtttcttcttagtatgattttctttttcctttcggtttcgtgaaaattctatccaatttgagtggtgaatagggggtgtagtgcgcatgtcccgctatcgatatcggtgaaaagcgcttttccgactcaccgtgtggacttgacattttccgcgaatggatcgaactgcacggttatccgcttgacgcccttcaaattcacgctcttcagctgcttgccaatggcggacacaatgccgccggaacgccgcaatgcgccactgaaaggcacagacattatttatgtttttttcacggcggcaatgaaaactctgcggtttttccgcacaaaatttacgacgtaacaaacacgctacgtaacagctgagcgacgatagcgataacgggcccactcacgatgaccgccgatggttgtacaacactggcattagcaaccctgcctcgctatgcccagatgctgcttgtatagtcatctcgctcactcgcacggctgcgggcgagagtgctttgccctcatttaagtgtggttaagagtgtacagcatgcgtcacgctcacacgtcgcgagtacaatttttgtgtggacgtccagtgtgtggctgctgtgggaaaagctgaagaaaattgcattttttgcataatgcgcggcgtgaaaagctaacaaaagttgtgctaaatcaaaattcgatagtctggccacggtttgtgcataagagcgggcggcgcgaacgtgtttggtgcacaaaaaccacgtctcgaaaaattaagaattctacgtgcacacattttttgggctgccatatataaaaaaaaaacgcatacaaacgcattttcttgctgtatatgcggaggagcacacacacacacacagagcgacagacacgcatacaattgcactcacgagatatgcgagcataaagaagaattttttcttagttgtattacaagagcattagatacatatataagtatataaatatacatatatacacgcctaggtgtgtacataaaagatacatacatataaaattaaacgaaagctgtgcctacatttgtgttcttttccaatactaaaataacaacaacaaacaataataataataataataatcatacgagtaatataaataaaataatgcaagtcgagcgagagacagcgacaagatagcacacccacttgtctgctcataattccaatttatatataataagcctacgccacgcccacgcgcaactacaacaacaaaaaacaaaacaaatgcaaaatcaaccaaacgaataaaactttaaactactttaaagtgtgataagcaaaaggctgaaatcaaaaacaaaaaaaaaaacaaaataattagtagaaaaccaaaagcaaaggcaacaacaaatacaacaacaacaaagaaacaaacaatcaattacattttacaccaaaacacgaaaagcaaacacgagccaacattttttacattaattatttttcttaaaccaaaacctaacttagtgcaaaaacatgtatccagttggacaacgtaagtggctagcaaatgatgattgcgactaaaagaacagacagacaatttccagacagaacaaaaagaagaatacaaaaataggcgattgctgccacaagtttccctcacaccatgccacacagccccccagctccccttcgcccagccgcccactaatcaagttttcgatgttctacttgcacctttatgcatatacatatgtgatacatacacacgtgcaaatgccacacagacagacacgtgcgtcaaagtgcagagttgaaaatgcgcaaaaattgggtcaacaaccttcgtcgcgtcgcaatagtttccagcttttacgggggttaatctctggcgtcttttttggggcctgcgtctcgaatttattcgaattcggtttcgtatatggatctgggttttttttgaagagcagtcactcccaattgcgtcgcaatttgccaccaattgtgcgtatttcatttaaatatttatgcttcaatggggtgaaaacgtagaagtcgtcgaatatgaaaagagtttgctggggaaggaagggatcgtcgaaaaatatgattcttttgtttgaaatctgaatatatttaatgggatcttaccaacagcgattgttgtttatgccagagaacttcaaaataggtacccttttccaatatcatatgtcatattttttttatcacaataaacaacatcatgggattataatctataagcgctagaatctttgtattatatataccagtattgtgtagatttggtttaaagataatgatttaactatcagttaattaagcatacagtttagataggtggtcgaagcacttggtagaacatcaaaacttaaaccacctgcaaaggaacccagggaacaaggatgatataactgcaaaatattaacaaaatggtggctaacgcgggacttgcatacaaatcaaataaccaatcgacctactaagtaactggacaaaggggcaaacaacttgtggcagcaggtggcatacaaactctataaagatactatatacaaatataaacggaaatacacacacatatacatacatattatatatatatatatatctattgataacgacgatgaaagaaaactgtaactaaaatattattaacgcactttaatttcgttttctttttcgttcgttatcgccaactgttttcggttttccgacatcgttctccaccattgacattatcattatcattatcattttcgattccccatcatcgacaacaacaaaccatcgattggccatttgccctattgccattttaattggaatctcttcatttccacgttcatttgattaccttgcgttgatttgattaccttttctttttatagagtcacagtggaccccctcgcccactcggcctcagagtccctctcaggcgcagactagcttcgacacgctcacatgtaaattactctccaagaaccaaaaacgattactaaaattactaagatccttatgcaatttgattgattcgaaacgctataccgaactgtttgtgtttatgttctttagtttggtgttcccccactaatccaaccaacccaactaatccgtaatccgtaatcattctttttgccgtaatgttattaacaaaaaactaacgaaaaaaaaaaccagtaccaatacctttaaactaactttttgaacttttatttcgtgtaaatgtttgtttctttgtaccatgcaaagtgcacttgaagtattactctacacctgaactaaaacacctacaaacacctgttttgaatttcaatatgtaatagtttatgtcttatgctcgttgcatgatcattttttgtttgtagcaattaagtgggttttcattctcatacgctggataatctcattggaatatagggatttctagttgataaagatcttctattagttattgtaactttaaatgctctttagaaatgtatgcgtggtataacgaaacattctgatatcttaaagttcctgagatttatccaagcatgtgaggagaaccaatccaaaaagtacagttagatattgcgtttttttttttttgaaaaccttaaattatttggaaaacgaactttttcgaagaagagactaactggcaattgactttgcagcaccaccagcgcccggctcgtcggtcaatcccaccgccgtcaccagcccaagtgcccagaatgtggccgctggtggagcaactgtggccggtgcagcagcaactgccgcccaggtggcctccgccttgggtgccaccaccggcagcgtgacgccagcaattgccaccgcaacgccagccacgcagccggatatgcccgtctttacgtgtccacgacgcccgaatctcggacgagagggtcgcccgattgtgctgcgcgccaatcacttccaggtgacaatgccgcgtggctatgtgcatcactatgacatcaatatacagccggacaagtgtccgcgaaaggtgaaccgtgagattatcgagactatggtgcatgcctatagcaagatcttcggagtgctcaagccggtgttcgatggtcgcaacaatctgtatacccgcgatcccctgcccattggcaacgagcgtctagagctggaggttactctacccggcgagggcaaagatcgaatctttcgcgtgacgatcaagtggcaggctcaggtctcgctcttcaatttggaggaagctctcgaaggccgcacgcggcagataccctatgatgccattttggcgctcgatgtggtcatgcgccatctgcccagcatgacgtacacgccagtgggacgtagcttcttcagttccccggagggttactaccatcccctgggtggtggacgcgaggtttggttcggtttccatcagagcgtaaggccctcgcagtggaagatgatgctcaatatcgatggtgagttcgcaatgctctgtattatctatttgcccaactaatgattacatattcctcagtctcggccaccgctttctacaaggctcaaccagtcattgacttcatgtgcgaggtgctggacattcgcgacatcaacgagcagcgcaaaccgctcaccgattcgcagcgcgtcaagttcacgaaggagatcaagggtttgaagatcgagatcacccactgcggccagatgcgtcgcaagtatcgtgtgtgcaacgtcactcgccgccccgctcagatgcaatcgtatgtattcagcatttttaaacatttctgcttttgttaaccaagcttcatcatcatgttagattcccactgcagctggagaacggacagaccgtagagtgcaccgtggccaagtacttcctggacaagtaccgcatgaaattgcgctacccgcacttgccctgcctgcaggttggccaagagcacaagcacacttacctgcctctagaggtgtgcaacattgtggccggacagcggtgcattaaaaagctgaccgatatgcagacgtcgaccatgatcaaggccacagctcgttcagctccggatcgtgagcgtgagattaacaacttggtaaagcgcgccgacttcaacaacgattcgtatgtgcaagagtttggcctgaccatctccaattcgatgatggaggtacgaggacgcgtcttgcctcctcccaagcttcagtatgggggacgtgtgtctaccggcctcaccggccagcagctgttcccgccacagaacaaggtgagcttggcctcgcccaaccagggtgtatgggatatgcgaggcaagcagttcttcactggcgtcgagatccgcatctgggccatcgcctgttttgccccacagcgcacggtgcgcgaggatgcgctgcgtaatttcacccagcagctgcagaagatctcaaacgatgcaggcatgccgataattggacagccgtgcttctgtaagtacgccaccgggccggatcaagtggaacccatgttccgttacctgaagatcaccttccccggcctgcaactcgtcgtggttgtgctgcccggcaagactccagtatacgccgaggtgaagcgtgtaggtgacaccgttctgggtatggccacccagtgtgtgcaggccaagaacgtgaacaagacatcgccacagacgctctctaatctgtgtctgaagatcaacgtcaagttgggcggcatcaattcaattctggtcccctccattcggccaaaggtcttcaatgagccggtcatctttttgggtgccgatgtgacacacccaccagctggcgacaacaagaaaccatcgattgccgccgtcgtgggctccatggatgcccatccatcgcggtatgccgccaccgttcgcgtacagcagcaccgacaggagatcatccaggagctgagcagcatggtgcgcgagctgttgatcatgttctacaagtcgacgggcggctacaagccccaccgcatcatactctatcgtgacggagtctccgagggacaattcccacatgtcctgcaacacgaattgaccgccattcgcgaggcctgcattaagctagagccagagtatcggccgggcatcacattcattgtggtgcagaagcgccatcacactcgactcttctgcgcggagaagaaggagcagagcggcaaatcgggcaatattcccgcaggcaccaccgtcgatgtgggcatcacacatcccaccgaatttgatttctatctatgcagccatcagggcatccagggcaccagtcgcccctcgcactaccacgttctgtgggacgacaatcactttgactcggacgagctgcagtgcctcacgtatcagctatgccatacgtacgtgcgctgcacccgatccgtcagtataccggcgccagcctactacgcccatttagtggccttccgtgccaggtaagccattggattcgattacccttcaattggactttgcgttaatgtaatgtaattcgtttgcagatatcatctggtggagaaggagcacgattcgggcgagggttcgcaccagagcggctgctcagaggatcgtacgccaggtgccatggccagggccatcactgtgcacgcggataccaagaaggtcatgtactttgcctaaaaagtatcgcccctccccaataccaacaccaaaaagctaaagaatacaaaatcagtttcgaatttcgattcgaataagcaactccccacttccttccctcaaatcagaaagcggaaagcggatgaaagccaagcatagaagtttagaattaagttacgttttacgttgagagagcgcggatgggtggaaaaaccaatcagaatacgaagatcttgcatgcattagttacgtacacgtacatatatagtaagcagagtaatgaaaatcccacaaacaccatccacacactcactcatccacacacacacaaatcagatagccacacagtgagaaatgataactaatcgaatgtcaggcacaagtttgcgaaatcaaagaaatgtgagaattctcaaaaacaagcgtagcaaacaaattgaaagcaaataggaaatcaactaaagggaacaaaaactacgacagcaacaccaaccaacaccagaaaaacaaaacaaattaaaacataaccaaaatggaagtgaaattacgtgaaaagcgagcgtcatcagcacgagagagagagacaagttttgtaatagaaattacgattaaattgtacaatatatttttacacgatacgaaatgaagacatgatgaatgataatgaatgaatgcatacaaccaaaggtttttagtatacaaaatgaatacgttgctgatcgactcacacagcaaacaccacatgaacaccaaccactcggattctctgtactgtgaacgaagaccaccaccaaaatataaacaaaaaccacaagcgacattaaagcgacaagcattgaaagagtgtgtagacacaacttagcatgtactaatgaattacttcaatacttcaactagggcgctgacaaaaccaagcaagaacatttaatagtttgtaagttgggctctaccaaaaaccgaacacaaaatgagagagagagagagagagaaaaatgcaagcaaggccagataagttaagtgggcaatgaataacgagaactgcaatttcaacaagggacaaacttttggtcaaaacaatagctatacttatagagcagagcctaatatatacatacataattagaatctaaaactaaaatttaaagtttttacgaaacgataaccaagcggatggagctgttgtaacaatgtagattacttaaattcaaaagtgcaaataacacggtagcagacacgttacgttggcagtgctgatattttatgttagtccttagtttaccctcttttatgcaccacaccaccacacaatcagactccgaacttcttcaaccctcctcgagtccaaggcatatcactcaatgtcctcttatttatgtacctcctacaataagccttatgatatatttagttggaccttatatatatatatatatattttttaaacgaatgcctaacgaaatt

SEQ ID NO: 14510 - DNA, 3743 bp, DROSOPHILA
caaataagttgtgtttgtgcaaaactcgcgcgttcgcaattttccgaagctgactctcaattctcatacataacgatctcaagcgatctccgccaggcgaatcaaacccggatatatccagatctgcacgctggaaaagtaacgtccgcaacggtttaaatccagtcgagacgcaaaccccactcaactccttaatgagttcccctccattaaacggaattcaccaaaaaaaacgattgatttgccgctgataaagctgataaaagcgcacacacacaccaaagtcagctgcaattttgcgataaggagcagcgacgccgcctcaaactgacgccgacaccgactaaaatgtccacggagcgtgagctggctcccggtgggccagctcagctccatccgcacacgctgccgctgacttttccggatctccagatgacctccaccgtgggcatcattgggaaagtctacgagtcacagtggaccccctcgcccactcggcctcagagtccctctcaggcgcagactagcttcgacacgctcacatcaccaccagcgcccggctcgtcggtcaatcccaccgccgtcaccagcccaagtgcccagaatgtggccgctggtggagcaactgtggccggtgcagcagcaactgccgcccaggtggcctccgccttgggtgccaccaccggcagcgtgacgccagcaattgccaccgcaacgccagccacgcagccggatatgcccgtctttacgtgtccacgacgcccgaatctcggacgagagggtcgcccgattgtgctgcgcgccaatcacttccaggtgacaatgccgcgtggctatgtgcatcactatgacatcaatatacagccggacaagtgtccgcgaaaggtgaaccgtgagattatcgagactatggtgcatgcctatagcaagatcttcggagtgctcaagccggtgttcgatggtcgcaacaatctgtatacccgcgatcccctgcccattggcaacgagcgtctagagctggaggttactctacccggcgagggcaaagatcgaatctttcgcgtgacgatcaagtggcaggctcaggtctcgctcttcaatttggaggaagctctcgaaggccgcacgcggcagataccctatgatgccattttggcgctcgatgtggtcatgcgccatctgcccagcatgacgtacacgccagtgggacgtagcttcttcagttccccggagggttactaccatcccctgggtggtggacgcgaggtttggttcggtttccatcagagcgtaaggccctcgcagtggaagatgatgctcaatatcgatgtctcggccaccgctttctacaaggctcaaccagtcattgacttcatgtgcgaggtgctggacattcgcgacatcaacgagcagcgcaaaccgctcaccgattcgcagcgcgtcaagttcacgaaggagatcaagggtttgaagatcgagatcacccactgcggccagatgcgtcgcaagtatcgtgtgtgcaacgtcactcgccgccccgctcagatgcaatcattcccactgcagctggagaacggacagaccgtagagtgcaccgtggccaagtacttcctggacaagtaccgcatgaaattgcgctacccgcacttgccctgcctgcaggttggccaagagcacaagcacacttacctgcctctagaggtgtgcaacattgtggccggacagcggtgcattaaaaagctgaccgatatgcagacgtcgaccatgatcaaggccacagctcgttcagctccggatcgtgagcgtgagattaacaacttggtaaagcgcgccgacttcaacaacgattcgtatgtgcaagagtttggcctgaccatctccaattcgatgatggaggtacgaggacgcgtcttgcctcctcccaagcttcagtatgggggacgtgtgtctaccggcctcaccggccagcagctgttcccgccacagaacaaggtgagcttggcctcgcccaaccagggtgtatgggatatgcgaggcaagcagttcttcactggcgtcgagatccgcatctgggccatcgcctgttttgccccacagcgcacggtgcgcgaggatgcgctgcgtaatttcacccagcagctgcagaagatctcaaacgatgcaggcatgccgataattggacagccgtgcttctgtaagtacgccaccgggccggatcaagtggaacccatgttccgttacctgaagatcaccttccccggcctgcaactcgtcgtggttgtgctgcccggcaagactccagtatacgccgaggtgaagcgtgtaggtgacaccgttctgggtatggccacccagtgtgtgcaggccaagaacgtgaacaagacatcgccacagacgctctctaatctgtgtctgaagatcaacgtcaagttgggcggcatcaattcaattctggtcccctccattcggccaaaggtcttcaatgagccggtcatctttttgggtgccgatgtgacacacccaccagctggcgacaacaagaaaccatcgattgccgccgtcgtgggctccatggatgcccatccatcgcggtatgccgccaccgttcgcgtacagcagcaccgacaggagatcatccaggagctgagcagcatggtgcgcgagctgttgatcatgttctacaagtcgacgggcggctacaagccccaccgcatcatactctatcgtgacggagtctccgagggacaattcccacatgtcctgcaacacgaattgaccgccattcgcgaggcctgcattaagctagagccagagtatcggccgggcatcacattcattgtggtgcagaagcgccatcacactcgactcttctgcgcggagaagaaggagcagagcggcaaatcgggcaatattcccgcaggcaccaccgtcgatgtgggcatcacacatcccaccgaatttgatttctatctatgcagccatcagggcatccagggcaccagtcgcccctcgcactaccacgttctgtgggacgacaatcactttgactcggacgagctgcagtgcctcacgtatcagctatgccatacgtacgtgcgctgcacccgatccgtcagtataccggcgccagcctactacgcccatttagtggccttccgtgccagatatcatctggtggagaaggagcacgattcgggcgagggttcgcaccagagcggctgctcagaggatcgtacgccaggtgccatggccagggccatcactgtgcacgcggataccaagaaggtcatgtactttgcctaaaaagtatcgcccctccccaataccaacaccaaaaagctaaagaatacaaaatcagtttcgaatttcgattcgaataagcaactccccacttccttccctcaaatcagaaagcggaaagcggatgaaagccaagcatagaagtttagaattaagttacgttttacgttgagagagcgcggatgggtggaaaaaccaatcagaatacgaagatcttgcatgcattagttacgtacacgtacatatatagtaagcagagtaatgaaaatcccacaaacaccatccacacactcactcatccacacacacacaaatcagatagccacacagtgagaaatgataactaatcgaatgtcaggcacaagtttgcgaaatcaaagaaatgtgagaattctcaaaaacaagcgtagcaaacaaattgaaagcaaataggaaatcaacta

SEQ ID NO: 14511 - protein, 984 aa, DROSOPHILA
MSTERELAPGGPAQLHPHTLPLTFPDLQMTSTVGIIGKVYESQWTPSPTRPQSPSQAQTSFDTLTSPPAPGSSVNPTAVTSPSAQNVAAGGATVAGAAATAAQVASALGATTGSVTPAIATATPATQPDMPVFTCPRRPNLGREGRPIVLRANHFQVTMPRGYVHHYDINIQPDKCPRKVNREIIETMVHAYSKIFGVLKPVFDGRNNLYTRDPLPIGNERLELEVTLPGEGKDRIFRVTIKWQAQVSLFNLEEALEGRTRQIPYDAILALDVVMRHLPSMTYTPVGRSFFSSPEGYYHPLGGGREVWFGFHQSVRPSQWKMMLNIDVSATAFYKAQPVIDFMCEVLDIRDINEQRKPLTDSQRVKFTKEIKGLKIEITHCGQMRRKYRVCNVTRRPAQMQSFPLQLENGQTVECTVAKYFLDKYRMKLRYPHLPCLQVGQEHKHTYLPLEVCNIVAGQRCIKKLTDMQTSTMIKATARSAPDREREINNLVKRADFNNDSYVQEFGLTISNSMMEVRGRVLPPPKLQYGGRVSTGLTGQQLFPPQNKVSLASPNQGVWDMRGKQFFTGVEIRIWAIACFAPQRTVREDALRNFTQQLQKISNDAGMPIIGQPCFCKYATGPDQVEPMFRYLKITFPGLQLVVVVLPGKTPVYAEVKRVGDTVLGMATQCVQAKNVNKTSPQTLSNLCLKINVKLGGINSILVPSIRPKVFNEPVIFLGADVTHPPAGDNKKPSIAAVVGSMDAHPSRYAATVRVQQHRQEIIQELSSMVRELLIMFYKSTGGYKPHRIILYRDGVSEGQFPHVLQHELTAIREACIKLEPEYRPGITFIVVQKRHHTRLFCAEKKEQSGKSGNIPAGTTVDVGITHPTEFDFYLCSHQGIQGTSRPSHYHVLWDDNHFDSDELQCLTYQLCHTYVRCTRSVSIPAPAYYAHLVAFRARYHLVEKEHDSGEGSHQSGCSEDRTPGAMARAITVHADTKKVMYFA

SEQ ID NO: 14512 - DNA, 47066 bp, DROSOPHILA
ggtgtgggcttgcaccgccctaggaacaatttgttatttggctttggactttgctcttgaagtgttgtttacccggccattcaccattcaccctccttttgtccaaaattaccatgtgtgcgtgggcgaaggatcaacgctaaggaaaaaggttaaaaaacggaacttttataatttaacttgtgtgctaattgcactttgtggggtaattttgcgtgtcagtgaagtttcgcagacgcatttcggtgcatgtgtgtgggtttatggagcgcatgtgagtgccacacgcacacacacgcattgagatatcctgtgctttaatgtgcgctttgagcaccaaaaacattcctgagcactgcacttgagagttttgtggcccaaagtggaatcggagtttagcttaaagatcgcataaagccaagtggagttagcattttttgctttttttttttggtagcgaagtagaaactttcacctctgcgtgtgcgatgttgcaaccgaaaaataataataatttatttgttttccacatttccgttgcagatatttggcgaaaataaatttgcacttggacaagcggcagagaaacaatgataattagtttgttcggtccagcaacaaatagctgtgcaatagaaattaattagaaaatatttcgcgtaacacagcagcaatttgtcaaggggaaagcgcacaaaagtgcgctacacatttggtgcttgcggtcctttgctcaatttctaattagagagctcgaaaataaactggaaaactggaaattaaacaaagcggcaaagcgactatgcaaagtatgttggcgcttaaccaaatgaaaacttaacgggccaaagtaaaacaaaaaaaaaaataaaaataaaaaaacggaacagcactttgcaacagctctacagctccagtaaatttaataacaaagccggcgaaaatagaggagaactccggaacctagaaactccacatcatacgcgccgagcgcggaacaatgaatataatttcgcgcagcatacgtacaggcgccttggccccgcccatcactgcccacgcctccgccaacgccaacgccagcgggctcaggaaaagcagccagcgacgcaaccgtgctccgcttcaaatgaattgccccattctgattgtaattagcctcggatggctgctgcacgcgcacgccggaagcggcgggttcgccgtcgaggccgccatttcaaatcgaggtaagtgattcggatacgcagtacctccttcccctccttctagttgtgttctataactcacatatacatatgtatggagtacgctcccctggttcgagtcacatctgaacaatggccctgtggaatggaaaagctgagcgcagcttttttttagtgcactgagagaaatgtggaagttagatctgcaataatgcactttaaaaataccttcttataaactgaccattgatacttttctactgcgagacccattaagattgaaaaacataatcttcttgtatgccatatttttgtccaaatcccaagcaacttgttcatattttgccgtgcagctatttctgcatcgctttgcagtcatcgcattttatttcgcacagcactcaacgcaagttgcatttatgtttttacataatagagagtgcgatgcgggggcaataagcgcgtggggccaaaagcgctggcgggtatagaaaaaaaaaaaataatgtaaaaatataataaaatacgagagctggcccgtagtgctctctcgtaatccctttttgctattttaatgccaatgtaacgctgcataaatccacgcggcgaggtcctcgagcacgttgtggtgtttaatgctgaagccgctggcgaggagcgcgaaaggactagagtaaaagcttaccgcgagatagagaattccgaggcataccgaggtcatttgcggagcggtcagctgagcaacccactaagccccaaataccccagccacaattaataactcgttatggcgacggaaacttaagcacttgcctctctctttctgaatttaagcgccgaactttcaattgcaaggttgcgctgtcctacgccttcctccaaaaaacaaaagcaaaaaaaatgggggtaaagtaggtgaaaccgacgaacattctgtacaaatagttggcttattccggcacaagattatctgggtctacatagtccattgtctggcactttgcttctcttctattaggccatggaaaacatcatataaattgaaaactcaggtgcgccgccagtcaactttaaggctaagcgaaaatggcgaacacggggcgtatacgcaacgcagctcagctcaacgaatgaacaaacaagcgggcgcgcccataaaaacaaattcgccatccagggctatattttcctttggtaacttttgccaaccaatcgataaatttaagagcacaacatttgtctccattatcgcaaaaatccgaaggcaaacactgtgcaaaaaatgcggcagagggtcgcaaaaaaaaaaataaaaaaaaaaaaatgagggaaaatcaacggaaaacgaaaaactgcggagcaccataaaagagccatcgatgcgtggcactggtttcggacttttccaaggtgggcggggcttagagtgggccgggtgttttgtccagagatattgagccacccaaggccacccacagagccacaaaagggcgggcacaataaaacagaacaaaccaaagacagacctgttcttatcccagctacatcggccatatagagtggaaaaaggggctcaggccgtaaagctatatcaaaggtgagaatgtgcttttgtcactgatcataaatttccttgtgcgccagttacctttacagttagcccgtcccttatgtatgtgtttgtacaggtgcagaaatatgagttgaatacgcaataatagtgtgaaatacaatgaaaggaattcaagagaagttaatccaagacagaagttaataaataccaagcatttcacaaactcataattaaaaccaaaattaaataaccaaaatttgttcacaatcagatgccaatcgaatggaatgtaattaatttgaaattttttttttataaatggagctggtctgcttgaatttcctaattgcttgactgaccaccctctttttcccgccgtgtattcaatgcaaagaaagaggcaataaaacgttacaattgacactggaacgctgtgaaaagggagccgaactggcaaaggaaaagcgaaaggaaaatgcgatgctgctggctccgatagcagcaaattggcgggacattcgggggaggttggggcttgtgaagcagggtgggctgggtgcgaaggttgcatcgctttgacaaatgtttattgagtaacacgagccataaactgcaagcgaaaagcgatccacctaccgtacgccggacaaactttcagctttgacccattttcatgagccatgggccatccagacccccattttctggcatcagttgcctgtttgagaatctggtgcacgtgatgcacttgaaggatgcgcactggctcacatcctagctaccattttataaactgacaacaatttttcataagactgcaggagcggaagaagcggcaggagcggcagatgagcatcatcagcagacagcagcaggagcagcagcagcagcaaacacaaacaacagctgttttccgcctcgagggcttttccaccgcccaccacctcactggcactcccactaacgctgcatttttgcatatcttgctgttttgtttggcatttttagtgatttcacttaaattttcataacaaaatatgcacagtgcgtgcttgcagctcacttttggctcaacacagcagctttgtttggcgggtggtgaatgtaggggggtggttgaataaaggagtggcaaggacgcggggcggtgaaatgctggcaacatgttctagctgtcatatattttttcaacagatttttcgtacccgctccctttgcagatttcctctcagcggctaaaaccgcattttgtatgtttttgcagatgcttttgggaaattgttcatagggttagtttttcccgcccgccaattcgctggctcctcgccgcagatcctgagccatgttagctcaacggtgggtcgaagctgggagggatcaggctcggggctggcaaacggcctgacatggagtacgtgtttgtatgcagtcctcgcctccatttactgatccagcactgagcgaaaaaattaacgtatgagtggaatgttaagttcccagttatgattttcttttcaaggtaaaatacaaaatactgcaaataatatttcatagctgttgccttgatataaaatctaaatatatcatatcatatatcatatatcaagctggctattttctcagtgtatcgttgctactgctccatcgctccgactatagtattatatttgtgaatccctttgggtatgttcccagcaataaatttccatcagacgccgtagtcgctgtcgtttgtgccaggcgtccaggatttttccagcctctcgccgaccgcgcctccatttccattaactcgccggtggtgcctttgcccacccattgcctccatcccaaccgggccagccaaagccatctagacccatcccatcggtaactggttactggggaaacaaatctctggctcagctggcgcatttgttggtttgtgttgcggtttttccgaattcgttttgattgtttgtcatatttccgtgcatacaattcattttctattgcccagaaatcgactcaactccgtccgactcgtctcggccagccggttggccaccccgtggtgtagggctcaattacgtgaccaggacgacccgtggcagatctcctctctactcgccggcttgacaatattccagctaggcccagatgtacatcctgctgaatatatgtaccctgtcatgtttccgccgccagctccactgaaacggcgtatcaatgaaatatgttcggatgggtcgagcaggcgaaaaaaacaaagtactgtacgattcccctggagagacttggagagggcgcataacttaaaacaaatacgaaactgcaaaatatacgagcgggcaaatggaaattgaaaatatcctattaccaggggattgatgccgacagcgccacaccgacgaatgtaattgaaggcttcacttagcggggatttcgcaggatcatatacatatatattgtacataggagctcccctatgcagatattcattcgtacgtctatcccatataaattcgtatattagcatacacatttgcatgccgcgtcccctgggcgattgccatgcgataattatggcagtcgaatcccgaaaaggacgcagcgagaaatccccaagaaatttattaattagcactggagctgaagaaccgggggagtccatgttctgtggcccaagctccctccgtttattttaccaattaaagccaattctggcatgttccttcagatgggcggtcgcattcaaatgtgtgttttccttcctccggcggggatacatgctggttcttggctttgaataggaagttgaggagcccgcccaggagctggttgggtagtcgttggatcgttggatcggaatgggtctgtagcatccactaatcgcattattaacgcgccgttaacattttgcgacattgacttgaactttggaagtgactttcatggctaaaacatggggcaaatgtggcaaagagtggagtggcgcatgcagtggagtggcgcgatgtggatttgcttggcattcaaaatatgcttacaagacatggccagggccaacatttatataatacccttgaagttttcggcatttgccaaattccgcttgaacgagccgctgtcaaaataggaaagcaaggcgaaatggcaaagcatttctgccatggcaataccagctcctatgccagattcgagtgtcttcggaacggccataatcataataattaatacccatttacgttcttttgccgagctgaaaatcaagccattatcgcccattcacttgccggggtgataattatagacgcccgtgcacagattgtcggctgtcccgaaaattatgcactatttactaatgacagttctcggaggtgcaatgttttggccagttgggcgtataataagtgcacataaacttttattgctattcccgcgtggagtgcacagcgtgtaaaacaggtgagcctgtgcaccaggtgcaccgtaaaaaaataatgtgtataaccacgtatacttcgattcgtatacctcgtatttcatacgagctcttcatttgaaatcattaaaacgagcttaatggcaaaattctttttaaacctacttgagaatattcatttcattttttgtcgttgaatacctttaaaggaataaattaaaaatgttatgcctttattttggatttaaaaaaaaaacaaatagatattttttgagatttttttctcaagtactttttccctagatggatattaacgaaaattgatacaatttttttcgcagtgcgagtgcgtgccaagcaacaatgccattgacagtgcaggccagaaagtggcggaaaaaatcgtagaaaagagtagagcagtttcccatccaatgaaaagctctatatatttttcaacgcttttaaataaaattcccgaggaagttggttggaaaaaaatatctggccaaatgactgtaatttgcattggcaactcacacaaagagacgccgcgcagtttaacacctgcatgagtgttggtcggcctgtgtttgtgttgggcctttcaatttaaatacaaacacccactcgcacacacacacacacacacacactcgcattaacagtcgccgagtgtgtttgcacggactgtttgcggcacgtcacaaaagtttcctgttgaatttcccttcatttcctggccaaagagattattattttcatttcatgccatggccagcgacaacggcgcacaacactatgttttaagcagagacataagggggcgtggccgggactcattttcatatttatgctgtcgacccaaaaactgtttacttactcgccatcattaacgcttcattcgcggcggacttttaattttcagggcgacctgttaaggccagagtttttccttttcctttggccggggcatcgccaaaaagccctataaccgtgaatccgcacatgcccgtatatacggatatacggatatacgtatatatccgcacattcaacgtcttggtccttcgagtcgtatatttgcatacttccggtgcgcgcaaaatgattatcattattatttctgttgtttgctgttgtcgttaccgcggccattaccgttattgcaacgccactggcagcggctcctcgctcctgaagtcccatcgtcctgtcgtcctgtaactccgaaaatggccgccaatcggaggggaacgtgcgacggttatggcttatttgtgcaaatgagctgacgtccattacattgtccgtggggaggtgaaatgcaaatgattgttttggcgctggctggctcaatgtctgccgcacaacaaggtcaccgcaggagccccaaggacactcttattcacatgtgagtgtgtgtgtgtgtgtgtgggctgtacacatatcgcatcacttgcggcttaaggacacgcgagtgaaagtaagtgaaatggcctcgcccaacttagcccacctggccttgtttaatagccaataaggtaaacttttcgtacagatccttgattgattctcctctataaattggcacatttacttatcgaaataaactgaagctccttaactgtaaactttcgaccacaaaatgcttgccaagtttgcacgttgcgcaaacaaattgcacctgcttcaggttgattagccacctgcagcccatctcctttgctactttgctcctttgctcctttgcatggccctcggtttgcgctgcaagccaggtcgtaaaacacttttgcctatttcgctgagttggctcgactgcgatctccagctcctcttccagttcatctagctcctccagctcccgctgctcttgctgttgtttttaagagccatttgtccgatgcccgcggctatttacagccattgtacagacttggcgaatttatcaagcatggcggagtcgctcagtgggtcactggatggtgaatgttggtgaactggattcgggatgccggatactagatgctgcagctgacgttaccgccatttttccgcttttccttcacttcgcttttggcttaatttcaaaacagttgcgcttatattggcagttatgctgcaaatttattggcatgctttgtaaactgggttagttgcatatatctcgcagccgcaagctgcgagccaaacgattaacgttgagtaacccaaattgatgtcaccacccatcgaccgcagctaacagcccgcaccacccaccgccaccaacatttgcccgctggagcatcattttttcccactcagcaaagtttccgtagcggctggttatagcccataaattctcatacattgtcaagtaatagctaaaccctgtttaccccctgacaggcacaagttcatagagataaagaaaaaatgtggcacaatttggtcacaacttttttagaaaagagataaccaatttcttttcatagtgagattgcttaggtcttttaagaaatttcaactatggaaaagatgatcggcacttgatcttgaaagtgtggttttatgccccgttttccttcagtgttttttgagcgtaaacccaaagcagttccaagtttataaaccggcgacaaagaacgagaatctctctggcagtgcaacgcctgacacgggttaatccggtatgcgtggtgcttctcatttaacggtcattaacatagccagccggaatgcttggatagactgtgctttcgagcagttccgttcagaagactgaagaccctcgtgtctcgtggactgcaaatcgctttccggcagttcggcagggagtatttttgaatcgaggatccagaatgcggcacaacatggtggcctacctgtactgcctggtcagggatctgtacgccgagcacggagatccccgagtggcgcacttgcccctgctgggcaatctatggatcgtgctggccattgtggcgctgtatgtggcctttgtgctccactacggaccacgttggatggcgaaccgtgctccctttgagctgaaacgtgtgatgcaggtgtacaatgtggtgcaggtgctggccaatgccacgatattcgtcattggcctgagcaacacctacctccagccgggatacagttggacctgccagccagtggatcacacggacagatcaccggccatgatgaagacattgtacgcctcgtatgcgtactacatgctcaagtatctggatctgctcgacacggttagttgggggctatataccgtctatataccttctatacccatatacaaatgcattcccaggtattcatagtgctgcgcaagaagaactcgcaggtgagcttcctgcacgtgtatcaccatggcggcatggtcttcggcgtgtccatcttcatgaccttcctgggtggatcacactgcagcatgctgggtataatcaatctcctggtgcacacggtgatgtatgcctactactatgccgcctcattaggcgcggtgaagaatcttttgtggtggaagcagcggattacacagctgcagctgatgcagtttggctacctcacctttcatttcctgctcgttattgtccggaatccgtgtcagtttcccgtgttcatcgccttcatcggcttcattcagaacatcttcatgttctccatgttcttcgacttctactgcaagacctacatacgcaaacagcgcaaatcggcggagcacaagctgaaagccagctgagctgtactgccgttgaaaatgaggttcaagttcgcgccgcgtcatttccatattaaattgtgtaataagctggtcggtcgcttatgcaaatgggcaccgatcgaacccaaaatgcctggtataaataaacatttcggattgtttcccaacccctccgtttcatcgccacaaaatacatatcgctcaattgttttgcttttgtaatcaatttcaatttgccagcggctagattcggaggctccttaaacttttctcgaaaacttcttaaccgcctgggaaaatcgaaatggagcacggagagcgaaggcggcgacaagttatgaagtaagttagccgggcatatcttttattaaagggttaaatgaaatatcgatgaagtcggcaccagttatggccgccacgtgttcccgacccacatttctctatatgcttcggccatgtgtcgcatgggcccctgggccaccttttaactttctggccagcgttgtttttttctggcccccttttcaaagccaaagagtggaaaaaccagctagcacacccacagtgttaccccatgttgaacacatttgcctagaaggctgcctcattcatattttttccccctctttttttttgtttttgccatggcattttttctttgccagaagttttacatctgctttcgctcccaaaaaaaaaaaaaaaatggaaaaccaaggggcgaaatgagggaaaccgctttaaaaatgcttgtaagcaggcagcaagtggaaagccgcagggcagcgtttgtgcctcgtttaggaccgcccgcacaatattttttcagttatgtaaatttttggcccagtccggcgaatacttctcttaggcgacggcggcggcatcatcaaactttgctgctcactcggccgagagccttcgatggcaaattaaaagccaacagtccgaaggtcgccttatatttgcggctggcgcaaatggagcttattaagtggcaacagcagatcattgccagtcgtttgtcaggctcatatttgtggctggccaggggaatctctgaatagccccaactccggatcacataatgccaaaagtccctgcatggatgcactcaaaaaaattaggattacaacaaaaccattactttaacaaagaaagctacttagaccataatagatggtttagatagatagatatttcttgtaatcttacaaagcttaaaaacctctcctagaaatctattacatatagcattaaaacatccaagactccgcagtcccagatacttttccccaaaccaaattggactgccttctttttccgagtgtgtctgttgttgttgtgcgtttgggagccacattaaaacttttctaataacgaacttctgcgactgaagccgagcgtaaacattcgagacggaagctggtcggcggatgttgtgtatgttctgcttggaacttatgtccgggttcgaagtcatgtatgcatggcatacaatgtagcatcccgaatcgtcatcattaacatcagtacgacgtacggcagcatcagcgatcattgccaaaaaagggttcaatgaacgcggcgcacttcctgcaaggatatcaattgggccaaaaagattgctggccgaggatggcgtacatggcatacatggcgtatgctcgatatctgcccgccatttatgactcgcatggcatttaagtgctggccgtaaaaccgttatgtaaactacgagtgcgagtgcgattgcgaatgcgattctttacggccactcgcagcaatgcttctgcagtggccatggccattactcagcataaaacttggccaggaccaaaaggacgaaactccttgattgtggtgtgcccatgtgtgtgcactgcacagaatatcgactgggctgtgacccacacgcgccactcgagtcctgcgacaatgttgtagccgagtgtaaataataataagcatcggcacatacgttaccatagttattcatgctgtacagtgagcacccgcttttgcgacacgtgttccaatcgattccccttggcttaaacaacttcctatgtgcgttcttacactcaagagcgaaggagctagtaactcggccccctggcaattatccacaaatgtgtaggctaatcctgtttacctttttcgaattatcaagcgcaaatcaattttctattgatgtcgggcctcgaacatttagccccgggactaaaagctctttataatccaatgaaaatgaacccgaatattaagcgacccaaatctggaatctctttcatgtgtgcaggtaatcaagccggtataaaaggccacattttgatgctcctttcacctgttgccgtaatgaagaaatctaaattccattaagtttatgtccgcattttcgttcgcagttcactgctcaatgaaaagcacttacattgaccttttccacccgcccaaaatcccacgtactttccacgctccacgcccccagataagaggagcaacaacaataacaccgtgtcctgaaatggatcacaacattttcggtgagctcaacgtatttgcctaatggagattagccggcatttggctttatttgaattctggttggcaatttattgccaatgcttatcgatccttatcgatgtcccatgtctatgctcttcgggcatttacttcttccttggcaaatttcgtcgcacttaagcactttgtagcactttttatcgctgtaatttttggtctaacaaaacaataaattcagagctttggtctcgagtggcaggtgaattgctcgcgctggcagccaagttgaaatttgtaataaattttaggccgagtgggtggacctacttatctgggcgctgggcaattttgttaatttgtaagtacacggtgccgtaattaagcgcgatttgaaatatgtgacaagcggaccacgcgtgtacatatatacatacatagtgtgactctcgaataaatcaaagtaattaactgcacgagcgtacatgcaacaggtcacggggtcacgcggcactctcatagctaatgtgaaaagttatcaatatctaggttaacagcggtgtgggccagctcccttccagcacttgagaaaacaaatatacttttggggtgaaatcacagtggtatcaaagttcttaagcctttaaagagggtaaaatactaagggttttctatttctcaaagcttagcaagtggcaattgtttttttttggcataaaaacttattgacatttctctgagtgcaagtgccattcgattccggaccggaaagccttttcgtgttcatccgttcaatcaactcaattaatattgatggagcggtaagcgaaaaacaaaagaggtggaaaatgtgtggctgtcagaggagcaagtgtaaaaatcaatgcccagctggtcattaataatgcaatggccactaatgcactgctaatatctgagccattggcattttccccggccagcgggaaactttgtgtgtttgactttgacaaactttgtgacgcaacttgggcgcacttgtgtggcggcgagcaacttatgacttatcaatgaccgaactccagccacagccaacacagttcacttgattgaacttctcgagctggccacagtactcactcagtcctatactcagtcgcaggattcaggaccaactttccgaaggcaggaacggtggaggagtacctccaccttgggctgtcctttccatcgctcagttgcagccataaatcaatacatttcaattcctctcagccggatgcattcgattcgaactcaagtcgagtgctcctgcagagtaaataaccgacaaggactttgccaaggactcgagcaatcccgggcataaataagcatttgtgttgcgaagagacactacactcacctcccctttccaggaattatctcgtaatggtaatggagaaggagtcgcgcaggcagcgaactctaatgagctggaaacaaacgccctttcagatgcatccacacacagtcaatggggatccttcgagatgctgaagagagacgaagatcctggtatccgagcaaatcacatagcacttgcactcattagccggcggagtggtgccaacattccgatgccgagtgggaaagcactttggcactgcccaaatgcctgccaagatggaaccggcgaaataaatgtcgaaataatatgctttattgtatcgccaggcgttaccatgaattttgtttcgtttttatatgactatttatttttattacgccccgtcaggtggctggtggctggctgaggcatcggctggtgggcatgaccaggtggtgctggcgtgccaggacatggctctgccaaaatgtgccttcaactccgtggcccaactctcgattcacccctcagcaggtcgagtatgtttacagaggcgccgacaaaggcaatatctatcgactaccaacatgggaaattgcccgaaacgagctgtggacaaacagatacacaattgggtaaacttggccaaaataaatacggaagaacattagtgcaaataaaataaaatgctaatactcgaactaccagcaaaccgcaaatattttgccacaaagtgcaacaataataaattctacgcaggcggccggaaacggagttgcaagaaaaataagttatcagaagtttatgtttgaatacaacatattagaaaagtacaatatttgtggaaaaatacagtgacccacttaatcgaaaatgttgtgtacaaaaacatgaaatgcaattggatacaaagcactgaaatcatagatacatttttattagttgcaagtactaatctttggctttttcaggccgtattagctatataatgtattgtagttcccatttctattcccataatctgtccaatttgcttacatattgtcatccaagcatcgatcgcactggagaatgacaacaatggtcgagatggtggtccaaaaatagttgccgcacgtttgcactccaagtgcagtaaacatggagaacaagtgcagatgccacgcccacaacaaaagccggaacagaacgcccatcgaccgagcacagttggtgctaataacttagttttctcctcggttttccccatttttgttttgttttccctgcatattttttgccttttgtatttttgtagccctggcagcgacgggggggccaagttcaaaactttgtgtgccccaagtccgtcgcacttttcgccccatgagtcgtgcactgcgctctgtttatttgcctccatcccgtttggccattcatcggccatgcagctcacgtagccacgaatataaaccaaaacccaaaaccaaaaactaaaactaaataacaacaaaacccaggcaaaaccaagccgaaccgaaacaaaccaaaccaaaacgaagcgcaaccaagaagtttttctcgatggatgaaaggtgccccggcggcagtggcaagtaattgtactatttaattaaaactacatttcgggtctcgaggaacagaagaccaccacttgatgcgccgtatttgggacgcgaaatcattcgggccggatggctataaaaaacatggaacgtggaaagtagccccctgccaaagctgtttaatttgcccttttcacataatttactccttcaataattcacacgccaccaacgcggcagcacgcgtaaattgcggccaaaacatggccaagaaattaaaaatacaacacggcttggacgaaaggagaaagcagcgaaaggattgctctgacagctttactaattggtttgttttactcgtgactctaattaaaaaatttactttacgactctggaacgccgcggcaaaggagcggacgtaatgacggtacaaccagccagcgtgctgaattatttttttttggtgggccaggccaaaacaaacagagcggcagagcggcgaaaaaagctggaaaataaataaaaaattaaatgaagaaggtcacgggacgcaggacgaaggaccggaaaagtagaagacaagatgctgcagcggccggaagtgtggtcaccgaaatgtatgaaaaacttcaataatggcggcgcaaattggcagctgaaagcgttgaccaacctcctgacccctaaccactgacccctaacccttagccatcttagccccatggcgcattgacatcatctgttcggcgggaacatgttccatttggccatatcgctggccacaaatctgtggccagaagatgggcttggtgccaaaatgcgccacctaatgccacacatttaattaggaagaaactgggaaattgaggagaaagaacccaaaccacaatattcgagcataattttttgccatcatttagatggagattatctgggcgcgaaaaaatcagcagggagaaagaagtggccaagaaaaaagggataattgcgagagaatcgctgtttgtattttaattaaacgccggacccaaagaaaatgtatatagatgtggcaactgtcatcatggaactttctgcttggaattaaaatatccatcttcggggcaaaaagtactttctgcaccgcaacaaccgtagacgcattaaatcgaattaaatgcaatcaaagcaaagactaaccaccaaccaatccttcgggccatggaactctaaagagctaatttatcgggaatagttgagtcctcctggtttatttttttttagatttcttttttttttttttgctgcccccgacaagttgaagtttccggatcggaggttggctgaaaaataacatggcaaagagaaaggaaggataattctgttcaatgattgcaatttcaagctgcgcgtactctcgagaaatcaggcaaacatttcgagtatttcggttcgattagttttttccggcttttccacgaggccgccgaggtcggagctcggaggtcagtggtggtggtgtggatgtctggccaggtgcactgtccatgttttcccatgtctggactccaactagaggtagagatagagttagagctaatgtccgtgtctgcgtctctgtttatctatcctttttcggtgcacaaattggaaaagttccgcgcggcactcacaaaacaaatccgtcggagcggaagaaaaaatagaactccatctatattaatttacagctcgattcgctcgtgcttaaattccgaacgggcttgaaagcttctttaatttctcctaaattagtggccaatttgtcaggaaagcaagtggaaagcggctttttgaatcgataattgtgtgtgccctgggaaaactcacttttcttcttcagcatgtgctcctgttggggacataatgtgctccataatcatctcaaaggacatacaggatttgcatattaaatacatttcccaggaacatcacattttgggtttttctttattttgttgttttttttttttagctccccaaggagacaatttcactttgtttcctttaaacagacagttttgttaaaatcaagtacaaagtggtgggcgtggcgcgtcgcatgtgtacgcctcacggaaaatgtcgtcatcaaaacgacaaataaacaacccacatgtgtgcgagtatatttttcagctgtatgaataaatgagaaggctgaaggaaatgagaatcctgcaagattccctccacccacggctgatattaaaatctgaatttagccgaaattcatttacctattgacataatttagcattgcatacttctgggtgcgacacttgccgctgccgataagacattcgtgtcctggaaggggacacaaggacgaggaaaacaagaagaaatcaaagctggaagttgtcacacccctgggaccttggcggtggtatttttattatcggcccacagatagcaacagagccacccgaccaaaaccgaattgagatgctaagcactgcgccgagattttccatttgctggagcagggggctccgaattgtgccccaggaatgtcgccaaagaccacaggatccagaacacagaaaacgggtgacattgagacgccgtcggtagacaaaagcggtagataaattacgagcagcaacaatggtggacctcttcgccggggtaaatgaatgactgcaggaggatgaagtttccccggtgtcgttctacttccatttggaatccaccctcatcccatcttctgccttcaccgcaaaacccaagaaacggttgcgtgaaaagaaataatgaagaccaccccaccggagctcaataacccaaccacccggttatcagtgaagagaagggtactctgccagcacaagtatccagtacctagtaagaatagcatagatggatctctaggaaatcatgaagtataaaaatgtttcgggagaaggaacttttactacttgtccacgataaccttcctatttaccaacatttgcaattgtaccttcattcgtgagtgtaccgaggtacaaccaccgggatccttcacatctctaacagccatatttccatccatcgagcggaatggaagtgccaggtgagatgggagcgactgccgctgctgccaagattgagataaggcgcgaatttgtcgcgctggcagatttgaagcagcgacattgataagccggcgaaccaaacgggcgacaaagttgccattgtgatatgacgctgatgccagaagtcccgggatgccaatcacaatatcgcaacaaggccactgggacagtgttcgcgcccgtcggcaatcggttacagaaaatgccaggcgataagtcaggaagatgccgccaaggaggatgacggatccattagcctgcgccgtcagtgctttgcatactaagagccaacacgttttggccaaatgagaaatggaacgtcaactgtgtgggcttattgatttaagcgcttttaattgcagacaacagacaaccatagtcattccatctgagcagacgggccactcgaatggatggatggattggatggaggtcatggctacgtgatcgtgcctcttaatatgcaggcgcataaattagaatatttaaattgagttctttgacaccgcgtggctgggcgaacgcaacgaaattatagaagcttatgctttcaattaagcactttttgcacatcaggtgcgttttatgccactcagacggtcaaacggggctggctgcgttgttatcctgtcggattttgccggctgggggagggcaactgaacgcgcaccgtcgttaagctttttaatgttcaatttctgccgccagacgtcgagaataccagctgctgtcagcggagacaatgagaaaagctggcgaggcacaggcaatcgagagcagtgagcattttccacagaacagggatatatattaaaacggacaagctagaagtgccgaaattgaaatgagaaatcgagccccgtttcccaagatggcgctaagcattttcgcctcacaggacgaacacagtgcgaaaagctatagatgaaattgtaaaaataatccatgaacttgacattttgtatctttgaaatatgctcaacctaatgctatttaaagttacatttatgaaagggaaatgacaataagaagtgaatataagatattgattatatttggattctgtcttaaattctgcattcttacttaaagctatatactttaatgcacaataagcatgcatggaaatagtttttttttttaaatgacatactccattaggtaataagctgccctttagtttctttgcctcagtgaaactgttaccttcctactttattgacttgcgaagcaatttccccaagtgcaatgactcccactcagcagcaggtgctgtcgaagatgcccggcaatatggccataaatgtctgcagctctgtgtagcagcgataggttgggggcgttggcatccacgtgggcgtggctgtcaaccgggcatcatcaagtgcaaacaatgagcgcttcaagtggctgccggagggaaaaagtcgaaggcatgaaggggcttgtttaatgaaaggacacagagtggcagcaggcgaaaggaaaacatatgagcaaaggactgtttaatgaatagccccgggttaatatttgtcttgccttctttctagctcgctttttgtttggtgcctgggcagaagggacaatattgaagtttctcgttaggaagaaataaaaaaaaaaaaacgccacccaaacagctcagcccaaggttggcaaacggcaaacaaagcggcttttgttttcagcccagtctgagatgccgcaggtgtaaacttcaaacggagctgagggcaggggccaaaaggagccacaggggggatgatggcgataatgagacagacgacggatcgggggagggcaatcttaatacgatttatgtccataacaatgggcatataatgcataaatcacttatccggcgatctcttcctccagcctggaatagtagtcatttagccgcagaagaaggcttatcaaatgccaaccaaagtccatttccatgccccgactctgccccctggaatctctatctgaatctaatgctgattctctgccaagcaccagacatgccaccccgtccaagtgaaaagaaaaacaaatatctgacgaggaatagcaagttaatagcaaaatgctgtcaaaatacatccgagacacacacgctcattggcagcatcattcatctctgcatgcggattgtaaatacgtacgatatgccagaagaaaatatggatggaagcgggttggaagtggtatggctggatatccaggacacgcaggacagaaaggagacacttgttgaggagacactctggctggcagcttgttgatttgcatctgtttttctaccgctcacaaaataaagaagagcaataaccgagagcagcaagaatccagcacactcatttccataagggccacagaatggggcgggggaaaaaataaaaaaacgaaagcgaagccacaggacagccccctccaactctcctacccgcagatggaaattgaatggattttgatttcatatttttgcttttggcatgttttaaaatttgatttacttgccacacgctcaaacgaaagcgaaatgcaaactcctttggctcgctgggcgaaataatctgtaatactgtcacactttaagaattatgtaaattcgcatattggctcagacgtggcttgtttatgaacttgctgtcgtaataaatacaatttaagagtttatatgcttgaatcagattgtttctcaatcgcttgctttccatttgctgggcacatcaagaaatcgttaagattcatagacaagaaagtactaaaaaatgatgatccttatccaaagaggttaagttattcgggggtcatctggcatcttgggcagctattagcaccggcctggaactacatacctaaacgtccccaaaggactcacgcaattgcaggcaagtccttggcagggtcttgggcttatcctagatcggttggctggctgatttgcataatcgttgactgtgacatggccctttaatgtacaacacacgcagtggcattccgtccactcccgcctccgtttgccacgccccccaaaactcacccaaccaacccacagagtgggcggcagccttgtacgccccatacagttttattaatcgacgcgtgtcacttattagccgcaggatttttcatgtgctttacacgcacatggcagggggtaagtgggtggtgggtagttgtggtgctggggcagaaggacgtttctcaaccctttgacggcaaacaagagcggcattttgcgctttgataaatgaggcacacacattaacccagctgcagagaagaaaaaaacagaacaatcgcatagtggaatcagcaaaaagtggctacgacaacaatatattataatttttcctttctccaaattagatgtgcatgttcagcactcatattttatcagataagtcgcagactaaaattaccagtcactggcacgatgtaagttcctggaaaatgaaaaagctcccaatgaagagagtgcactttaaataccgcagaatattgttaccgacaacacacggtttacttatcttgttagcgctgcaacagcgcacaatatttaattaattacttatttaaaaacaatggcgaacccttactgattcattttgtattttatttatttgcaggtgagttccaactgcactgactgaaagaatgcaaacaaaaaaaaaaaaacaatgggtaaacataaattgcagaaaaagagcaaaacaaatagtgccagttgttgttatttattaatggggcgtttattgtttaaccttgtgttgtgtaagctgcatttaaaaacacggaataaaatgggacacgccctctcgattgcaaccaaccaaccaacccaaaaataaaccaaaccaagccgaatgattaaaaatgcaataaattcaaacagggctacactcgcatgtctgttcgagatcagtgtgtgtgacaggcaatgcatgaaaaatgcagtactaccattgccggcggggtgaaaactcgtttttccaactatttccaagcaaattgctgaggacaatccgctcggcaaactaatcacaaatgcatcccccccacatgtgcacacagatatccacagattttcatccaaatccactcaatgcagcggcacaaactcagattggcatttctaattcaattataattgctatctcatcgccccgaaaaattccacaaccagtttcagtcccagtccgaccgcaaaattaaagtcttaaaaatgcattaaagccgcaactcggagcgcctgcagcatccagtcgaaaagtgaaaatcaataaaatttattacatgtcacttctgcagagaggcatcctcggctttggtttccagctgcatcgtcagacgtgcaccggaaaatataaaagaggattaaaagtagatagaacagaagtatgaaaacgttctaaaatctcaaactagtttgaaggaatttcataggatatgagagtattttgtggttactacaatacgatatataattaagtatagaatagatttcatcactgaactttaaactgccaaaacgaaagtgatgcattctttaaagccgaattttattcgcagtgccacgaagtaagtttgtctatttgagcacgccaaagtgttgtcttgtgtctgtgctgtgtgcacacatttggcacagttttcaatttcattttccatgctgaattaaaagcaaactacactcgaatgcatggcacatgtaagttgctgaaggaggagcaaaggagcccaagtccttccgcgccggcgaaacgaaatatcgagtcaactaagcagcattccgtctgctgccgcaggattattccatgctggctttttttccttctgttcgccccatttgctgcaacgacttgctgactactaactgtgccacacagccaacgacaatctctggctcccaggatctgtgtggctgaaaagctgccttgccttgccttgccttgcctggcctgtcctggctggtttacttccttttggccgcctccactcgtgtgcactgcttgtttccgtttccggtgcagacaacatttgcttggcccccacttggccgccgataactttcaagttggcaaactcgcagctgttcgacccagttgcaatgactttgattcggcattcccattgaattgcagcccattatcgagcgcactcgtcctgtggctctaaattaaagtaattagtagacaacagccctgcttcccatgtcacttagtgggggaatcgctcaagaaatacagtggcacatatcaaaatccaatggggctccatccataattgattggcaaatatgcaggctggagattggacaaagatcccagacagagcaaaaggcactgggatataaattcatgcatacataagcagggatttgactggcctcgtctgagtcgtgctgtccagtcgacttggacatgaccattaaatttggcttaaatatgaaataacttcgggccaaagagacacacaagtctggcgagtgtttatctttaaaattgtagacgacctaagcgctcagcgggggtgacagattgtccgatggaggagcaggagggtcctgctgcaatttctacttgatttatgcccagcaaatgaaaccacaagcaaccaggacagcccaggacgaccctttactcctttactccgccgggaaaagtcaagggatctgaactgaaaaactgttgcccaatttgtctggctgcgtgtggatgtgtgtagatgtggatgtgaatgtgattgtggatatgcattttcattttgccttcgagtacgacgactccagcctcacgtttgctggtatttaaacaatctaaatgatgctcttggtactgccagcaaattgaaatttactgcccctcttgcttgacattgctaaatgcttgttcggttgcccgggctttatcttttgcagtgtcaccatgtcgaccagttcggtggtatggaaatcacctttatgagaggaaactggggtaggggcaaaccccgcaaccgacctcattaacattttgctaacaaacgcaccacaaattatcccgtttaatttattttcaaactccaccctaccgcctcgacccgcaactgtaaaaagaaaatctcggaaaaacagtcgaccactcggcaaacaagggacgggaaacagcaatcacagaaagaggaaacacttttaaataaatgagcagaaataagcgcaatgcaaagtaacagacaaacattagttagctgaaaattggccaatggcacacaagctcacatgcggaaaatggtgcaaatggggaaaatggggaaaatggagaaaattggcatggggctttggtttttctaagccgcattcccgttgtgattaaatgcacgtaattataccgactaatagtgaaaatgcggccacgccaaaagctctttaaagggatgctgtcggcttatcaacttcaatccgattaaggcgccttaaattatacaacaattcggcatcatgaatttcggaggggggataaatgtatttattatatgactggcgaaagttatccgaagatatcagaatgtttacggccacaaaggccgccatgcgaacaatttttgggtggaaaaaggaaagggggcgtcgacggcctttgtttgctcttcatattaacaatattgcgcccgacgacactcggctgaccctcataataaaataataggatttgcgaggcggccaaacatttgcattttggcctcaaagaacacactcgcataggcaaacagttaacgcaaatatgaggcgggccaaaagacaaaggtcgttcgcccacatggccagctcctcctttcttagccacgtttatgcggagaaaaaaacatgaacatttttaacccttttcaataatacttgaaagtacaatacaatttagaatcgctggcattttatacattttaaacagagactgagaatataatcgcataatcagctctagtagagagatgattttaaaatcatttaaattatttcttttaagttcgcactttatgaacaccgtgcataaacccagcaaataaagtacgtgggtgtgtttctatgtgtgccgaatgaattttgccaactttttgcaccctgagctatttgctgaataaaactttccacagccagctgactggaaatagaaaagtgtaaggcgggcgggaaggtagcatcgatttgattccccacttaaaggcactcaccttttgctcggtcgtgaggtgactagctaaggtaactactgcttttctgaagcggtaattaaaagcaatttgtaagttaagcccgagcagagaaacacagacgaagaaggacggatttttggcgaataataaccaatagccctgtggctatttagtccttctataaggaccgctcataacggcgcattaaatttatcagttcgtttagcagcaaaaagcggcagcttaaatgctcaactttcgatggcggcggaagcgagcgaagtcaatttttattgggcgcgccgcttgtaaaaggagcaaatctgatacacgaaattgcagatatctgcaggaaataaaacaaaacgatcgtgggagctgaatcaaattgaaatttctcggccctgctccagacgtcgaaaaagaaaaagatggagcggccaggaagcgaggcagccaggaagcagcaaggcgatggctggtaaaaaatcaagccaaaaagaaatcgagcgagctgtaaaacggcggccagcgggtatctaccaactaccaaaagcttttggacaggaactggacatgcggcgcggaaatgtcttgggcaaaaaagtacgactacaaatgctgcgcgacagccgaaaaaaaaacgagaaatgtgaaaagttcaaagacgacggggccaaagaaaaaatgaaaattgaatggccacgctcggttggttttttccatcgtgaatcctggagcgagaaggttctcctccaccttctggtcctcctccatctcgtgccgcctcctttccccctttattgtgccagcgttgtcgtcctttgctaggaccaggaagatggccattatactttatgcaaatcttgtggcagctttaacaaacctccgtcccaggctccgtggcaaccgcacaggaacaggacggggaaaagctgctcggcacggtgcgctggctcgctactcgtcggatgcggtgtggtggtaagttggctggttggttggccaaaagccgcagcagcagcaaccgaaagcgccacgcattttaatttaattaatttaaattcttaatgtgatatcttacgccacccacttgcgtcgcctctaactggtagggcaactatgttgtatatttaatgccatttttttcgctggcactgcaattgcttaatgtttcgtaaacaattttgaggcgttgcaaattaatggccaccgcagcgattcgagtgtcgaagtcgtggcagcggcaagtttccgagcaattgaaattggagtgttgcttgcaaatggccttaaaattcaaattagctcggtgcacgagagccgtaagccggcatcattactcatacgccatgggggcgatggtacgtttttattccggctccaaacgcctaccgcctttctgcacagcccatagaacttttcgaagattgtgttccactgtgggtgtgtgtgtgtgtgtctaaaatattagtgaaaattcctgtcaatatataaccgcaaaaacatttctgtctattgagaagtttgatttacggcaaaggatgtgcatgtgtccttgcggtagatatatggcttccttcttcccaatttctcgtgcggttgtgagcgtgtttttggggccaattgggccagaatatcccgaaaaatataccataactaccaagtcaagtccacacgtttgtgtggctttaatatttttacattgccgagttccgacaacccttttatctgccttatgcgcttaacgtatacgtataaatattgtttgtgcgaaaggattttttcagctcctttgctattctgctcttttccctttgcgctggctcagcgcattgtgggcttttttccgctcgagtattgtttttattatttaatttaaggggttcgccaatgtggatgaaatataaattgccaaataaataacaggaattcataataagtttatgaccgagaaacacataagaagctgcatgaatgttcgggcatgacagggcaataaaacaatttacgacgcctttctcgaaacacctcaccccatttcctttcacaattcgaaggggttgatgggaaatggaggcgagtcagtagtcacacgcttattacgcatacgccaagtgcagcgtcaacaagcgtaaatcaaacgtggctcaactcgaactcaaactcaaaatggaactgcaactggaaatgcaaattgagaaaactgtcagcgccagtagaggagaattcgcaggaatcgcagaaatcagaggagtcgcaggactcgtaggagtcgcaggatgcaggatgctgagtgcagagtgcagctcggcagtgcatgctaagtgcaaacgtaaacgaaaatagctcgaaaaaatagcatttcgcttgcggatttatttggcatttcagaatttaatgcgaactctgctcaaataatgttatgcaaatgatatgtgcataaaagtcaagctcgatcctgacagcggccacgcccccaacaacaagagccaaagcccgctgggcggggatgagctggaaaatgtgtggcagcttggcagctctggcagcacatgtgaaaccagttagaaagatgaatagattgactatcgacaagcgcgaaagcttgacgagttcacgcccaccgctgctgcatcatccgttgggtggaaaactgaatctgggtggaaaagcggaagtaagcagggaaaagcaaggcgggcaagctgacagcatttgcatatttcgggtgtcaaatggcaggacttctctccacctggctgatggaagccggtgggtttttggttgggctttcgcgtttgggagaagatcgcggttctgggatggaggattgggggaatggggattggggtttcgggtaaatggcattcgctgcttgaatgacatttcactcgtacgctttttgtcattttttcagcaaaattgctgggaaattgctgtgccgacgtagcacgttcaccacgcctctgccgttgacgtgcacatttctatggcaagaggattttgataaatgcacttacgactccgaagtcagtcaagtcagtagggcttactagttggtgccgttccggttttttttttttttttttttttttgtaggggctcgtagaggattgtgtgggtggaccagcatcacctaatggccaacagggtgggcggaaaatggcaggcaataaaaatgaattggccgcagctagctgcgctttaaaaacaacattgtgccgcgggctaagagtcgacaccgtaaataatttgcatgcattaaatatgcagcaaggtaaaacaacggaaaatgcaatatgctggtgggtgggggtgtagattttccagttgccaggtgtggctacgtatcccgcggctctccgcgctccatatgcatggaaatctcggctaacaagccaactcctcgacgaagaagctgccaaaaattgggtaaagaaaaaacaagcgaaatgtaatgaacattcacccagtaaactaaaatatttgtttctcgcttcgtttttggttagtttttcttggttttcccatccaccgcccgcaatgcatattttaaaatgcattgaaatgcagatagtgcgccaggtgggcgggttagctggtgggcgtggcaggtggcaggtggcgagtaaacactaaacaaatggcaaaacaagcaaagatgctgatcatatacaaacacacaccagcactaacagcaaaccgtatacacacatgtacccacgacacgtggcaaaagttttaatgaaacaaagtgtggctgctgttgcaagtattgcttttgctgtcggtcctgctgatgcaactactactttccacaggggcggagttcggtcagaaatgaaattacttaaattaatagaataaatacctctttaattctgcaatgcacatttcaaagagtaaacataaaaaagttgaaaaaagcgatatattaatagtttcaaaaaagcttagattttcgtttatttctctcgaaaacccaggttaaaatgactctgctcttctcagccgatttcacaataaaatcccttacttctcagctggtgatataatttctgggatttttctgagccattcgaactaccgaatccgctcctgacttcccagcagaagcgtgggaaaatgttctggcttgtaaacggaaccgcggtaccgaaagcggagttgccaagttgcaagtggccataggagctgcaatcacgcaacggaaatgagaaaatgctgcaagtacatgcatgtgcgggctctgtgtccgccgaaaataatgcaacaaatttagtgcgctgcttgggaaatgaaaaatggcgaatggagtgcatgcatacatatatcaatcgccggtgacagcattttccagcgttttccaactgctgtctgctcctcattgtcaaccacaatgtcgcttgccagcagaaaacaattcgtgtcgcaattcgaatcgctcgaaagtgtatctgaaactaaaactattgccgcagccgcagaagagtgcagatgcagctagagattttagcaaaacaatttcaaatgcctcgcgtttgaatcgattcaacaattcagccgcgtagcaagcttttccacttgcctccagttcccagcggccacagaacgccgaaactgaacctgaaactgcatctgaatctgtatctgtatctgcaactgcatctgtatctgtatctgaatccgaacgggaacaaaggccccctaacgaaagtatgccaatgcgctacgtttacaaaagcaggcgcaaatgccacagtcaccgctgctcgcgaggctcaaccgccattacctggttaaggtggccaaaacagcctgccaacggaagatatggtgcacaggaagaaaagtttgataaaacgcttaatttgtattaagtgtgatatttaaaatgcaatggtttcaattaaaagttaaaagaatactacatccattgtaattagtacatgttacggctgtgaccgctatttctctcagtgcatttcgctgcaactggcattactgtttatgcaacaatgtacacgcccccttatctcgccgcccaccgcaccgacccattgtcgtcagctgctaaaaacgcttgccacgtaaattgtgtgtttgtgcacgagataaattatttaagcaacaaactgtgcttttcgcaccactttacgtgcaacatgctgagcatattgccgctttagcgccgccaggtggaaatcaatcggtttggaaaggtattgcatattcacctgttttgttgtgagtgtttcgtaaaacaatggatatcacaccgtcgagttgaaggactgtttccaaatcgagtttattgtgcggagtgcagctgcagtgttgtatgcatttttgatgtaagtgctccgcgtgcgtgcgaatttacagtgacacgatgggagaggggtagggggtgttccacagtgcgagtgcgcactgtacggtggactcatggtgacacagtttccgcgacagcgagaacaaaacacattcgagctcatttttcagcacggacagagagaaagtgttcggcgcggaagtggcgaaagtttctgcgttttgtgcaacgcacgcgacttgctacgtgtggcaagtcagcgaaggggataaatttaaggactcttgaatttgagctcgaatttaagtagcacacagacagaaatggaatggagatcttctgctttctaacgcccaactatggccattattttgatggattaaaagcttagcagtggggaaagcttctgctctttatgtttcaggtattgtgggatttttcagcacgcagaaagagctgaagaaaattggaatttcatattcgatattagtattaaagatttctattagttaatgaaatcatattagtgcaggattagaattgttgttgtgtcgaatattgcatttttgagtagttttattggccaacttgttaaccatttcgataagtttagtttaagtttaagttgataaagataaagataaagtttagttgataaagaaaatatttttattttcttatacttaacccatttttgcgcagtgctcaattacagattttctggtcgagagacagcaataaagtttgccgtttcatcggagcttctctgctgctcccgcagctttacccacttttaatgaaattttgtgcatagttgaaaaccactttaaaattgtttaatgcgcctacgccctgcacacatatttggctctgcacccgagccttgaaaaatagtggtacgcacacccaaaaactcacacaaatcaccttcctgccattcgactttctcggtgcgaagtggtttgcatgtttaatgcatttcatgcatgcaatttaaggccaactgcatttttggtcatttgaaaaatatgtgctggagcctcgacatgtgccacttgggtcgttttggcccaaatggcaccgccggccaacggagttgaaggagagaaattcatatgcaaaactctaatttcggcattcgcctcaaaggatacgaggtgcatatcgcgtcgactgcaccacccagacatatttatgcatgccgagatattaacgcaggggtcagctcgtatttcgacaggggctggagaaactcgaagtgtcctgggcataaaagagatttaaagtcctcctccgggccccgttgaacactcacatggacactcacatagatggcagattgtgtttgtggtgacttgtgtagtttgggagaactagaagatatgtgttcgtgttgattcccagaatgaaagatccagacttctatataaattgtacaccgaatagaaaaaaccttttagtttagttcagtttcattcgctctaaacacctttgtgtttaagaatctcgtaactgctgagtatctcgcattcggttttactactcccctatcatcttactcctgctgcgtgaggctgtgtctatgcgtcttaaagttcatttgactgcaaaatttgtgcaatttcacacaagcgtgcgtctttgtcccgagacaatataaaatctgagggtcgacaaattcgcacgggccatgtccagcattaaagcctgaccaattttcgcccgtttcctttgtgctcggccacgcccccaagccggcccccgcctccgcacccgcaccaccattcggatacccccttaaaatgatgatctgcgaaaatgtccttttatgttcgctgggcgctaaggacctgtaaaagtgtctcttaagaagggggtggcgactaaaagcagacaggtgggtcaaaggggctggctggatggtcggatggctggatggccgtgtccaggggtatcgtaaaagataaaacgaggtggcacaagctcacacaaagcggaaaagtgcagtcggctgaaggagtgggcgggccgaatgtaaagacttttggcctgtttgctgatgttgccgtttggctctcttttcaaagcgctcctggcgactccttggggcgtcttttacaactggtgaggaggagccctcctacgcgactgcaagtctgctcctccgcacttcctgtaatcaaatttgttacgctgcgttggtgtcctgtttgcaggaccgcacaggacctgctcttgaactgcatttagtcgggccgaacattagtttcgctccgctgcgctcatttgtcgcccaaaagccgggcaatactgatactgttccctgttttgtgttgcccgttttctcggagccatagaaattggctttaagctgctgcttctgctgggcgacagcaattttcacgttgaccatgttggcaggatagcacaggacacggaaacgatgcccccgagggtccggcgagtgcgttaacacactctgacgggtcacacgcaccgcgcagtgtcagtgggtatgggtcgcaggacaactgcccgccgtcctgtgtaggtatagccatcctgccatatagtccttcaccgcccctcctcacataacgcgctaacgttccggtatgcgcgtactgcgcgtttattgccatcctgggagtcctggggtctcggcgtaaacgcaaagaactcgctgctacatttttatgctaattgaaacccattcgactggcaacgaattgccatcgatagacgggcccgccaagcaggagtgagggtgcactcgaaaaaatattagtttccaaaaaaaaaaacatagttatatggcccagaaatgcatataagctcgttaaattttacgcacattaacaacattaaatatgttgtggctgcatttcattatatgtttatttgatttataagacaattaattacagaaatacggctgactacaaattataaataatatttttggttacgcctggcagaataggaaaaaataattatatccaataaaatagttaaatttgtcaaaaaatagcaatacacttttatattgttaaatttttagtaattcaaatgtatcagtgttgcaaatttatgagtagagcttattgtgatgtgccgtagtggcacatttctttgtaatatcgatatggtgtgggtgctaattggtttttgtgaaacatatatttcgtaatgcctgccatattgaatccgatatggttctgcttgttagccgtgtacgaccgcaacctaacccgcttcaccgcttttccgcttttccattttccaggcagcaacagccgctcgatgagcaacgtgcaacagtcggcggtggccgcctccacgctgaccgccaccctgccccgtttcctctccagaggacacacctaccgcgccgtcgtcggggacacgctggtcctgccctgccaggtggagaatctgggtgagtttggtataattaatccggcgttattagtatttcgatgtgaaaatgcgatcataaaaataaatgcagatgcttgcgtacaacaacaacagcaataataataatactcgtaatgatattttcgacggcagaaggcagtcggtgtgaattatgcaaaatatatgcaaatatgtttaggcaaaatgtcacttcacataaatttaatattccagagcaacaacatgggcgacaacacatttggccaaccaacagctgtcaacagcctgtcgttcgggttttggccaaaagcatcgacacatttttcccttcgcatttataaatcggctagctaaatatgcaacctcacacatattggcagcaaataaatttggctgattaacgttgccagccgcacgaagagttggcgagttcggggtgggcagggctgtcatggccaaatggagtttagtttagccttgattcgccagttgatagattttccctgttagcagcaggcagtcaaatggcaaacggcatggaaatgcaatccaagcgtgaatatgcagctgggctgcaaataaaatgacatttgattgcccatggatgcatgaatggctgccgttttatatcgagtgagagatattaaaatatgcatcaagtcgggcaatgtctttctcgacttcaattagacaggactaatgcaaaaattcaatcgcaaaacgcatggcaattcattcgctttgattgcccgtatttctcatatgaatatcttaattaatgaaattccagtgttcactcgagtgtatggcccaaagatatctcactgggagatcaaagtcaaaagcacctcccaatgtgggtcaacttggtttggtttagtccattatatttcgctaagtgacgcaaaacttttagccatcatcaaagtggtcaacatgctgggcgttgttggcaaacaaggcaaacttgccaggaagttactctgcggataacgcgactccgccgaacgtggcccaatgaaaatcgactcgaattttaatcaattaaaggcgagcggtatggtatatttgcaccgactaaacacattcaactaatattgaccgagctgatggctttccttcgcgccagtcattatcggcgggaagcgctttaattttctgaccccgatgaacgaaaaacaagggggggaaaagtttaaattgcgactgctgttgacatgccaataaataaaatgcaattaaccgttcgcagcaaatgaaaataaattgcacattgatggcagcgacgacagtccgtgcagcatgcactccatggcttcacagattgacatcagtcaaagtttcccactccgtgattgtggaaaaggcaatgcagttcaaacggatggtacacggcggaaaatgtggaaattttacagaaaaaatcacacacttgtaattcaaaaagccgggcgtcttgttttcatcgcacattttttactgggcgaagcgagcgaatatcattaagtatctgatgagcgtaaatatccatctagcgtaaattatcttcttagctgcaaatttcgctgagtgcacttcgtatgcgtatttctggttgtaccagcttgtttgtgcgtagcttttttctttggcaaaatattttcatttaattcaattgcctaggcgacgcattaaagtgcaatgatttcccattaacgcctgatgtttcgactttttgtgaggccatttcagctgttcaaatgtccagctggccaacacagattttcaatctgcgccttaagctgtcatttcagctcagctggggattatagctccgtcgactttataattctctatatgcatcagatggcaggtgatgtgacctgctcgatgattcgtttgacaatgacgacggcgtcagcatcctgttggtaattaaacaagaacgaatcttcaagtttgttgctaaataatcatgataatggctgcagcggcagggagtaattggatatgtagacaatgctctggcttcctctatttgttgccggaaatttgccccgctgcactgaacccccaatgcggttctggtcatgtcactagccatgttttctggcggtccaacagacagtgtgtgtactttttccactgcactgtcatcaatccgcttcagcttttagcgatgggtgacatggcgagggtttgattgcagctttcatgccccaaagagccagcggcgaggtcaagcagaaggagagcgacgtggcaagcctttaatccaataaaagaaattaagtatcaaatggtctatgaagccgttcattgattgccgttcgacgtggtacgagatgtaggggtacatacatacgtatgttcgagtacactcgtcgcatatgtgcgaatcaaatacgtatacgtcatgttgtcacccggtgaatggcagacaaaaacgctgatcgataaatattgagcacggttataaattggattttcattggtctggaggcaagccagcgtattgacttaccaaattgctttcacccaaaatctattgaatgagggggccccgtgcaaagtgggttactcatttcggaatttagtaatcgaaaccatcttgtaggccaatgaaaaatatgagccacaaaggcaaaagggcagcgcctaaagtcgcctgcgaattcacatgtcgatattgacgagctataaaatgaaatttttatggcattcctctcccattccaataatatcaatatacagccattagactctaataaaatgcaggaccggaaaccggcaaggactaatataaaatcaaaataaaaccctccaccacctgctcaccatccgcaaattgccgggcaattgctgcggaggtctggagtcgattcaataataatcgagacccaataaaatgatgattgcttgggtttaagccgcaggtttcaacgagggcttatgagtggggtcctgtgcccctttttctgaacaacttgagcgaatattctaaagggagctgccttacttttgcagtcgcgagtgtgagtaccccttaatgaccggaaggaaggaaggatggcaaatgctcaactgagcacactcattacagacgcgaatgcattttaaaagcggtattaataatgcattactttaagctgtgattatttaatggcggcttaaggtcgggaaaatgtcagctgccagtgtgctcgcacacacacacacacacacacacggacacacacgcgcatatatgaacaaataaaagttcggaggtcgagaaaataaaaacatttcattataatttcatatttcgaatgctgaaaatcatatgccaacaaaccgttgaccgttggactgagccggcaaaggacgaaccacccacccacttttacattggataaacgctggcgacgtcgtgtttacacaactctgatttcggttttacagcacgtatacgtaatatgagcgtgcggcgctttttcacgtttgcttttttaatatttccataataaatacaagttcataaattgttcgaggccgtcagagttgaatgcgggtctctcattcagggacttaagcacacaaaataaataaacatattatacgccacttaatctcatttaacaaatattcgtttgcctttttgtggcgacgacgacaataaaagcgatccgactggcatatgcatattttgcaaagaataaaaaacaaaaaaaaaaaaaaactggcaaagaattatgccaacaacatctgcaaaattatgtcatttatatgggcaaacatactaaaaaaaaaatagatgaaaacagaagcccacacatatccagcttctgctactctagctcctggcaggacctccgctccggatagacaaacagaaaagaatctgcagaattttcacagctgccagatggaaagacgtagggatagatatgtatcagctaggacgaaaactattttcactcgcctgcgccgctctccacaacgaactttgccagccacagtgacagctgaaagtatatgtctacgctggcagcaaaatgtttcatgtttatattgcggcattttacaataaatttcgtagccaacgagaggacacacattttgctctatatatttttcatctgcttataggaccacactccgcatttccccagctttttccacattaccacagttctacatctctatcgttctatctctatctcttgcaggcaatttcgtccttctgtggcgacggggaacaaatgtgctcactgcctccaacattatggttacaagggatgagcgcgtaagactgatagatggttataatttagagatatccgatttggagcctcaagacgccggggattatgtttgtcaaatcagtgacaaaataaatcgtgatcaagtgcacacagttgagatattgggtgagtacacgtcgacatgtttgcacagcattagctcaaagatttgcatttgacaagtgcttcttaaggcgcacacatcaattagccactgatttactgaactgttaccaacgtccacccctttctgcctgctttccacccgcagttccgcccagtgtacgggccatcccaacatccggacaactgcaggcccgcaaaggaggacccattacgttggagtgcaagggatctggtaatccggtgccatccatttactggaccaagaaggttcgttacacatcgctttgtgtgctccggagaattcgtagccgttttaagtgaatgtcatttagtttaattgaatttaattcaactgtttcacaactgtttcgcatcgttatgtaaatttaaatttaaattacgttcccttctcccaacgggctccaagagccggcaaaaactgcgtggggtcagttgctgagcactttccctttcaaatttcactttcactcgcttttaagctcttaagagcccgccaacttttcgccatcagtgggaggcaatgaggtggttgtgagaggggcgtgagtgggagcaaaagttttccagccattttggatggccaaaagttgggcgttattaattaaaaacgattcgcccacattaaagccaggtctagataggaatgtgttgtgctgctgtttatattataaatcaacaacatatcacatcactcacagttttcaacacattgccgccgaaatctcagctcggcagcaggagctagcaagcaaacaaaaagtgagatgataaatcgcaaggcacagccatctacgattgcggcatgtggctgtaatgggaggcaattatgaattcaacaaacacataattttacgcatgagccaacaaagggataacatatttgccactgggccgtataaagtgggccaaaacgggccgaccaaaacccggcgaaacgggagcgggacaaatgaatttatgccgacatatatgacttgcaaatgcgtatgcgagttggcaattagttttcgctgctaatttcgagaagtttatcaacttgtgccaactagagcatgcagacactacacagaagggagccacacttccattaaacatttcccattataccagttagggctatatattcctcgatccgaatctggcattgattcgatgccagggaatttacactaaatcactgtcagcgacagtcacttgcgagtgccgggaaggtgagactcggagactgcaggttgccagggagaaatgctggctcgtactccaagcgtaattaatgcgattcatagaccctcaaaagtatgctatattctacgactacctagcatggaggaaggcaaaagccgaacatggtacccaagaaattgccgcttggcaaccagtctactgacccagtcactgtcagtgtcactcgaccagttagcacatagtcatacacttggaaaatgggaaaacctatcaggataaacatatcaaccaaaaacaatctagtgacgaaggcagatcaactgacagaaatactgaaaatcatcaatctatgatgattaaaatacatattcataaatgacccacttgcctacataggccatttatatgacatttcagtccgcacacatacaaggtgcgcttcgtttttctgagtgtacccacttgtactcactcacaaactttcaataaagcaagtgtcggagtcgtaagcactccacgaatgtgtgtgccatatatgtccatgtcagagcatctacatttgggtaaaagtctcgtttgcattgctgcactttggcgcatttgacatttccgttcgatttgtttgcttctaggtaggtactatgacttgcttcgactccacctttatgcagaggtccttctcgtcctgccaatatcgctccacccgcttgcctgtagacacagccaggctgggtgtcattccacagagctgcgttccatttcaatctgccccagcatttccgtcgtgttttcggctgtctttggagcacacgttgacacgtgttccccccgggaagcgtcacatcacccaccccaaaagccagtcataccaaagccaagccaagccaagtcgagccgagccaaaagccgtttgccaaagaaaagacgctcgcagccagaaagccaaaaaagctgacttgctacaacgccctttttggccctttgagacccgctccgatgtctgtgtttacatccagtttgcatgctccacatccaatatttgtgcaacttgccctttgacctcccattctgccccctgtgcagcaggagcaagtttttcgcttctcgttcggggagatgtcttcatttgggttttgtttcgtttcatttcgtttcccttactttttcgcttgccaacagcatttgtcttttgacatttgctacttgcactctcgccgacttcattttagccggggccaaaagatgtcggcgattgattcaatttgttgccactctgtttacaaagcgttacaaaatatttcaacctttatgtactattctcttcctcttggcatatccttgcagagcggcgcaaacaagtcaacggccaggatcggagacggacccattttgacactggagaagctggagcgacagcaggcgggagtctaccagtgcaccgccgacaacggagtgggtgacccggtcacagtggatatgcgactggatgtgttgtgtaagtgcaaattgataaactctacagaatatctaatgataaaaaagaaattctagcataaatgagtaaactttttagccaggaaagtatctattttgggtatatgtatctgcaactactaactatctgtgccgcaaagtctgtcattaatcattgcgtgaataaagcagtaacttgaaaaccatttgcggtatatcagaacttttgaattgcaactgcagatgtaaaggggagaaaaaaaaaccttgtaaccggaggcgaagaaaagtgttttgggcaaaagagtatcgcgggactcgtaactcagtgccttaaagctgctgactgcagcgggaaaccaaatccggatcacagtcgagaaaccgctgttcagatacacgactcccagataccagatactggatgcatgcaacaatgcggcaccaccgattctttatagacaaatgccgggcagaaaacaatttgaacgggaaaagaaagccgagaccaaacggaatcttagcaactgtatataaattgatttttgactgtaatcagattgctgcttcgtgtgctaaattctttccaccgcctctctctctttctttcattctttctttgtgtgtccttgccggccatcctggcatcgtgcaatcctgctattctgccatcctgcaacctgacggatgcctgggtatctgggtgcagatcccccggatatacaagtggagaaatcctggatacactcgggcgaaggattcgaggcgaagctcgtttgcattgttttcgctgatccagtcgcaacggtttgttggctctttgaatgcaccgtttcattcgtaccattgtgcccatgcagtttttgttatttttcgtggatttttagattattacgattacggggccatggacagaaaatgggaatgtggggcaggcaggatagcaagcatgcagtgctcccagcgagcgagtcatcctgcctcctccattgccattggtttatgcaagaactttgttttccaggtcacttttcctgtttttcagttgttttttttttcatttttttcagtcattcagcttttcgtttcagttgagtcctgttctgttgtgttgtgtcctgttcttgttctcacaggctttgtgccacactggcttgcaatttctttttccgatttcttgctgtggcaaattaatgccatttttatttgcccaactttcgtttcatttcgtttcgaattgaggacagtcggctgaagttactgcaagtgggtcaaaatttgagttgaatttattagttgcttatcgtagttgcagtccatcgacatgtgcttcatcttcatcttcatctccatctccatcatcgtgatcatcgtcagctagctaatccaagacacttctcgctgcaggtgtcctggtaccaaaactcatttccgatccaatcgacggacaggcgcatcatggccaccagagccaaccggcacatgctcaccatccgccacatccagcaggaggactttggcaactacaggtgagtcctattacgagtggtagttcaatggaatcctcgaatcgatgaggacaacttgtggcttactatgaactttgccggccagcgttgatttagtcaatttggcaactttgactacaacttatttcacttcttgtcagccagttagcagtagcaagttgtaagttcccacttgtctgggatcgaggcttagtccgccgctgttggcgtatttgccacactcgaacattcgtgttgccacgtccggcttctggggaatagtctgtgcggggcgtgcaccacccattttgcggacaaacaagttttccacatcaatgtcaatctgtctgaaacatattaaagaagcggaagtttcgccatgttgacacaacacattttatgcacaaagttttagccatcttccgaatggggacgatgtgggtgttggtgatgttcatgctgatggtgatggtgctagtggtgctagcccatcgaaccaccatgccaccatgccaccatgccaccgaaccacctgtccaccacccacagtgagtggcttttgtgcacacgacgtgtcgacgtgtttggattagttgagtcgagttccccagtcggttgccagccacttgccgactgccagatcgatgcgggcagtggcccacggggcggatggttgttctcccacatgccgccccacatagcgtatgagtaatgctgacagagtgtaatgcaaaattaaaaggaaattacatttttggccgtgtgcaaaagtgattgcaggcaaacatgacgcatacagaaattaacaagtcaaacacacacataaacaacaggaaaaaatgagtgagcgcagaaaattcgaaaaccaaaagccaattaagtcaattaaccacttaagccatatgctaattagaaatccctttcagctgcgtggcggacaattcgctgggacggtcccgcaaatacatggagctctccggacgccccggagccgccgagttctattcgcccaagtggggtcgttcgccggacagctacaatctgacctggaaaatcgatagctacccgccgctggaggaggtccgcctactttatcgtcgagtgcaggtgagtggaaggggtggcaggaggggctggataatgggtgggaagccactggcaatccgatatgaaaggagtatattcaattaattaatggtgaaacatgcacaaaacccaatcccgccagactgacatcttgacaatctgctgcgagatgctccacgctccacgctccaagcaatccgataccttgacatcttgtctggaaacggtgttttatttttggcgagcactgtgctcactaatgaagcacgtgattaaaattatactcacagtgatgtcttgagaatcgacatccaaaacgctgataaaaggaaatgaagctcatgtaagaactgcaaggaaattaataaaaatccagttggaaaattatgagagtacagaaagaaatataaatatattgctaattggactttagtggtgcagaaaatgcaatcaaaagaaataatattattcagaaaatgtatagtatgaaaaggttatttgaaatacaaacttttgtgaactgtagtcggcaatctaaaagatcagttgcatatatcaagtaaaattcttttcaatgtatcaaaggtacataaaaaaaaaagaaaagtgatttttaatactcatatcagtgtacccacacaaaaatatcgcttaattgcgactctggtctgtacaaacaggcaaattgagcgagttgggcctcgaatttaatgagatttcaacccacggacacttggcgctgaatgtcgaactgcaatgggctgccacgctccgttgattgggcggagataattttttctctgcattcatgcgccattgaagtgcaattattggaggactttctgtcggggcggcatatcaagtggcaggaaggagacggtgtggtgaagtggaggaggcttaattgatgtgatagctgtcataacttgatcgggcgctcgcagcggaaatcatttggtttcctcgcgcaggacataaaattaattaaggaatcaaaggaaaactgtcaatggtagaatccggcacttaatttggctctttctctctatctctgccatgtttttccgccgtacagatgaatgagacttaccagcagccgggcaggtggcacgacttcatcctcaccccggagcaccgaccagcctcggagccacttacacacatcatgtcctacaccataaagaatctgcatccgggcggttactacgaggcgattgtgcaggccaagaatcgctacggctggaatgaggtgagttctccccccctttatagctcaatgccaaaagcaccgccataaatctaggctagtgtcctgctcagctcggtgcgacagggcggctacttaatcttgatattgtgccacttttctttgctcaaacccaacgtctgcttttctcgcctctcgccctcaaccccgcaggttagcgatatatttcaatttgtcgtcgccaccaacagccaggacattggccccgaagacgccgaggtggtggccagctccaagtcgcgcagcaatagtgcctccataggcagcctgccgggatccacagttcttcacacggcgcttctgttggccctggccttgagtaattgtcagttcgacagacgccgccttggcctgggataagcagttgatgcggcagacgatcgggatcaggatcaaaatcaggagcagcacaagacaaggggaaacactcgcacttggagtaggaagttgacggggaagggcggtagcataaagtgtatagaactccagaagaagaagtatagaagattttattgtacacctaacctgtcaaaaccgagaaagcaagtgaatccagcccaaaactaagcaacaaagatgaatggagattgcaaaccaaaaagctgaacgaataacccatgtaaataatttttcaagagttttgtccacgattaaattagcacacacccactcacacatacagccggaaaatcgttaatggaaattgcaattggagactgcaaatccgaattcaaatccaccatccaccatcccacccccgttccattcccatggtagaataagcaagtcgaactaggtcatgtaaataagcattagatatctgaatgtgaactgcattttacttcataaatgttgggctgatgcggcccgatgtgcaggatgcgcaggatgtgtatgtaaattaagcaaatattatatagtgatattatttagtttcgagcgaaaccataaataacaaaatattgaagatgaaataaagcagaggggggaaagagaacacacacgcggcaaaaatgttagtatgtaaagtatttgccacatttccgtttcatattcgagtttatttcatttctattgccactttttcgattgcagttgtagtcttattttagccagtaagcgcacccataaccaaaaaaggataacaaacgtaacagcaattcaatgtaatgtttttcgatgtaaattagaatttaagcaaacgtgttgtaccaccaaaaagaatggcgaaaggtcgaaacatagctacgcaaataagctaataccccactcaaaatcagaatcgaaagcgaaatcggtatattattcagagtatttgaatgtgaatctttgcatacatattagcggcacgtggatgtcacgcgtgtcaatctgtaaatatacataataaatacgtgaataatattgagtgttacgaacccagcaggcattttatcagcttttgcacctttccaattgtacgatccgaatccgtactgtttcatttagggcacacaatagaggtcaagggtcacttgtatatttgataggccgcggcctacaactcgaactcgtacacaactccctgtacttagcatgtcgatcgaacgaggccaaaaccgaaaacgaattcaaaaaaatgggaagtgtcgagtcgaattgaaaaccaagtaaaagcgttacaatttatctacataaatgtgtatgtgtgtgtgtaccttacatagccagttgaatgcaggacgaatcggag

SEQ ID NO: 14513 - DNA, 2010 bp, DROSOPHILA
atgaatataatttcgcgcagcatacgtacaggcgccttggccccgcccatcactgcccacgcctccgccaacgccaacgccagcgggctcaggaaaagcagccagcgacgcaaccgtgctccgcttcaaatgaattgccccattctgattgtaattagcctcggatggctgctgcacgcgcacgccggaagcggcgggttcgccgtcgaggccgccatttcaaatcgaggcagcaacagccgctcgatgagcaacgtgcaacagtcggcggtggccgcctccacgctgaccgccaccctgccccgtttcctctccagaggacacacctaccgcgccgtcgtcggggacacgctggtcctgccctgccaggtggagaatctgggcaatttcgtccttctgtggcgacggggaacaaatgtgctcactgcctccaacattatggttacaagggatgagcgcgtaagactgatagatggttataatttagagatatccgatttggagcctcaagacgccggggattatgtttgtcaaatcagtgacaaaataaatcgtgatcaagtgcacacagttgagatattggttccgcccagtgtacgggccatcccaacatccggacaactgcaggcccgcaaaggaggacccattacgttggagtgcaagggatctggtaatccggtgccatccatttactggaccaagaagagcggcgcaaacaagtcaacggccaggatcggagacggacccattttgacactggagaagctggagcgacagcaggcgggagtctaccagtgcaccgccgacaacggagtgggtgacccggtcacagtggatatgcgactggatgtgttgtatcccccggatatacaagtggagaaatcctggatacactcgggcgaaggattcgaggcgaagctcgtttgcattgttttcgctgatccagtcgcaacggtgtcctggtaccaaaactcatttccgatccaatcgacggacaggcgcatcatggccaccagagccaaccggcacatgctcaccatccgccacatccagcaggaggactttggcaactacagctgcgtggcggacaattcgctgggacggtcccgcaaatacatggagctctccggacgccccggagccgccgagttctattcgcccaagtggggtcgttcgccggacagctacaatctgacctggaaaatcgatagctacccgccgctggaggaggtccgcctactttatcgtcgagtgcagatgaatgagacttaccagcagccgggcaggtggcacgacttcatcctcaccccggagcaccgaccagcctcggagccacttacacacatcatgtcctacaccataaagaatctgcatccgggcggttactacgaggcgattgtgcaggccaagaatcgctacggctggaatgaggttagcgatatatttcaatttgtcgtcgccaccaacagccaggacattggccccgaagacgccgaggtggtggccagctccaagtcgcgcagcaatagtgcctccataggcagcctgccgggatccacagttcttcacacggcgcttctgttggccctggccttgagtaattgtcagttcgacagacgccgccttggcctgggataagcagttgatgcggcagacgatcgggatcaggatcaaaatcaggagcagcacaagacaaggggaaacactcgcacttggagtaggaagttgacggggaagggcggtagcataaagtgtatagaactccagaagaagaagtatagaagattttattgtacacctaacctgtcaaaaccgagaaagcaagtgaatccagcccaaaactaagcaacaaagatgaatggagattgcaaaccaaaaagctgaacgaataacccatgtaaataatttttcaagagttttgtccacgattaaattagcacacacccactcacacatacagccggaaaatcgttaatggaaattgcaattggagactgcaaatccgaattc

SEQ ID NO: 14514 - protein, 545 aa, DROSOPHILA
MNIISRSIRTGALAPPITAHASANANASGLRKSSQRRNRAPLQMNCPILIVISLGWLLHAHAGSGGFAVEAAISNRGSNSRSMSNVQQSAVAASTLTATLPRFLSRGHTYRAVVGDTLVLPCQVENLGNFVLLWRRGTNVLTASNIMVTRDERVRLIDGYNLEISDLEPQDAGDYVCQISDKINRDQVHTVEILVPPSVRAIPTSGQLQARKGGPITLECKGSGNPVPSIYWTKKSGANKSTARIGDGPILTLEKLERQQAGVYQCTADNGVGDPVTVDMRLDVLYPPDIQVEKSWIHSGEGFEAKLVCIVFADPVATVSWYQNSFPIQSTDRRIMATRANRHMLTIRHIQQEDFGNYSCVADNSLGRSRKYMELSGRPGAAEFYSPKWGRSPDSYNLTWKIDSYPPLEEVRLLYRRVQMNETYQQPGRWHDFILTPEHRPASEPLTHIMSYTIKNLHPGGYYEAIVQAKNRYGWNEVSDIFQFVVATNSQDIGPEDAEVVASSKSRSNSASIGSLPGSTVLHTALLLALALSNCQFDRRRLGLG

SEQ ID NO: 14515 - DNA, 7962 bp, DROSOPHILA
tatgttgtgttctatattcgaaatctgataatttaacttatactatctgggtaggagatcgtaaattggattaacgaaaagatcaacaataacaggaagtgatttatcacatttttatattttcaaaaatttggcaacctattaactaatatattaaatatatatttaatgtaatttagcaacaatagtttgttacacttgtattatagaaattatttgcctcaaataatgattcatttagtttgctgatcggcaaacactcttttaattaatacattaatacagccatttgctaatcaatgatttttgacattgacctctgtcaataattgaaaaactcgtggctgagtagcaacattgtgaggacaaagcccttttgcattatcagttattagttgttgttgcttttggggctataaaagggttagttatagaattgactggcacagtttaacagcgatcgttgaaatgaactcaactctggtgattctacttctttcggctctggctttggtgcaggccaggaatattcgttggtctgaggaggacaactcgtcccaaggtccaagtctaagccacccgcatccgcactctgtcaactggccctgtgatgtgggtcacttcccagaggcattcattctaatgcacaaggtggataagcgactggaacgaattgacaacgagagtaccaagaaacggatcgagaactacgccgtcaatcagttgaggcagtgcatcttggatggccagatggacgtgcactgcgttaggcgttcgattggatacaccatgtcattcattcaccaccaaatgagccaggcgaatggaatgtaagctcacgacttggtgatcagttgatataatttaaggacattcctttagccaccttttttttgcaaaatgcattttaataatcaaatcctttcaaacgaactaattagtaacaaattatcaaaataaattaagtttaaataataattaatttaaattcagctttgtcttatgggtttggattcccattcgtttcgcgcgaagcttgaggagcaagcttgtggcacttttcctgctcggccagctggcgctccttttccattttggcgaacttgctgcccatatagagctgctccttgaatcgattctttcgccgctcatccatactgtatcgtcgtagcatatcccgtctgtccacaatcgacatgcagatgtcctggcaatcccgcgacggctggcagaagctccacgaaccgaaaatggtgtccacacagccgcaggtgcgacaatagccaacaaagtgaccgatcagattggaattcgccttgcggaaggatagagaaagtggcccgcccaggatcatcatagcttgtcccgagaaataccaatcggtgagattatccaggagatcgtgggccctcggcggcactgtctcctgcacactaatatttagcttaatgccatggtaattgggagttttcaagtcggccgcatccttcaactgcgtcctgttcatcttgacgcactgtcgtctcgtcctgcgataggtacgacctttgtgttggctacaggtcggcttttccgcttcttcgccatctgaatttgttggcggggtcttgatatttatgcgaatgccaaggacttgagattcccaggatccgtttagatcgcagggcgcacctgaagttttaaactttatatacatacatgaatcttagctctaccacctattcttaccatcagctggatccacgaagcagcagggcagctttctctcctcctcctcttccgacgattgattgcttgacttgcttgcctgaatgctctccaatcgttccaggatcttgtctagaaccggcgaaatccccagctggtcctctggctgttgatgcggcgtctgtgatggtggacttgggacttggcacatgatctctgatccctttcggaaactacttccgatctgacttgcttttacacgatattcataatttcaaatagatttacagcgatatactcactgacttacctgatggtatgcgattgggtgcatatctcaatccaccatcggctgcattttgaccggttcccacaatcctttgagccacctccaaaggtgatagattcatttgagtggccatggtgtcaatgacattactaccgcccagctgtgatggctgattgactagcacttcgggaaacggtgcttgcaaaacgtggccagaaacaggattattcatgaatatgttccttttcatgggtatcctggctggatttttgcccctctccaaaacctccttccaccaactttgctttgttttcaacgcctgattgaggttttcgatttgcttctgatactcatccaccaagttaaagaatgaagattgcttgatggccttcaagccacctattatctgtttgggatcgagtcctgagaaaaccgattgtatttttggaacactctccatcactttagtttcgattttcgtattaagtttagagctagttactttatcgggcttcttttcggggactacattctcttcaatggtcttgctagatggcttatagtgcggcttactctctgattctttcttaggtgattcattgagaccaggctttatcaatggaatgtcattccaaaccagctgacgatttttggagtttggtagataatagggcttaagaccgccgttctgattactttccttgttcattttgataaatgtgttcagagccttcaaatagttattgccttggctcggattttcattcgaaaagcagcttttagttggggtcttactctgtggttccttacattttggcgttgtcgcttttggtttatcacacttattgctcgtaattggtttttcaatgggaacacacatcttggttgtggccttagtttctggttcgtcacactcaacagtagtcgctttttgtttatcacactgacttggaaggatgtcctcactgttcatccggcgacccgactcgctatccgaaggataatccgtttcactaatgatatgggattctctgggaaatttatgatcactgaataactgaacgaagcccttcttatactcatcgtaaagtccaccagccttaatgcttgatctcctggagttgatgtcatctaacaatcttttgaatgcattggtagcacttccgggctccatattttcaaagatcccggatatattatttttctttatagctctcaatgaggctctgctatctgttactagtagagcatcctgcttgatttgattctgcaaatttggttccatttcttcgtttattttatcggccaattccttgactaaatcgcttttctgaagcctctcaatcacatccattaaatctgttaatgcacttattttcacagaccccgacgagcttaagggtttcggcggcgcagacttggaggtcaaacttggtgttggtttttgccagactttcaaaatttcgttgtatatgcgattgagatcggaaattcgacgttctccaggatccttgatcgtttcgggtttttttactcgtagcatattttcggggacatccagttttagcaaaatcatacttcccaccagtgggcttttatcttctacttgtcctttagcttcgaccattgccttagcactttgattttctctatttcgatatggaagacgagctagacagttacccgattccaaaggccgatcatcggtggcatcgaatttgatattgagaaattctgtagaatctttctccttagccattagcttttctttcttttttgtctttttgggtaacgaagtgagatccctttgtggtggtactcgatcttttgattccatctttgcctcgacctcgaccttggcatcttcggatccctcaacttttattcgctgccgataggcatcatatagtctattgtaatgtttcgggaccaagtcgtcctgcgttctcaaccaagacgaggcttccttatgcgacatactgagttcctgatcctttgcctcagtgcaactgattggaatcggacgggttatagccagtatgcaaaaaatatgaaacagatgtctggacatctcatgtttctgttgcaaatctgtaatatatcataaacactattttttacttggtataattgtacaaaatatgtgacgttatttcaaaaagtgtatagatgactttccgccatctgtgctcagtaatcaaggtcttattacacaattttcatatttattgccacagaaattttgatcataaaacaaaggtttcagcttgtcctacaccaccttgttgccatcactgttgaagtgcccaaaggaggattcatcctgggagaccatatcactttgtgctatgccctgctcctgatcatttatttgcatatatggataaaagatattcctgtgtgtcttgtaggactctttaatcacctggggcgatgtccatcgcagcagggagtggggagtgcccaacttatcactggtgccggtcatgtgtcccgcaccaaaaggctgctgacccaccatcaatccggtggacttgtcattcacatttaagttgcccacattgactctgaaggcatcgtatgcttcctcgatgaagttctgatcctgggcaaacaccgaacctgtcaatccatgattaatctgggccaccttttccatagtctccttgagcttatggtctggatagacatagacaccgagaatgggtgccagtagctcttcccgacatatgatattgtccagatccttgaccagtaccaccgttggatctacgtaatagccacgtcgcttgtcgcagcttcctccaacgaggatctggcaactgggactctggtcgatgtaccttagccacatgtagatgcgatcgtaggcccgtcggttgatcaccgccgagcaaaaactatcgcaatacgtggcatcttgtcgcacgaccagagatgcagtgatctcaagaagaggttctcgtatgtgattctgccacagggattccggaacgtacaacatcgaacaggaggagcacttctggccggcgtactcaaaggcagctcttatcgtgcaggccaccgccgtttccggttccgccgaggagtgtacgaagtggaaattcttgccgcctccctcgcccaccaaacggggatagttctgatagaaatttatattctgggccaccagttgccagagcaccttgagcaccgttgaggtaccagtgaagttaatccccgccaatttcggatgttgcgtcactacggatgcaaacgttgtctcctcggcgggcacaaagttcaccacaccatcgggcactccagcctcccgcagggccttgaaaacgaaatagttggacaggatggccgagtcagagggcttccagatcaccgagttgcccattaaggcaggcgtataggccagattggcggcgatacccgtaaagttaaacggactgatggcagccacaaatcctgcaaataaaaagttatagaaagatagaaagccatataaattatatggagacccacccgaaagtcctctcaaccgcatggagttcctgcaattgttttggatgtctctaatgggttcgtagttggccagctcacgcaggaagacgggattaatgcgcataaagtccaccagctcggctacatccatctccgcctggcgcagcgtttttccctggcccaacatcgtggccgcaatgatgttgtagcggtatcttccggcaattagcatcgctgcccgctcccaaatatcaattcgatcactaagcctgaccttgtcccacttcacctgcgcctccacactcttatcgatggccatttggatgagcacgcggtgggcatgaccgtaatgggcaatgggctgttggatgtcgtagggcagaacctgttggaagtcctccttggcctggaactcctggccgttaataacgatgggaacgtgctctaccctattgagaacgcccagcagggcggtttccagttccgtgcgttcctttgagccctcgtcatactgaagcagcttctcgttggccaccatctcatccagcgtaaagtgctcggatagctcgggtctcttgctggtacttctaacagacacgaggcttaaataagattgaatgttagaaaatatgtgttcgaaaaataatttcaaattacgcgcaattatcgacttatcgctactgctatcgatgtaataacagtatgtcgattatcgattgcagaacagctgttgattcgataagagagcaaaagtaataacaaaacccatgaaagccaattgttattattttgtgatgcaatagtttcaatatttggatacaaaatgcagcttacccgccttttactgaagcctcgagcctcggaagtattgaccgcatatttgaaacaatgccatgagccaccttggacatcatatttcgtgaaggtaagactcccctttttccgccccaatattttcaccagatctaatgagaaatatgctccaagtctagtttcacgatgtggccaacgatcagaggggaatgtctcactttaattggaccctggaaaacggaaccaactatcacattcttcgcaccgcctgttatccctatatgaagtaccactgtagcaagagggaggtgcaggatctttggctggaggacaagttctttcgcttccttaaggtgattaatttgggtaagtccagtaaacggattatgctacataggtccgtggtaactcgaaaaaggtgtatgccctgtaatgaatcccgaaatgcatatgggaaagtcctcattcgagtttaatcaaactcccaaaagaccgcatttatatccttaaattctacacaggcttaccaatgctcttctatggactggctgccatccgtctaattagtcacaccgagatcgttcatgtcagcgagacggtaaaagttcccatatactttctatatcctgaggacaagggctcaagcttttgatttgatttcctgaactccaaaatgtgaaatgtgaagaaaagccttcttatctaaatatatgcatattcagttaatgtaattagaagagaacactggaaatatctcatccatatatgtatgtatttgtctttttgagataactacaccttgcattacttagtttgtctacttgacttagttttattttaaagctattaattgaaaccaattatttaaaattatccaaaatcacatctgactatttcttagcaatggccagacacttaaacaacaacccagaacgacacacactttcaacaaagtctggaaggcatcttatgttttgcaatcggtcggatgattttcacaagtctcatcatagttatctagaagcagggcctttacagaggcctcaaactgggtcagtgagcacggtgcatcgcaattgggaatggtcagctccttggggaatttgtcttcgctgttgtagtagtaaaccaactgcaaccaaacaacccaaactggtaagaatcccatagttaatagtaatacgctaccaataccaaccttcacttcaaagtctccatcactgaaagacttgctgtgatgaagctcgaaggccaatgccgatgcatattccggaagcttggtagtctggtccagtatgcccagggaattcatcacgttaaccaaagtcacatcatgaccggagtacaggaatattttgcgatcgggattgagattcctcttgcgcttattctgcattttgttgagtatatccgtaaggaaagcgccacccttaatccgcttcattagatttgtttcggtgaatagcatatagctacgttcagctagtggcctaatctcctcggggtatatattctcagtccaatcgggcagcaccagattagcttcctcttcggttttgagtgtgccatagagtagctccacgtccagtacatttgaaatgttctaaaggataatatgataatatcagaagtgaaaaagtgaaatatatcgtatggcaata

SEQ ID NO: 14516 - DNA, 5233 bp, DROSOPHILA
gaaatcaaatcaaaagcttgagcccttgtcctcaggatatagaaagtatatgggaacttttaccgtctcgctgacatgaacgatctcggtgtgactaattagacggatggcagccagtccatagaagagcattgggcatacacctttttcgagttaccacggacctatgtagcataatccgtttactggacttacccaaattaatcaccttaaggaagcgaaagaacttgtcctccagccaaagatcctgcacctccctcttgctacagtggtacttcatatagggataacaggcggtgcgaagaatgtgatagttggttccgttttccagggtccaattaaagtgagacattcccctctgatcgttggccacatcgtgaaactagacttggagcatatttctcattagatctggtgaaaatattggggcggaaaaaggggagtcttaccttcacgaaatatgatgtccaaggtggctcatggcattgtttcaaatatgcggtcaatacttccgaggctcgaggcttcagtaaaaggcggaagtaccagcaagagacccgagctatccgagcactttacgctggatgagatggtggccaacgagaagctgcttcagtatgacgagggctcaaaggaacgcacggaactggaaaccgccctgctgggcgttctcaatagggtagagcacgttcccatcgttattaacggccaggagttccaggccaaggaggacttccaacaggttctgccctacgacatccaacagcccattgcccattacggtcatgcccaccgcgtgctcatccaaatggccatcgataagagtgtggaggcgcaggtgaagtgggacaaggtcaggcttagtgatcgaattgatatttgggagcgggcagcgatgctaattgccggaagataccgctacaacatcattgcggccacgatgttgggccagggaaaaacgctgcgccaggcggagatggatgtagccgagctggtggactttatgcgcattaatcccgtcttcctgcgtgagctggccaactacgaacccattagagacatccaaaacaattgcaggaactccatgcggttgagaggactttcgggtgggtctccatataatttatatggctttctatctttctataactttttatttgcaggatttgtggctgccatcagtccgtttaactttacgggtatcgccgccaatctggcctatacgcctgccttaatgggcaactcggtgatctggaagccctctgactcggccatcctgtccaactatttcgttttcaaggccctgcgggaggctggagtgcccgatggtgtggtgaactttgtgcccgccgaggagacaacgtttgcatccgtagtgacgcaacatccgaaattggcggggattaacttcactggtacctcaacggtgctcaaggtgctctggcaactggtggcccagaatataaatttctatcagaactatccccgtttggtgggcgagggaggcggcaagaatttccacttcgtacactcctcggcggaaccggaaacggcggtggcctgcacgataagagctgcctttgagtacgccggccagaagtgctcctcctgttcgatgttgtacgttccggaatccctgtggcagaatcacatacgagaacctcttcttgagatcactgcatctctggtcgtgcgacaagatgccacgtattgcgatagtttttgctcggcggtgatcaaccgacgggcctacgatcgcatctacatgtggctaaggtacatcgaccagagtcccagttgccagatcctcgttggaggaagctgcgacaagcgacgtggctattacgtagatccaacggtggtactggtcaaggatctggacaatatcatatgtcgggaagagctactggcacccattctcggtgtctatgtctatccagaccataagctcaaggagactatggaaaaggtggcccagattaatcatggattgacaggttcggtgtttgcccaggatcagaacttcatcgaggaagcatacgatgccttcagagtcaatgtgggcaacttaaatgtgaatgacaagtccaccggattgatggtgggtcagcagccttttggtgcgggacacatgaccggcaccagtgataagttgggcactccccactccctgctgcgatggacatcgccccaggtgattaaagagtcctacaagacacacaggaatatcttttatccatatatgcaaataaatgatcaggagcagggcatagcacaaagtgatatggtctcccaggatgaatcctcctttgggcacttcaacagtgatggcaacaaggtggtttgcactgaggcaaaggatcaggaactcagtatgtcgcataaggaagcctcgtcttggttgagaacgcaggacgacttggtcccgaaacattacaatagactatatgatgcctatcggcagcgaataaaagttgagggatccgaagatgccaaggtcgaggtcgaggcaaagatggaatcaaaagatcgagtaccaccacaaagggatctcacttcgttacccaaaaagacaaaaaagaaagaaaagctaatggctaaggagaaagattctacagaatttctcaatatcaaattcgatgccaccgatgatcggcctttggaatcgggtaactgtctagctcgtcttccatatcgaaatagagaaaatcaaagtgctaaggcaatggtcgaagctaaaggacaagtagaagataaaagcccactggtgggaagtatgattttgctaaaactggatgtccccgaaaatatgctacgagtaaaaaaacccgaaacgatcaaggatcctggagaacgtcgaatttccgatctcaatcgcatatacaacgaaattttgaaagtctggcaaaaaccaacaccaagtttgacctccaagtctgcgccgccgaaacccttaagctcgtcggggtctgtgaaaataagtgcattaacagatttaatggatgtgattgagaggcttcagaaaagcgatttagtcaaggaattggccgataaaataaacgaagaaatggaaccaaatttgcagaatcaaatcaagcaggatgctctactagtaacagatagcagagcctcattgagagctataaagaaaaataatatatccgggatctttgaaaatatggagcccggaagtgctaccaatgcattcaaaagattgttagatgacatcaactccaggagatcaagcattaaggctggtggactttacgatgagtataagaagggcttcgttcagttattcagtgatcataaatttcccagagaatcccatatcattagtgaaacggattatccttcggatagcgagtcgggtcgccggatgaacagtgaggacatccttccaagtcagtgtgataaacaaaaagcgactactgttgagtgtgacgaaccagaaactaaggccacaaccaagatgtgtgttcccattgaaaaaccaattacgagcaataagtgtgataaaccaaaagcgacaacgccaaaatgtaaggaaccacagagtaagaccccaactaaaagctgcttttcgaatgaaaatccgagccaaggcaataactatttgaaggctctgaacacatttatcaaaatgaacaaggaaagtaatcagaacggcggtcttaagccctattatctaccaaactccaaaaatcgtcagctggtttggaatgacattccattgataaagcctggtctcaatgaatcacctaagaaagaatcagagagtaagccgcactataagccatctagcaagaccattgaagagaatgtagtccccgaaaagaagcccgataaagtaactagctctaaacttaatacgaaaatcgaaactaaagtgatggagagtgttccaaaaatacaatcggttttctcaggactcgatcccaaacagataataggtggcttgaaggccatcaagcaatcttcattctttaacttggtggatgagtatcagaagcaaatcgaaaacctcaatcaggcgttgaaaacaaagcaaagttggtggaaggaggttttggagaggggcaaaaatccagccaggatacccatgaaaaggaacatattcatgaataatcctgtttctggccacgttttgcaagcaccgtttcccgaagtgctagtcaatcagccatcacagctgggcggtagtaatgtcattgacaccatggccactcaaatgaatctatcacctttggaggtggctcaaaggattgtgggaaccggtcaaaatgcagccgatggtggattgagatatgcacccaatcgcataccatcagcaagtcagatcggaagtagtttccgaaagggatcagagatcatgtgccaagtcccaagtccaccatcacagacgccgcatcaacagccagaggaccagctggggatttcgccggttctagacaagatcctggaacgattggagagcattcaggcaagcaagtcaagcaatcaatcgtcggaagaggaggaggagagaaagctgccctgctgcttcgtggatccagctgatggtgcgccctgcgatctaaacggatcctgggaatctcaagtccttggcattcgcataaatatcaagaccccgccaacaaattcagatggcgaagaagcggaaaagccgacctgtagccaacacaaaggtcgtacctatcgcaggacgagacgacagtgcgtcaagatgaacaggacgcagttgaaggatgcggccgacttgaaaactcccaattaccatggcattaagctaaatattagtgtgcaggagacagtgccgccgagggcccacgatctcctggataatctcaccgattggtatttctcgggacaagctatgatgatcctgggcgggccactttctctatccttccgcaaggcgaattccaatctgatcggtcactttgttggctattgtcgcacctgcggctgtgtggacaccattttcggttcgtggagcttctgccagccgtcgcgggattgccaggacatctgcatgtcgattgtggacagacgggatatgctacgacgatacagtatggatgagcggcgaaagaatcgattcaaggagcagctctatatgggcagcaagttcgccaaaatggaaaaggagcgccagctggccgagcaggaaaagtgccacaagcttgctcctcaagcttcgcgcgaaacgaatgggaatccaaacccataa

SEQ ID NO: 14517 - protein, 1590 aa, DROSOPHILA
MMSKVAHGIVSNMRSILPRLEASVKGGSTSKRPELSEHFTLDEMVANEKLLQYDEGSKERTELETALLGVLNRVEHVPIVINGQEFQAKEDFQQVLPYDIQQPIAHYGHAHRVLIQMAIDKSVEAQVKWDKVRLSDRIDIWERAAMLIAGRYRYNIIAATMLGQGKTLRQAEMDVAELVDFMRINPVFLRELANYEPIRDIQNNCRNSMRLRGLSGGSPYNLYGFLSFYNFLFAGFVAAISPFNFTGIAANLAYTPALMGNSVIWKPSDSAILSNYFVFKALREAGVPDGVVNFVPAEETTFASVVTQHPKLAGINFTGTSTVLKVLWQLVAQNINFYQNYPRLVGEGGGKNFHFVHSSAEPETAVACTIRAAFEYAGQKCSSCSMLYVPESLWQNHIREPLLEITASLVVRQDATYCDSFCSAVINRRAYDRIYMWLRYIDQSPSCQILVGGSCDKRRGYYVDPTVVLVKDLDNIICREELLAPILGVYVYPDHKLKETMEKVAQINHGLTGSVFAQDQNFIEEAYDAFRVNVGNLNVNDKSTGLMVGQQPFGAGHMTGTSDKLGTPHSLLRWTSPQVIKESYKTHRNIFYPYMQINDQEQGIAQSDMVSQDESSFGHFNSDGNKVVCTEAKDQELSMSHKEASSWLRTQDDLVPKHYNRLYDAYRQRIKVEGSEDAKVEVEAKMESKDRVPPQRDLTSLPKKTKKKEKLMAKEKDSTEFLNIKFDATDDRPLESGNCLARLPYRNRENQSAKAMVEAKGQVEDKSPLVGSMILLKLDVPENMLRVKKPETIKDPGERRISDLNRIYNEILKVWQKPTPSLTSKSAPPKPLSSSGSVKISALTDLMDVIERLQKSDLVKELADKINEEMEPNLQNQIKQDALLVTDSRASLRAIKKNNISGIFENMEPGSATNAFKRLLDDINSRRSSIKAGGLYDEYKKGFVQLFSDHKFPRESHIISETDYPSDSESGRRMNSEDILPSQCDKQKATTVECDEPETKATTKMCVPIEKPITSNKCDKPKATTPKCKEPQSKTPTKSCFSNENPSQGNNYLKALNTFIKMNKESNQNGGLKPYYLPNSKNRQLVWNDIPLIKPGLNESPKKESESKPHYKPSSKTIEENVVPEKKPDKVTSSKLNTKIETKVMESVPKIQSVFSGLDPKQIIGGLKAIKQSSFFNLVDEYQKQIENLNQALKTKQSWWKEVLERGKNPARIPMKRNIFMNNPVSGHVLQAPFPEVLVNQPSQLGGSNVIDTMATQMNLSPLEVAQRIVGTGQNAADGGLRYAPNRIPSASQIGSSFRKGSEIMCQVPSPPSQTPHQQPEDQLGISPVLDKILERLESIQASKSSNQSSEEEEERKLPCCFVDPADGAPCDLNGSWESQVLGIRINIKTPPTNSDGEEAEKPTCSQHKGRTYRRTRRQCVKMNRTQLKDAADLKTPNYHGIKLNISVQETVPPRAHDLLDNLTDWYFSGQAMMILGGPLSLSFRKANSNLIGHFVGYCRTCGCVDTIFGSWSFCQPSRDCQDICMSIVDRRDMLRRYSMDERRKNRFKEQLYMGSKFAKMEKERQLAEQEKCHKLAPQASRETNGNPNP

SEQ ID NO: 14518 - DNA, 2805 bp, DROSOPHILA
ggcgcctgcttacccaacaaaataattgctgcgacgatactaacagaggctaatatggtgaaaatgaaagccaagcccgtttgcagggacattctaacggggtagtacgaaatcaggaaactataagcattaaactataaatgaaatttgaaaataataattaaaactacttgtcaaagggtttaattttagtttccagcagcgaattaaatgttttttctccctatttggattgctatcacaataaagaacagctgtcctctgggtgtggccgttattcaacactgaatgaaaccagggatacaatttcttgtgctctttttgtggtaataagtgggatatttgcaaaaattaacaaaagcacaaataaaaatattgcaatcaaatatatttatattcttctggcaatctaaaacttctgcttttctagttttaacatttatttaaaagaccctggcacaagtgactttagttgccaccaaaaaccacatggggttagaagttccactaagctgtctgaaaggcctttcaatagaagctgttcgatgaatcgtcctttgagacaggcacactatacacatggtcacgcctttgggttagttttattcaatatccacctggctgtttaatttatttatattcgcgaatgagcacacttcttccacactaagtttatacaccggcaccagtctgaccagagtttgcgtgggccgaaattccaagatatcttagtttgcagagaataccaatcatactgctactatattgaaatagaatgggataaattcaaatctgttaatttacgtttaaaaagtattttaaccctatgatgtcagttaactcacatagtatagactaatccatagaaaaggaaatggtttaatagctgccttaatagtctaaaaatactgcacgttactaaaatactagatgaaaatacaaaacggtaactgtgaaaacagctgatttgcagcaaacaaagttacctctgcaaacacaacgcatttaagcaaatgccatttgtgcagtttaactaagtaaaatgcaggaattttcagccaaacgagacgctcttttcgcatgtctcgacgatgcgagcaaagagttgcggggaactgccttggatcagagcaaggccaaggcgttttccatcaatgccctcgatcgaggaaacaaatccggaaacgaatccggacaggtgatgaactaccgccagggtcgcagcattgttactggcctcgatgcggaggatggaagactgcgacgaatgcgcggcaaggagagcattttcaagaagcccgaactccccattggacgctgtttgaagccaagaaaaacgccagattaccaggtgacagaccatccctctgcaattagttgtccccaccctaaacgtttgacctactctctaggtaaacccgcacaaatggaagaagtactccctgtctgatgtggacatttccgaacagagcaactccgccgccgccttgtccttcctgcgacaaatggatgcacagcgcgaggctgagggcgtcgataacgaatctccacctacagatggcaagatcgagttcaagaggaccagcaaactcagccgcaagctcaagagcctcaaacagcaggaggtggatgatgtggagctggataagccgcagttaagaggttccaagctggtgatgcctgagtatgtaattggccaaaagccgcataagccaaagaaatgcaaaaccaaatcggaacagagccgtgcagcgggaaaactacaactgtcccacttggcggaggaggatgagcaggatgattaggttaaaatgtatgatcctaagattatattatataataattagtgtcccaatgaaattttagaaatgtaaatagattttaattatatacaaactgcggtttgttgtgaaatatcatcgtttattttgtaagtgtacacactcaaaaatcagactggaaaattgctttacattttgcctaaatgttcgatttcaaaaatctggctgtgtatatactggaactctgtattataatatttgtagatttctggcagttatcacataaattacataatttcgtacctttaaatgaggtatgcaatacgtattagaagaatacttgaatgagtatttgttacaatataaacattttatagcacgcgagcacagaacacataatctaaaagacatactaaatgcgacgataagaacataaatgcggttaaaaatgcatccggaatgataaaatgtccagtggcggcaactattcgttgaaaaacccgggattgaagtagagtttcttattaaagccaagattatcataggcacctgtctgcatggaacccttcttggtgcgcttattacccacggcttcgctcgtcttctttaggatatcctcaaggtctgtgtcgtgggcatgatcggccatcacttggcaaaacttctggatgtaccagctgcccgtgtcgagatcgcggtgggtaacatagcccggcgtattagcatagcagaccagagtgtcggcaagacttggcacattggtgctcgggctgggtatgccctccgtctgggtgtcaggccacttctcctcttgcgccgtatacactggctccatgagattgccttgattctttggatggcccaaatcatattcatcgccgcggcaaaagggaaacataagcaccttcggcttgttcaccaaataaggacatttggccgtctggaaatggtccttgatcttctgcatatcgaccacagatccatcgcaaaactccaccttctcttttccctccacactgttgcc

SEQ ID NO: 14519 - DNA, 744 bp, DROSOPHILA
cgcatttaagcaaatgccatttgtgcagtttaactaagtaaaatgcaggaattttcagccaaacgagacgctcttttcgcatgtctcgacgatgcgagcaaagagttgcggggaactgccttggatcagagcaaggccaaggcgttttccatcaatgccctcgatcgaggaaacaaatccggaaacgaatccggacaggtgatgaactaccgccagggtcgcagcattgttactggcctcgatgcggaggatggaagactgcgacgaatgcgcggcaaggagagcattttcaagaagcccgaactccccattggacgctgtttgaagccaagaaaaacgccagattaccaggtaaacccgcacaaatggaagaagtactccctgtctgatgtggacatttccgaacagagcaactccgccgccgccttgtccttcctgcgacaaatggatgcacagcgcgaggctgagggcgtcgataacgaatctccacctacagatggcaagatcgagttcaagaggaccagcaaactcagccgcaagctcaagagcctcaaacagcaggaggtggatgatgtggagctggataagccgcagttaagaggttccaagctggtgatgcctgagtatgtaattggccaaaagccgcataagccaaagaaatgcaaaaccaaatcggaacagagccgtgcagcgggaaaactacaactgtcccacttggcggaggaggatgagcaggatgattag

SEQ ID NO: 14520 - protein, 233 aa, DROSOPHILA
MQEFSAKRDALFACLDDASKELRGTALDQSKAKAFSINALDRGNKSGNESGQVMNYRQGRSIVTGLDAEDGRLRRMRGKESIFKKPELPIGRCLKPRKTPDYQVNPHKWKKYSLSDVDISEQSNSAAALSFLRQMDAQREAEGVDNESPPTDGKIEFKRTSKLSRKLKSLKQQEVDDVELDKPQLRGSKLVMPEYVIGQKPHKPKKCKTKSEQSRAAGKLQLSHLAEEDEQDD

SEQ ID NO: 14521 - DNA, 2693 bp, DROSOPHILA
tgtcacaccatcgactacgtcttttacacacccgatcgcctcaaggtgggatttctgaaatagttgcaagcggttacaatttatttaacaatatttatgtccaatttcagatcaaaaactgtctagactttccggccggagagcaaattggcaagaatcgcacacccagcttccaatatccatcggatcacttttccctggtgtgtgactttgagctactgcctccgacggaaaacggaaaggaaagcggcagcggaagtgggagcgatggtgaaaatgaaacggaagtggagggcagcaagcatggatccattcaatagaaagcttcagattcataatttgccgaaaaagaagtttcaataacattacatcgattgtgatattagttgttagatacatattagcctcatacacaaccgttgcactacagtttgcagcttttacaaatgataatccaaaattcacaataaataaattacaacgtatggaagaaagttaactgaactgcattttctatccatataacaatgacctcttaaaaatcaaaattaaggatatacatattttatatagattctgtacatgaactgaatcccccatctaataaaaagattcttcagttccgaagtaaaaggatctttagaagacttttctatagttagggaagccaaagagctactcttaaataaatacattttcggagcccttttgcatttggttttaatttttcatgtaaatttaagcctataaaaagtattccctacttttgggcgcatgtaagtaatattctgctatcggaaatcgcttgttcggggcgtatacttgatttcgctgtcaatggaccgcaagatgtctatttaaccggcctccacactgaattcactctacaaatcaccgaaatcgttaaaaacacgcacaccgtgcaaattgcagcgcacaacaaacgtatgcagcacgcccaaagcaacaaaatggattgcgtaacacaacaaacacctttataaatatacacactacatgtatttagtatataacaattttcacacagtgttcgcactaaaatgtaataggtttagctggggtcttggacttagagcagggccaagatagcggatagcacgaaagaggtggcgaccattgcgtaaccggtggagtaaacctccttgatcttcaggaaccgtccggtgtcccagaggagatgcctaataccattggcggtgtgatagccagccggataggcgatgataaacttgagggcggtcagagtggcgccactcagctggaggccctccaccatggtcacatagtggctaatgtcgtgggacgagatcagagcgcccaatcccagaccccaaacacccacacccagggccaatcctgtgccgcggtgacagatcgagagcatggaggtcagctgcggttggtagatggtcagatggggcgacagctccctgcccaagcgctcgttcttctcgaagaacgactcgtccttctgggtttcggccacggaaaccaccttcatcgataccgggcggctggcagcggccatctggaggccctggcgcagcgccggagagcggatcaaagaactggagagtgcatacctgcaaaaagcagtcacaaatcagggtttttgcagtgccatcacagaaattacgtacatttccctgtttttcactcgaacttgtattgatgggaccgtacactgactgcgcgatattaccgcaaacagggatgccactacgttggtaaaaaacaaataagtctcgaaagtattgattttatatcaactgtaaaacattgttattactttatatgattaattctgttcccacttttatattattccaattgagaatattacacatatttatcttttttactgaaacagtctcaaattattaaaagttagaatggccataaatatacgtaagaaacatcaatattatagctataataattttgttcgccttgttaatattccctgctcttaactaacaataaatcgaagaaaacattgaaattatcgatacgtgtatagtaggcgctgccactcccggatcaatcgttaccactcccaagcgagttggcagttctttcgccattttttctcgctcattctttttgctgttcgagtgagcgcgtggcaggtcgtttcgcagtgttcccggtccggtgcagttgtagttgcattttcgccagcgatttagacgccatcttccgactcccgacaagccaatcaccatgaagatctacaaggatatcatcaccggcgacgagatgtttgccgacacctacaagatgaagctggtggatgatgtgatctacgaggtgtacggaaagctgatcacccgccagggtgacgatatcaagctggagggcgccaacgcatccgccgaggaggccgacgagggcactgatatcacctcggagtctggcgtggatgttgtgcttaaccaccgactgacggagtgcttcgccttcggcgacaagaagtcgtacaccctctacctgaaggactacatgaagaaggtgctggccaagctggaggagaagtcgcccgaccaggtcgacatcttcaagaccaacatgaacaaggccatgaaggacatccttggccgcttcaaggagctgcagttcttcaccggcgaatctatggactgcgacggcatggtggccctggtggaataccg

SEQ ID NO: 14522 - DNA, 636 bp, DROSOPHILA
tcaatacaagttcgagtgaaaaacagggaaatgtatgcactctccagttctttgatccgctctccggcgctgcgccagggcctccagatggccgctgccagccgcccggtatcgatgaaggtggtttccgtggccgaaacccagaaggacgagtcgttcttcgagaagaacgagcgcttgggcagggagctgtcgccccatctgaccatctaccaaccgcagctgacctccatgctctcgatctgtcaccgcggcacaggattggccctgggtgtgggtgtttggggtctgggattgggcgctctgatctcgtcccacgacattagccactatgtgaccatggtggagggcctccagctgagtggcgccactctgaccgccctcaagtttatcatcgcctatccggctggctatcacaccgccaatggtattaggcatctcctctgggacaccggacggttcctgaagatcaaggaggtttactccaccggttacgcaatggtcgccacctctttcgtgctatccgctatcttggccctgctctaagtccaagaccccagctaaacctattacattttagtgcgaacactgtgtgaaaattgttatatactaaatacatgtagtgtgtatatttat

SEQ ID NO: 14523 - protein, 152 aa, DROSOPHILA
MAAASRPVSMKVVSVAETQKDESFFEKNERLGRELSPHLTIYQPQLTSMLSICHRGTGLALGVGVWGLGLGALISSHDISHYVTMVEGLQLSGATLTALKFIIAYPAGYHTANGIRHLLWDTGRFLKIKEVYSTGYAMVATSFVLSAILALL

SEQ ID NO: 14524 - DNA, 3665 bp, DROSOPHILA
tgtggcttagattttggtgcaatttcgtagtgaaagtgcagccgcagcagcattagcaacagcgagtagtaagtggctgttccgcaacaagttagaaagaaatgtatggcactccatcgccatccgctggtaattgctggcgctgcacaagaaagccgctttggatctagattgtggctcacagattggccaaaatggctggatggatggtgggctgcctggctgcctggcagcctggtcccacatctgaacttgacgaaatcgtgttctggtgatcttgtgggtgcccactcggcgacccacttggagccacggccagcgccactgccactgccactgcagtgacccactcaactgacggataagccaagccatccgggtctgggtcagagaaagggagaagatgaccagatacctgacagcgttcacttttgccaccgacagatgccaactgtcattggccatcaacatcatcaatcgatgggggtcaaagaactcctcccggctttccatggtgtctctgccgctttttctctctttctgtgcggacgtgagatcgagattgaaatgaagatcgattcgagataggaagacaggaaggcaccgccactgggtaatggtactggcactggcactggcactggaactggcactgtcactggcgctggtactgggaaagagagtgtgctattttcatatgcgcacgccgttgccactgataacccaatatcccagttaaatttggaaccaaaagccgtaaaagtcgaggcgggggaatttgaatgcgcgccgaaagagagagccaataagtcagttaagttatgcataaatccgaaatccagcggcgtgggcgtccgccattcagtcgcccagtcagtcagtcactcaatactcactcgtactttcaattggaactgccattgccgttgtcattgccccgcccctttacgcagtgccatataaaagcgtcgacgcaacatggccggcgtttcttttaccccaacaatgccgagaagtgcgctcatcgttcccggtctgatttgtttttggtctgccctggccttggccctgtccgccaccttggaggcgagtaccccggccacgcgaaaggcgcttcttcgcgcacgacccgcggtgccgcccgctgccaggtggggcgccaatatgcagatgctgcgccggcacaacagtaggtacccaacatcatatcagacgctagtagtcgatgcactcaaccattggcacttgcaggtcctgccttcaacttctggacggaggacagcgatacgaacatatgggagcattgcggcctcttcgagggcgacatcatgctgcaccgcgagctgctgaggaacgggctgctgaacgagcggctcacctggccagaggccgccgtgcccttctacatagacccgcaagacttcagtgagttaaggcctgcaagcagtccaaagtagtaaaacaccctttccaaacagacgccaaccagaccatggtcatactgaaggccttcaaggagtaccacgaccgcacctgcatacgtttccggccgtacgaacagggcgacaagcactggctgctcatcaagggcaactactccggctgctggtcgagcgtcggccggcgttcgggtggccaggtgctcaacctgaacacacccaagtgcgtcacacacggcgtggtggtgcacgagctgctgcacgcgctcggcttctaccaccagcagagcgccacggagcgggatgagtacgtcaagatcaactgggagaacatcctcgacgggcacgcgcacaacttcaacaagtacgcccgcacccacatcaccaacttcggggtggagtacgactaccagagcgtcatgcactacagctcgcgggccttcagcaagaacgggaaagccaccatagagccattggtgagtaggccaacccaaatggttaccagttattcatgtaattgagtattattttaaatcgcttacactgtaaaggagttcagtttaacattcaatagtaatactgcgaattaatggactattgtatggacatacagtaaattcgcttatcttaacaattactacacctaaatgttatatttcgatatacaaactataatgctatcaatctattttgcacaaaccacacttgaatatgtgcattcaaaaacacctatcaattaacttagattccattaggaatgccaaaaaccgtggctcataaaatatttaaattcgatagtgatagtgatttgatcatattcagattaggaattcctatattaacacatggtccaatgacgtgcaactatgctaggaatagacgaagcattttgcttccttgtccagttggaactatatcaaatgagaattctttagctgaatggttgactacaccttagcagttttagttgaagcgatgagatgtttgtaatgacttgggggagcttgcatcgtctacactctctgactcctgtcctttgcttccaggatccgtacgcctcgctgggccagagacgcggcctctccgacaaggatgtgtccaagctaaacgagatgtacgaacaggactgcagcgaggactacctgctcaacttcgaccgcttcgggaactacatcgacgaactgctcgactacttccagggcaacattcaggatctgctcggataaaaacgcctgaggccaataaaagaaagtgccggctaggtgacgaaaaaagtgaagtgactgatctcgtcgagggtctgggcggcctccccacggagtgccgggtacgagtggtgctcagagagttgttgcagcgcaaatcgcagctctccattccatatgcgctgcacgccgcgcaggctgaagcgggccagcaggcgcagcagctgacaggaacgttgccgcaacaggtggtgtcggctctgcaggagcgagacgaagtttagccgcggattaaagacaatccgttctacaagctccgcgttttcgggcagctcgcgcagcacacagcccatcagggccaacatgcacccagccaggcgaacagaggcggcgtctgaatccgattgcctgaagtctacgggagaacgggaacgggctaacagtttacaggagtcagctcataccatctaagggtaatcttaccgtgcgtgaggaagttgaggaacagatcgcttgctgccagaatggcaaccgcatcgcagaactgcgttaggaactgctgctgcaggtgtaccaagtggcagaccagttcgtacagactgcaagccgtctccagctcctcgacagttagctccggaatgctacgcaacgttcgactgagcgaacccgtggtgagtggggcggaggcagccgagtccgagagttgtttgtgcgacaggagcagcttgcaggcgtacatgagattgggcaccagttttacgtccacgtacacgttgcggatgagctcgaggtcaacaatcaaaacaggatccaccagcacaaagggcaacgacagcaactgggccacactcttgagtacccgtggaatggccttggagttgcgcagcggtgccacaataatgctcaccaggttgtgctgtttcaatgagtccagttcgccgtcaagcagctcctgcaccgatctgttcaagaaggctagccactcatcgttctcgatgggcggactttgggattcatcgca

SEQ ID NO: 14525 - DNA, 980 bp, DROSOPHILA
caacaatgccgagaagtgcgctcatcgttcccggtctgatttgtttttggtctgccctggccttggccctgtccgccaccttggaggcgagtaccccggccacgcgaaaggcgcttcttcgcgcacgacccgcggtgccgcccgctgccaggtggggcgccaatatgcagatgctgcgccggcacaacagtcctgccttcaacttctggacggaggacagcgatacgaacatatgggagcattgcggcctcttcgagggcgacatcatgctgcaccgcgagctgctgaggaacgggctgctgaacgagcggctcacctggccagaggccgccgtgcccttctacatagacccgcaagacttcaacgccaaccagaccatggtcatactgaaggccttcaaggagtaccacgaccgcacctgcatacgtttccggccgtacgaacagggcgacaagcactggctgctcatcaagggcaactactccggctgctggtcgagcgtcggccggcgttcgggtggccaggtgctcaacctgaacacacccaagtgcgtcacacacggcgtggtggtgcacgagctgctgcacgcgctcggcttctaccaccagcagagcgccacggagcgggatgagtacgtcaagatcaactgggagaacatcctcgacgggcacgcgcacaacttcaacaagtacgcccgcacccacatcaccaacttcggggtggagtacgactaccagagcgtcatgcactacagctcgcgggccttcagcaagaacgggaaagccaccatagagccattggatccgtacgcctcgctgggccagagacgcggcctctccgacaaggatgtgtccaagctaaacgagatgtacgaacaggactgcagcgaggactacctgctcaacttcgaccgcttcgggaactacatcgacgaactgctcgactacttccagggcaacattcaggatctgctcggataa

SEQ ID NO: 14526 - protein, 324 aa, DROSOPHILA
MPRSALIVPGLICFWSALALALSATLEASTPATRKALLRARPAVPPAARWGANMQMLRRHNSPAFNFWTEDSDTNIWEHCGLFEGDIMLHRELLRNGLLNERLTWPEAAVPFYIDPQDFNANQTMVILKAFKEYHDRTCIRFRPYEQGDKHWLLIKGNYSGCWSSVGRRSGGQVLNLNTPKCVTHGVVVHELLHALGFYHQQSATERDEYVKINWENILDGHAHNFNKYARTHITNFGVEYDYQSVMHYSSRAFSKNGKATIEPLDPYASLGQRRGLSDKDVSKLNEMYEQDCSEDYLLNFDRFGNYIDELLDYFQGNIQDLLG

SEQ ID NO: 14527 - DNA, 4046 bp, DROSOPHILA
ctcattatttgtgactacttggacgaaaagtatccggaggtgccattgtatcccaaggatctgcttaaaaaagcccaggagaagattttaatcgaacgtttcggacagttcatcaatgccttctactacctgttgctgcacgacaatcccgagcagctggttgacaccgatcactatgccggattggtcgtttatgaggaggaactgaagcgacgttgtaccaagttctttggtggcgacagcccaggcatgcttgactacatgatgtggccctggtgcgagcgctttgactctctgaaatacacttttgaacaaaaattcgaattgagtccggaacgttttcccactttggtgggtcctattggttttctaattatgtcttttaaattaccgagattgttctactgcagattaagtggcgcgacttgatgatccaggatcgtgctgtcaagtgtttctatctggatggacagacccatgccaaatacatgaactcccggcgatcgggccaggccgattataatatgctatagtaagatttgaagattatacatataatgtgtgactgatccatttctcgtttctagcaatgaggccaaacgtgtcaaattggggtagtctacgggatgatggcgtttccacttcagcattgtaccttttgcacatataacatgtaacacatgtacctactacggcagcattattgtgattgaaaaataaatctttgcattttcattgtttatacgggttgtaagtacgtttgttttagaattagattaatgaaggtatgaatgataaatggatatgaaaatacttatcttagagtagtcgtttgtagtctttaatatgtggtcaaacaattttcttaaatatgagcttaagaattttaaattcacccgctcaacaatcgaaatatattcgataaattcactcgtccggcgactgcgaccactttataaggtaccggaatccctctatttgttgtcagtcgatcggaactactttgccaccaacatttcacgtcttgggaattattttaaaattgttaacaaaatggccctgccgcaaaagcacttcaagaggggtgagttgggggcacttcaaggtcatcgggatagtgacgctgcaaaagttggcaattgatttcatagttttatctagaccccactttgagaggcgtaaattacgcagagatagagctttaattttagccaaagcataatggaaaactttctgctgacgtcacaaatcacccttcaacaggttcgcccaaaccggagatccccgaggatggagtcctgcgttactattcgatgagattctgcccgtactcgcagcgtgccggtttggttttggccgccaaaaagattccacatcacacggtttacattgatcttagcgagaaaccagagtggtacatcgactacagtccattgggcaaggtgccggctatccagttgccaaatctgcctggacaaccggctttggtggagtccctggtcattgccgagtacttggatgaacagtatccgggcgagggctcccttttccccaaggatccattgcaaaaggcgctagacaggattctcatcgaacgcctgtcgcccgctgtcagcgccatttaccccgtgctgttcaccaagaatccacccgctgatgccatcaagaactttgagaccgctctggatgtcttcgagcaggagatcaccaagcgcggaacaccatactttggaggcaacaagatcggcattgctgactacatgatttggccctggttcgagcgattcccggccctcaagtacactctggatgaaccctacgagttggacaagacacgctatcagaatttgttgaagtggagggatctggtggctcaggatgaggctgtcaaggccaccgctttggatgcccgaatccatgcgaagttcatgaagacccgccatgagaacaaaccggactacgatgtagccttccagcccttgtaaaggatgtattaatggatgacaggaagcaacatacttaaactaacattgtgaaaccgcttttaaaaaaatattaaacccatatataaagtagaccatcaaatgttatttctaccttttcaactgggatttgggtcagtgcttttattcctgccaattaatcaagcttacattgatcttacaggttccaccaagcccgagctgccagaagatggagttcctcgtttcttttccatggcattctgccccttcagccaccgagttcgtctgatgctggccgccaaacatattgaacatcataagatctacgtcgatttgattgagaagcctgaatggtacaaggatttcagtcctctgggcaaagtgccagccctgcagcttactggggtgaaggaccaaccgaccctcgtggagtcgctcatcatagcagagtacttggaccagcaatatccccagacgcgactctttcccacggatccgcttcagaaggcgctggacaagattctaatcgaacgttttgctccagtggtcagtgccatttatcctgtgctgacttgtaatcccaacgctccgaaagatgccataccgaacttcgagaatgccttggatgtttttgaagtggagttgggcaaaagaggaacgccctactttgccggccagcacattggaatcgtggactacatgatttggccttggttcgaacgttttcccagcatgaagatcaatacggagcaaaagtatgagctggatacaaaacgatttgagaagctggtatgtttaagtaatccaacataagatgatgcatgtatctcatcaaaaatccattacagctcaagtggcgcgatttgatgacccaggatgaggttgtgcagaagacagctttggatgtccagttgcatgctgagttccagaaatcgaagacccttggaaatccccagtacgacattgccttcaagggtacaccatagaacgacaactggtttagacaagatcaaatctttggaaccggttatggactgcatttatgttttattcattccatgcgaaaaattcaataaaccaagtgcatcaggcatccttgaccagcagattgtaattgggtcgacccaggctccgtgtacgcaggaactccgcctgaacctcggcctccatgtagaaggccatcacagccggatctcgtttcatgcgttccagccaaagggtctgaaaaatggtatactaatgtacttcatcactcctgggatacacggacctgctcaccagctgggggaagcgactctgatcgtagttataatcctctccacgctgcaacttaaggagctcgaggcgctcacaccagggccaaatcatatagtccagaatgcccgtctgctcgccaccaaagaattccgtaccacgtcgagccagctccctttcgtagatgtccaggccgctccagaagggctccagatcaccgccatcggatgccttgaagaaggcacctaacaccgctctaaatcgctcgattagtaacttgtcctgcactttcttcagcggatcacgtggatagagtggtcgcaatggatactgctcgtccagatattcacaaatcagtagcgactctgtgagcacaggtggtccaggttctcgcacgatttctagagccggcaccttgccctgtggattcttctccagcagccactccggcttgtctgtgagattaatgtagatgctgtgatacgggatctgcttggcgtccaggaccagatgcacccgttgggcaaatgggcagaagcgcatcgagtacaggcgaaggataccatcttcgggaacatccggcatgggtgagcctagtgggcgcatttattatcaattatgattatcctggtttcctggctctacccaccttttgccaaatgcctgccgttactcatgatgtgcgtgctcgggtccagagatgcaagtggtgatagcgattgtcattcgagtgatttataaagtgcagctcactgcccttcgccggttggcttcgcttacgcggctgaacttggtggcttgcggctgacacacataccaagccatgtg

SEQ ID NO: 14528 - DNA, 905 bp, DROSOPHILA
actttgccaccaacatttcacgtcttgggaattattttaaaattgttaacaaaatggccctgccgcaaaagcacttcaagaggggttccaccaagcccgagctgccagaagatggagttcctcgtttcttttccatggcattctgccccttcagccaccgagttcgtctgatgctggccgccaaacatattgaacatcataagatctacgtcgatttgattgagaagcctgaatggtacaaggatttcagtcctctgggcaaagtgccagccctgcagcttactggggtgaaggaccaaccgaccctcgtggagtcgctcatcatagcagagtacttggaccagcaatatccccagacgcgactctttcccacggatccgcttcagaaggcgctggacaagattctaatcgaacgttttgctccagtggtcagtgccatttatcctgtgctgacttgtaatcccaacgctccgaaagatgccataccgaacttcgagaatgccttggatgtttttgaagtggagttgggcaaaagaggaacgccctactttgccggccagcacattggaatcgtggactacatgatttggccttggttcgaacgttttcccagcatgaagatcaatacggagcaaaagtatgagctggatacaaaacgatttgagaagctgctcaagtggcgcgatttgatgacccaggatgaggttgtgcagaagacagctttggatgtccagttgcatgctgagttccagaaatcgaagacccttggaaatccccagtacgacattgccttcaagggtacaccatagaacgacaactggtttagacaagatcaaatctttggaaccggttatggactgcatttatgttttattcattccatgcgaaaaattcaataaaccaag

SEQ ID NO: 14529 - protein, 251 aa, DROSOPHILA
MALPQKHFKRGSTKPELPEDGVPRFFSMAFCPFSHRVRLMLAAKHIEHHKIYVDLIEKPEWYKDFSPLGKVPALQLTGVKDQPTLVESLIIAEYLDQQYPQTRLFPTDPLQKALDKILIERFAPVVSAIYPVLTCNPNAPKDAIPNFENALDVFEVELGKRGTPYFAGQHIGIVDYMIWPWFERFPSMKINTEQKYELDTKRFEKLLKWRDLMTQDEVVQKTALDVQLHAEFQKSKTLGNPQYDIAFKGTP

SEQ ID NO: 14530 - DNA, 3382 bp, DROSOPHILA
tcataagcatttaaactccagtttaccgcgttttcgattgcatttacacgcatttggcttcggcagcaaatatcgtcagaataatccaatccaaattaattagacaaaagatgtagcctggaaacctttttatctggccacaaattgtccaagcccgcggcgctaacaccaataaaagccttagttatacgactaatgtatttgtaaaatcagttatacattctcagctacgatcacgatcatactattcattcttgatggattgtacatagatcaagacaactgctttcaaatttaagctttattatcgttatcagattaagaactatctttgcaaagcatatgaaacgacttggacttcacttttactttcgtcttatctgtatactacactttagataaacaatgtaaggttaatgtatggtaagaactattgattgtaaacgtcacattgataattaaaatcaggtgtaaataaggcgtttaacctttccgatgtgcgccgagaatgtgccatgccttttgagtctgttataatcggtgcagtgcaacgtcataaagatcatatatgtacatgcatatgtagaaccggtcattcgaacgaaaacacacgtttcagtgggaataaacgcgtgtctgttttagaatacgggcaatgcaatgcatgagatgggcaattcttaatcaggggctgagttatggggctttcctacctccgctgtaataacgttcatctgtggcaagtttatacatatctggtttgggctgaatttgtatgttggtattaatatgaaatatgttatttacgaaaaagttgtgaaaatttgcataaatcgggtgcgcgcaaatgtagctacatctaatttttgcgtggttctctttgccgccccccttgagcactctattacaactcctcctctgttcgagcgagatgccgatctgagtcgcttgagcttttccattagttggcgttgcccagctatgacgtactgggtttgtctccgaacatagtcgatcaaaacccagtatgcatcgcgctattaaagcatataaagccacttagcccgatcgaacagatccacaaagtgcaaaagccatttggatggaaagcttctatagctgcagctgattcaataagtttactaataatgcggacgcatctttttgcgctttgcctgtctatggctacaataggtgagttgattcgaattggcaaagaattgtgtcgcctcttaaaaaaagctttaacgtaaaggcatacccaaagctaatggagtcatggacgattacgatgctgagatgggggagttcatgaatgctctaccgaacctcgatgataccccctatggcttaggacagcgatcagatatctcaacggaaccggaagaggatgatattttggcaagcctggatgatgagtatgaggaggctaagcattgcgtctggaacacttgtgacaaggatctcagcgaatcgcggggaatcggaaagtttctggacctaccctttataaagaagatagcaagtaacctgaatccattcggcagcaagaaacttcgcatgcacttctatctctttaagagggagttccctgagtgtggcagagaggtggatttctcaatcgagcgcaaatggaggcattgtggctttaatgcttctctgcccacacgactgatgatacacggttggatgagccagtcgcgtggctctttcaatcgggatgtgaagaatgcatacctaaaaaaaggggagtacaatgtgatcgttgtcgattggagcgcaagctcagccaacataaactacttttcggtggtaaagcttatagagacctttggagctgagttggcccaatttataaggaacctcaatcgtcagtttggagctgacttcgacagcatgtatcttattggtcactccttgggagctcagatcgctggttctgccgggaaacgtttgaaaccggttaaagtaaatacaatatttgctttggatcccgcaggtccaaagttccgtcatcgcggaactgaatttcggatagatcccagcgatgcaaagtatgtggagtccatgcatacgagtgctaactttgggtttcgtcggcctacaggcagtgccaccttttatccaaactacggggcctatcagcatagctgctactacctaggttgctcccatattcgatcatatcagatgttcgccgagtccatcaattcgcctttgggattctgggggaccccttgcatccgagacaatggaaggtggcagtgcgattatagccagcgacagtccatccagatggccggtgagccatcgattcataaagaaggcatattctacgtgaagacctccagcagtgatccattcgcccttggaaagcaataaggctgtaacagattatctttttaagaggagctttgttgtacgtgcatctttaattcactagtcctttagtaaaagagtatattgcaaaagatttaacattatatatataacaacttatgcatatctaagtctgaaacttaacttacgaattaatgatttataaaaatgcttttaccttgaatcttttttatacccttacagagggtatatattgatgttagtctgaagctaaaatggagttaaggatacattcatataaagtataaaaatataaaattgttgtttgttggagtacaattgtttttatacccgttactcgaagagtataaggtatacccattcgttgaaaagtatgtaacaggcacaaggaagcttttccgaccatatgaggaatttatattcctgatcaggatcaacaagatcaattacaaaaatgaggacgtggcagttttgggtggtttgtgaacggtttttctgtttaattctcaatatgaagacttaacttctaccaactttaaaactaccttttagttcagcgggaaaactgaagtaacgtaaccataacatttgagtgcttgcggatggatactttccagaaaggtatttatgtttttcaaaccaattttgtaagatattttttgattttggtatggattgcattgattgtggtcttaattcataattcataataatacggttgaatttgttttaatctaatagcgtcaatagacattttggtttgttcactgtccgatggtcgtagtcgtttagtaaacgggaagttagtatttttaggtgttgtagtagtagggtatgtatttcctctaaaatgtgctgcttgaggattttgggtttcgttgggatgttgtgcggaaggcttttttgaataattggttgtgtgacacacaccatatgtgttcatgtattggctgggactgaagtaataaggtgggtgccacataggtgggttgttagtcatctgctgcgtaaccatttagac

SEQ ID NO: 14531 - DNA, 1321 bp, DROSOPHILA
tccgaacatagtcgatcaaaacccagtatgcatcgcgctattaaagcatataaagccacttagcccgatcgaacagatccacaaagtgcaaaagccatttggatggaaagcttctatagctgcagctgattcaataagtttactaataatgcggacgcatctttttgcgctttgcctgtctatggctacaataggcatacccaaagctaatggagtcatggacgattacgatgctgagatgggggagttcatgaatgctctaccgaacctcgatgataccccctatggcttaggacagcgatcagatatctcaacggaaccggaagaggatgatattttggcaagcctggatgatgagtatgaggaggctaagcattgcgtctggaacacttgtgacaaggatctcagcgaatcgcggggaatcggaaagtttctggacctaccctttataaagaagatagcaagtaacctgaatccattcggcagcaagaaacttcgcatgcacttctatctctttaagagggagttccctgagtgtggcagagaggtggatttctcaatcgagcgcaaatggaggcattgtggctttaatgcttctctgcccacacgactgatgatacacggttggatgagccagtcgcgtggctctttcaatcgggatgtgaagaatgcatacctaaaaaaaggggagtacaatgtgatcgttgtcgattggagcgcaagctcagccaacataaactacttttcggtggtaaagcttatagagacctttggagctgagttggcccaatttataaggaacctcaatcgtcagtttggagctgacttcgacagcatgtatcttattggtcactccttgggagctcagatcgctggttctgccgggaaacgtttgaaaccggttaaagtaaatacaatatttgctttggatcccgcaggtccaaagttccgtcatcgcggaactgaatttcggatagatcccagcgatgcaaagtatgtggagtccatgcatacgagtgctaactttgggtttcgtcggcctacaggcagtgccaccttttatccaaactacggggcctatcagcatagctgctactacctaggttgctcccatattcgatcatatcagatgttcgccgagtccatcaattcgcctttgggattctgggggaccccttgcatccgagacaatggaaggtggcagtgcgattatagccagcgacagtccatccagatggccggtgagccatcgattcataaagaaggcatattctacgtgaagacctccagcagtgatccattcgcccttggaaagcaataa

SEQ ID NO: 14532 - protein, 367 aa, DROSOPHILA
MDDYDAEMGEFMNALPNLDDTPYGLGQRSDISTEPEEDDILASLDDEYEEAKHCVWNTCDKDLSESRGIGKFLDLPFIKKIASNLNPFGSKKLRMHFYLFKREFPECGREVDFSIERKWRHCGFNASLPTRLMIHGWMSQSRGSFNRDVKNAYLKKGEYNVIVVDWSASSANINYFSVVKLIETFGAELAQFIRNLNRQFGADFDSMYLIGHSLGAQIAGSAGKRLKPVKVNTIFALDPAGPKFRHRGTEFRIDPSDAKYVESMHTSANFGFRRPTGSATFYPNYGAYQHSCYYLGCSHIRSYQMFAESINSPLGFWGTPCIRDNGRWQCDYSQRQSIQMAGEPSIHKEGIFYVKTSSSDPFALGKQ

SEQ ID NO: 14533 - DNA, 6747 bp, DROSOPHILA
acagtaacacatatatggtttgtatgcggcactcgctcatgctttaacatcgctctcttatgcgtcgctttaattaaaatgaacaatgggatcgagaactgtcgaccctatgtacaggattcgtggggacgtgttcgtgtaggcggtaatacaatattataatttcatatgtagcaacaaagatggtctaactgtcgatgtaaaacacaggaaacaaattaagcgctggcgtgtgtaaaactaaatcgaatggtaattcattaacattaagctcgagctcgagttaactggatcacggagattagcgactgctggttggctggctggctgctgatgctttagtggttgctgaaataaaagttgttgttgcgtatgttgccacgggttcgccagcggatgcagctgagcagggccacgcgggctgcgcgcagcaggatctggccgtaggcacagcaggcgcagatgcgcctcacccgctcggccaggttgcgacgacgacagcgacgggcgggacgatgccagcggggcaagtcctgccggcgacgccgtcacttgcgacgctggaagacacgtcgcagagccttgcgccagaaaaagcgctgcgatttgttctttgtgtgtgtctgtgtgtcctctatttgagcaagcgccacatccaagtcctcaaccaagtttaaatcgtcttcgggagcgatgcgacgacgtgtaggtgtagctggagctgtgcgggccgtgcttgtcgaaatggatgcgtggggatgtggagtgggtggtgctgaggctgtggttacaaagggtgcaaccaaataaggtcgggccttcagtgccgccattgctgcagccgatgtggaagcaattgatgagatggaagccaaagtagccactgatgctgaagattctatatagcccctgccaacttctccgtctgctggtactgccggtgatccaccttttagtgctgttgctcttgctcttgttccttttcctgttccggttcctgctagagctcccccatctccatctgctgttgctggctgggtggcacgcagccaacaaccaggttgcatcgtatcttatctaagccacgggtgctgcagacactccgcagcggtggctcgcttgttcggatcgaactcgagcatgggcgtaaggaacgaagcgaatgacgccgcatccttttgcgaccactcgtacttctccagaagaacgtccattaggccccagggcttaaggcccgagatatttcgtagctcgcaggaacgggtaaacgacttcgccgcatatgtgccgtttaacaaaatctcccgcggtattggacccagcagctcgatgatgtgggccaaatggtcctcgtcgcgggtgtacgattcgccggagtgtggctcaaacagatagtcaccggtggccaattcgaataccatgcatgcagtgctccaaatatccgccgaggtgttatagcccgcaccgataataacttctagtgaccgatattggcgcgtttgaatgtcctcggtgaagtgacgatccacccaacaagcgttgcccagatcggcgatctttacgtggacgttgcattcatctaacgccggatcctttttagccttgtgctttgcttgcggcggcggaggaggtgttggcagcgttgaattcgaatgcggtccattcgtagccgaggatgtattctccacggagccgcttgagatttttgaatcgctgttcgagttaggcttagagttgttgttgtttagctgatggtttgatccctgcttctcctgcttgggtcgcaatggcatttttttgccgtttgattgtcctttcaaggtgccacttgaattggtgttggatttattgttggtagtgctattactgccattagcctgttgactcttgagcgcactgctgctctcggcactgctggtagagttttccagttgtggcggctgttgcccttttgattgattagatttgtctatcaaagaaatgattaaatttgcataagaaatcttatttataaaaaaaaggcattagttcaaaaaggaaagcgcaagtaatgaaaagagtgcggccagaactaaaagtttcgataaataaacgtagccaagaaatactatgaattaataaaagtgccttagtaaagcaactttcgcttctcgttttttactcacttttgttcttctttttcttcttctttttggctttgtcagtgccctcagtcagcggatcctgctcctgcgcctcctcactttgctccgggggcgccttgcgctcctccctctgcttacgcgatggctgcccagcggccacgtgcacgttatcctccacagagtttgcatcaaagtattcatcagcatcggagattccggcgtcgccgttctgcacctcattaggattgatggctccttggccatcagcctgctccaagtagtccctctgctgcttgaatagctccatgcgcttcttggccttcttcttaagcttcttcttccggttcttgctcattttgccagtaataggtggctcacgatactccttgggcgccctgctcaccaaggaggggtacatctttgagttcatgcaatacaactgggtggcttcagttgctagtgagcgcacatgaggctcgtccacgcacaggaggacattctcgggctttatgtccgtgtggatgatcttgcagcacgtgtgaagatagtcaagaccctccagcacctggcgggtaatagttttgacgttggccagcggaataccgcggtagttggacttccggatgagtttcagcagattgtcaccaagcacctcgaacaccatacaaatatgggtgccattaacgccggtaatcttgaagtcgtccagcatctggacggttttgtgacggcgtggattcgatggatcggtctcgcgcacagtcttgagtatctttatctcgtctcttgccgtctcggcaaagtgcggtgccgacttgacaattttaattgccacatatcccattgcttgcaaatcccagcacagccaaacagttgaaaagtggccccagcccaattttcggatgacatggtagcgatctgatgaacaaaaattgcattaattcggtgctcttctcgacaagggtcaaagtttaaaggtttgggaagagtagcgcagtaccacttagggaaattaaattaccaatgatcttatcggatggctcataatccattttaatcgcaacactgtcacctcgtgactgaccaagcgaatagccgaacgaaagagttgttctccgcttaaattcaattaaaatacgacagcgaattcagttgagtgcgttttcacgggattacttcaatatttcagcccaaatgtaaatgtatgatatgatgcgagaatcagtagtttggcatttggaagctccaaatgtattctactaaaaatgtatgtcaacttgacgtttatttcaagggttgttttatattttgtaaacactagcctgctcctccaaatgtttaatttcaaaaccatgcaagattctattaataatcatttttttcaataaatccgcttggattgcaaagacagagagggtcgcatatcatgtcatagctctatctgccggtttagtcgagcctgtttgaccgttatcaggtcctcattgccttatcgctaccaagcgattgctcagatttctttcgccaaaagctgcagagcctggaaatggattgggaaagtggcatggacagctggcgttgtaaaatgtgtggagacgacatgcaagcaaggggtggagccacgggcttatgttggcgacaacatttggaggagacagccgccccccaaatgggttgctgttgctattgttgtcgtcgccacaacacgaggagccctctttctcgccaaaaaaacaacccttgcccaaatggggatagaggtctgaaaaaccacccgctgtgcgttcgatttatctgtgctgtgcttgtctttggcaacctgttgttgttgctgcttctggggaggggctggtggttttttggatcggaaaatgccaatatatgtgggttgctaacaggtgacttaccatgaaacaggtcaccgatgttcacggggtggtagccacccttgcagtagtcctccataagctcctggtcctcgttatcgctgaatgtctcggattcataggactcattggagctgctccgcggcggctgctgttggtgctccttctgggtattgggcttcgccttcgcctgcgtttttttgggtggctgatattgatcgggagtacctgctgatcctccgctggatgtggaggccgtagcagttgcagtcgccttgctaaatgcggccgaactaggcgcattcaaatggctattattagcattatccggtgcctgcaagttctcgctgctccgattcggttccggaatgggattggaacttggtttgggattctggttctggctggaattcgactgctcctgtgggttagtgccattctgcttgcctcgcttcctgttcttatgacgcttcttcttcgcctgaatggccaaaacgcggcggttgacgtcagccttgttcatttcgctgctgctggtcgcttctattttcctatattaccctttatttccgccaggtgtaacagctgttgtgtgtggcaaatgggaagagaagaggagagaagacgagtggttacgggagggttgataaaaaaggaagtaacgcgacagagaagtagagaactgacaacgtgcacaaatctcaataaggcaatgttcgaggttcggttcacgcttctcgtttttttttttcctgcttttgttgttttctctgccctgttttttggcattcacttctatggtctgttattttgtagtacaaaaagcaacactgagctgctggaacatctagaaatttcagataataatctacttgcctcgggctcccacttgttcccaattaacacggctgctgtgtcgatttctgcacaaaattagcacaaaaaatcttcgctaaacggcaatcccaaaaactcgattccagtgtgaccacagcgataaagtcacaaaataccatcgggctctggcaaagaatggggaaaaaaaaatgaaattagtgatggaattatattttatacgatacaaaaaacaataggtgtatgacatttgtatactagcttaattatttgtaggtttgtagggaacagcctaccttgataatacatacattttcttattacatttttttttatcaaatccaaagcaaaacccatacttttagaaaaaaaattttttttaacattttttggaaacataaaatatgtatcgtacacattaaagaccagcttcactttattatttatataataaataaaacttctgctacaagccagaaaaagctaaaatgtagccaaatatagcatggacccaaaccagcgggagcactaacaactcgtaacgtaagcgcagcacgtaacatttccgctatctcactcgcacgttcagctacatagtgcggactcacttgcacctagtagtattcgatccgcttggaaattttgctcgccgtttgctttctcaaaggctcaaaaaaatgcagctaccaccgacttacctggcttcgcaagtgaacgcgaactaagccaatagcatctcgattcgccggcgttgcgcagcgttcgcaaatgcagctgaaacgagcaaaaaacacgcgcacaacgaaaaatccgcaagtggaaaaaactgctacggaaaaatcaactctgccagcaaacagtgttgcaaatcgatggagttaaacagctgagtggttagtgttgactgacagccgagtacggcaacttacaacactgtaggcgttttggcgcgattttaggttttggagggaaactgcatctagtgaaaaatcgtggccagttgtaattcgagcagtgcgctggcacgacgtggtgataaaaaaggaaaactaatagaattatactgactagtgataattaaccggacgtgcccatctgttaattcagccaagtggtatctttacaaccgtttagccaacaaccaaattgctatcagaaatatatattatacacacttactatggcccagccatcggtagctgcatttttcacaaaccgcaaacgcgccgccttggatgatgctatcagtatcaagaacagggtaagacttccgtcccagcaacgtgactccagatacaaaagtatctgcaaggacgttctgccaatacaggcattttaaaaatggatttgttttgcagcgtttggtggaacccgctgaaaccgtctctcctgcctccgccccttcccagttgccagccggcgaccaggatgcggatctagacaccctgaaggcggcggccacgggcatgcgtacccgatccggacgcactgcccgactaattgtcaccgccgctcaagagagcaaaaagaagacaccggctgccgccaagatggagccacacatcaagcagcccaagctggtgcaattcattaaaaagggcactctgtcgcccaggaaacaggctcagtccagtaagctggacgaggaggagctgcagcagtcgtcggccataagcgagcacacgcccaaggttaacttcaccatcacaagccagcagaatgcggacaatgtgcagcgtggcctgcgcacacccaccaagcagatcctcaaggatgcctcgccgatcaaggcggatctccgccgtcagctcactttcgacgaggtaaaaacgaaggtatcgcggagtgccaagctgcaggaa

SEQ ID NO: 14534 - DNA, 2623 bp, DROSOPHILA
cactgtttgctggcagagttgatttttccgtagcagttttttccacttgcggatttttcgttgtgcgcgtgttttttgctcgtttcagctgcatttgcgaacgctgcgcaacgccggcgaatcgagatgctattggcttagttcgcgttcacttgcgaagccagagcccgatggtattttgtgactttatcgctgtggtcacactggaatcgagtttttgggattgccgtttagcgaagattttttgtgctaattttgtgcagaaatcgacacagcagccgtgttaattgggaacaagtgggagcccgaggcaactgttacacctggcggaaataaagggtaatataggaaaatagaagcgaccagcagcagcgaaatgaacaaggctgacgtcaaccgccgcgttttggccattcaggcgaagaagaagcgtcataagaacaggaagcgaggcaagcagaatggcactaacccacaggagcagtcgaattccagccagaaccagaatcccaaaccaagttccaatcccattccggaaccgaatcggagcagcgagaacttgcaggcaccggataatgctaataatagccatttgaatgcgcctagttcggccgcatttagcaaggcgactgcaactgctacggcctccacatccagcggaggatcagcaggtactcccgatcaatatcagccacccaaaaaaacgcaggcgaaggcgaagcccaatacccagaaggagcaccaacagcagccgccgcggagcagctccaatgagtcctatgaatccgagacattcagcgataacgaggaccaggagcttatggaggactactgcaagggtggctaccaccccgtgaacatcggtgacctgtttcatgatcgctaccatgtcatccgaaaattgggctggggccacttttcaactgtttggctgtgctgggatttgcaagcaatgggatatgtggcaattaaaattgtcaagtcggcaccgcactttgccgagacggcaagagacgagataaagatactcaagactgtgcgcgagaccgatccatcgaatccacgccgtcacaaaaccgtccagatgctggacgacttcaagattaccggcgttaatggcacccatatttgtatggtgttcgaggtgcttggtgacaatctgctgaaactcatccggaagtccaactaccgcggtattccgctggccaacgtcaaaactattacccgccaggtgctggagggtcttgactatcttcacacgtgctgcaagatcatccacacggacataaagcccgagaatgtcctcctgtgcgtggacgagcctcatgtgcgctcactagcaactgaagccacccagttgtattgcatgaactcaaagatgtacccctccttggtgagcagggcgcccaaggagtatcgtgagccacctattactggcaaaatgagcaagaaccggaagaagaagcttaagaagaaggccaagaagcgcatggagctattcaagcagcagagggactacttggagcaggctgatggccaaggagccatcaatcctaatgaggtgcagaacggcgacgccggaatctccgatgctgatgaatactttgatgcaaactctgtggaggataacgtgcacgtggccgctgggcagccatcgcgtaagcagagggaggagcgcaaggcgcccccggagcaaagtgaggaggcgcaggagcaggatccgctgactgagggcactgacaaagccaaaaagaagaagaaaaagaagaacaaaaggcaacagccgccacaactggaaaactctaccagcagtgccgagagcagcagtgcgctcaagagtcaacaggctaatggcagtaatagcactaccaacaataaatccaacaccaattcaagtggcaccttgaaaggacaatcaaacggcaaaaaaatgccattgcgacccaagcaggagaagcagggatcaaaccatcagctaaacaacaacaactctaagcctaactcgaacagcgattcaaaaatctcaagcggctccgtggagaatacatcctcggctacgaatggaccgcattcgaattcaacgctgccaacacctcctccgccgccgcaagcaaagcacaaggctaaaaaggatccggcgttagatgaatgcaacgtccacgtaaagatcgccgatctgggcaacgcttgttgggtggatcgtcacttcaccgaggacattcaaacgcgccaatatcggtcactagaagttattatcggtgcgggctataacacctcggcggatatttggagcactgcatgcatggtattcgaattggccaccggtgactatctgtttgagccacactccggcgaatcgtacacccgcgacgaggaccatttggcccacatcatcgagctgctgggtccaataccgcgggagattttaagtacgagtggtcgcaaaaggatgcggcgtcattcgcttcgttccttacgcccatgctcgagttcgatccgaacaagcgagccaccgctgcggagtgtctgcagcacccgtggcttagataagatacgatgcaacctggttgttggctgcgtgccacccagccagcaacagcagatggagatgggggagctctag

SEQ ID NO: 14535 - protein, 748 aa, DROSOPHILA
MNKADVNRRVLAIQAKKKRHKNRKRGKQNGTNPQEQSNSSQNQNPKPSSNPIPEPNRSSENLQAPDNANNSHLNAPSSAAFSKATATATASTSSGGSAGTPDQYQPPKKTQAKAKPNTQKEHQQQPPRSSSNESYESETFSDNEDQELMEDYCKGGYHPVNIGDLFHDRYHVIRKLGWGHFSTVWLCWDLQAMGYVAIKIVKSAPHFAETARDEIKILKTVRETDPSNPRRHKTVQMLDDFKITGVNGTHICMVFEVLGDNLLKLIRKSNYRGIPLANVKTITRQVLEGLDYLHTCCKIIHTDIKPENVLLCVDEPHVRSLATEATQLYCMNSKMYPSLVSRAPKEYREPPITGKMSKNRKKKLKKKAKKRMELFKQQRDYLEQADGQGAINPNEVQNGDAGISDADEYFDANSVEDNVHVAAGQPSRKQREERKAPPEQSEEAQEQDPLTEGTDKAKKKKKKKNKRQQPPQLENSTSSAESSSALKSQQANGSNSTTNNKSNTNSSGTLKGQSNGKKMPLRPKQEKQGSNHQLNNNNSKPNSNSDSKISSGSVENTSSATNGPHSNSTLPTPPPPPQAKHKAKKDPALDECNVHVKIADLGNACWVDRHFTEDIQTRQYRSLEVIIGAGYNTSADIWSTACMVFELATGDYLFEPHSGESYTRDEDHLAHIIELLGPIPREILSTSGRKRMRRHSLRSLRPCSSSIRTSEPPLRSVCSTRGLDKIRCNLVVGCVPPSQQQQMEMGEL

SEQ ID NO: 14536 - DNA, 3966 bp, DROSOPHILA
tgtgctgatcgagtcgctcattatttgtgactacttggacgaaaagtatccggaggtgccattgtatcccaaggatctgcttaaaaaagcccaggagaagattttaatcgaacgtttcggacagttcatcaatgccttctactacctgttgctgcacgacaatcccgagcagctggttgacaccgatcactatgccggattggtcgtttatgaggaggaactgaagcgacgttgtaccaagttctttggtggcgacagcccaggcatgcttgactacatgatgtggccctggtgcgagcgctttgactctctgaaatacacttttgaacaaaaattcgaattgagtccggaacgttttcccactttggtgggtcctattggttttctaattatgtcttttaaattaccgagattgttctactgcagattaagtggcgcgacttgatgatccaggatcgtgctgtcaagtgtttctatctggatggacagacccatgccaaatacatgaactcccggcgatcgggccaggccgattataatatgctatagtaagatttgaagattatacatataatgtgtgactgatccatttctcgtttctagcaatgaggccaaacgtgtcaaattggggtagtctacgggatgatggcgtttccacttcagcattgtaccttttgcacatataacatgtaacacatgtacctactacggcagcattattgtgattgaaaaataaatctttgcattttcattgtttatacgggttgtaagtacgtttgttttagaattagattaatgaaggtatgaatgataaatggatatgaaaatacttatcttagagtagtcgtttgtagtctttaatatgtggtcaaacaattttcttaaatatgagcttaagaattttaaattcacccgctcaacaatcgaaatatattcgataaattcactcgtccggcgactgcgaccactttataaggtaccggaatccctctatttgttgtcagtcgatcggaactactttgccaccaacatttcacgtcttgggaattattttaaaattgttaacaaaatggccctgccgcaaaagcacttcaagaggggtgagttgggggcacttcaaggtcatcgggatagtgacgctgcaaaagttggcaattgatttcatagttttatctagaccccactttgagaggcgtaaattacgcagagatagagctttaattttagccaaagcataatggaaaactttctgctgacgtcacaaatcacccttcaacaggttcgcccaaaccggagatccccgaggatggagtcctgcgttactattcgatgagattctgcccgtactcgcagcgtgccggtttggttttggccgccaaaaagattccacatcacacggtttacattgatcttagcgagaaaccagagtggtacatcgactacagtccattgggcaaggtgccggctatccagttgccaaatctgcctggacaaccggctttggtggagtccctggtcattgccgagtacttggatgaacagtatccgggcgagggctcccttttccccaaggatccattgcaaaaggcgctagacaggattctcatcgaacgcctgtcgcccgctgtcagcgccatttaccccgtgctgttcaccaagaatccacccgctgatgccatcaagaactttgagaccgctctggatgtcttcgagcaggagatcaccaagcgcggaacaccatactttggaggcaacaagatcggcattgctgactacatgatttggccctggttcgagcgattcccggccctcaagtacactctggatgaaccctacgagttggacaagacacgctatcagaatttgttgaagtggagggatctggtggctcaggatgaggctgtcaaggccaccgctttggatgcccgaatccatgcgaagttcatgaagacccgccatgagaacaaaccggactacgatgtagccttccagcccttgtaaaggatgtattaatggatgacaggaagcaacatacttaaactaacattgtgaaaccgcttttaaaaaaatattaaacccatatataaagtagaccatcaaatgttatttctaccttttcaactgggatttgggtcagtgcttttattcctgccaattaatcaagcttacattgatcttacaggttccaccaagcccgagctgccagaagatggagttcctcgtttcttttccatggcattctgccccttcagccaccgagttcgtctgatgctggccgccaaacatattgaacatcataagatctacgtcgatttgattgagaagcctgaatggtacaaggatttcagtcctctgggcaaagtgccagccctgcagcttactggggtgaaggaccaaccgaccctcgtggagtcgctcatcatagcagagtacttggaccagcaatatccccagacgcgactctttcccacggatccgcttcagaaggcgctggacaagattctaatcgaacgttttgctccagtggtcagtgccatttatcctgtgctgacttgtaatcccaacgctccgaaagatgccataccgaacttcgagaatgccttggatgtttttgaagtggagttgggcaaaagaggaacgccctactttgccggccagcacattggaatcgtggactacatgatttggccttggttcgaacgttttcccagcatgaagatcaatacggagcaaaagtatgagctggatacaaaacgatttgagaagctggtatgtttaagtaatccaacataagatgatgcatgtatctcatcaaaaatccattacagctcaagtggcgcgatttgatgacccaggatgaggttgtgcagaagacagctttggatgtccagttgcatgctgagttccagaaatcgaagacccttggaaatccccagtacgacattgccttcaagggtacaccatagaacgacaactggtttagacaagatcaaatctttggaaccggttatggactgcatttatgttttattcattccatgcgaaaaattcaataaaccaagtgcatcaggcatccttgaccagcagattgtaattgggtcgacccaggctccgtgtacgcaggaactccgcctgaacctcggcctccatgtagaaggccatcacagccggatctcgtttcatgcgttccagccaaagggtctgaaaaatggtatactaatgtacttcatcactcctgggatacacggacctgctcaccagctgggggaagcgactctgatcgtagttataatcctctccacgctgcaacttaaggagctcgaggcgctcacaccagggccaaatcatatagtccagaatgcccgtctgctcgccaccaaagaattccgtaccacgtcgagccagctccctttcgtagatgtccaggccgctccagaagggctccagatcaccgccatcggatgccttgaagaaggcacctaacaccgctctaaatcgctcgattagtaacttgtcctgcactttcttcagcggatcacgtggatagagtggtcgcaatggatactgctcgtccagatattcacaaatcagtagcgactctgtgagcacaggtggtccaggttctcgcacgatttctagagccggcaccttgccctgtggattcttctccagcagccactccggcttgtctgtgagattaatgtagatgctgtgatacgggatctgcttggcgtccaggaccagatgcacccgttgggcaaatgggcagaagcgcatcgagtacaggcgaaggataccatcttcgggaacatccggcatgggtgagcctagtgggcgcatttattatcaattatgattatcctggtttcctggctctacccaccttttgccaaatgcctgccgttactcatgatgtgcgtgctcgggtccagagatgcaagtggtgatagcgattgtcattcgagt

SEQ ID NO: 14537 - DNA, 1473 bp, DROSOPHILA
tcagtcgatcggaactactttgccaccaacatttcacgtcttgggaattattttaaaattgttaacaaaatggccctgccgcaaaagcacttcaagaggggttcgcccaaaccggagatccccgaggatggagtcctgcgttactattcgatgagattctgcccgtactcgcagcgtgccggtttggttttggccgccaaaaagattccacatcacacggtttacattgatcttagcgagaaaccagagtggtacatcgactacagtccattgggcaaggtgccggctatccagttgccaaatctgcctggacaaccggctttggtggagtccctggtcattgccgagtacttggatgaacagtatccgggcgagggctcccttttccccaaggatccattgcaaaaggcgctagacaggattctcatcgaacgcctgtcgcccgctgtcagcgccatttaccccgtgctgttcaccaagaatccacccgctgatgccatcaagaactttgagaccgctctggatgtcttcgagcaggagatcaccaagcgcggaacaccatactttggaggcaacaagatcggcattgctgactacatgatttggccctggttcgagcgattcccggccctcaagtacactctggatgaaccctacgagttggacaagacacgctatcagaatttgttgaagtggagggatctggtggctcaggatgaggctgtcaaggccaccgctttggatgcccgaatccatgcgaagttcatgaagacccgccatgagaacaaaccggactacgatgtagccttccagcccttccaccgagttcgtctgatgctggccgccaaacatattgaacatcataagatctacgtcgatttgattgagaagcctgaatggtacaaggatttcagtcctctgggcaaagtgccagccctgcagcttactggggtgaaggaccaaccgaccctcgtggagtcgctcatcatagcagagtacttggaccagcaatatccccagacgcgactctttcccacggatccgcttcagaaggcgctggacaagattctaatcgaacgttttgctccagtggtcagtgccatttatcctgtgctgacttgtaatcccaacgctccgaaagatgccataccgaacttcgagaatgccttggatgtttttgaagtggagttgggcaaaagaggaacgccctactttgccggccagcacattggaatcgtggactacatgatttggccttggttcgaacgttttcccagcatgaagatcaatacggagcaaaagtatgagctggatacaaaacgatttgagaagctgctcaagtggcgcgatttgatgacccaggatgaggttgtgcagaagacagctttggatgtccagttgcatgctgagttccagaaatcgaagacccttggaaatccccagtacgacattgccttcaagggtacaccatag

SEQ ID NO: 14538 - protein, 467 aa, DROSOPHILA
MALPQKHFKRGSPKPEIPEDGVLRYYSMRFCPYSQRAGLVLAAKKIPHHTVYIDLSEKPEWYIDYSPLGKVPAIQLPNLPGQPALVESLVIAEYLDEQYPGEGSLFPKDPLQKALDRILIERLSPAVSAIYPVLFTKNPPADAIKNFETALDVFEQEITKRGTPYFGGNKIGIADYMIWPWFERFPALKYTLDEPYELDKTRYQNLLKWRDLVAQDEAVKATALDARIHAKFMKTRHENKPDYDVAFQPFHRVRLMLAAKHIEHHKIYVDLIEKPEWYKDFSPLGKVPALQLTGVKDQPTLVESLIIAEYLDQQYPQTRLFPTDPLQKALDKILIERFAPVVSAIYPVLTCNPNAPKDAIPNFENALDVFEVELGKRGTPYFAGQHIGIVDYMIWPWFERFPSMKINTEQKYELDTKRFEKLLKWRDLMTQDEVVQKTALDVQLHAEFQKSKTLGNPQYDIAFKGTP

SEQ ID NO: 14539 - DNA, 5695 bp, DROSOPHILA
ccgatgtggccgatttcctcgttagccgagccacctgtgatgattccaccaaaacatgccacttgctaaacgtcatgggacccgatgaagatcatccgaatgttaacgataatgtgtacaccaatgctgtgtccaaaattgcactaaactttgccgaatggttggccaaacattgtggtaatgccagcaccgaacgtttggagaaatggcgcgaggtcagcgatggtttggtgattctacgcgatgagagcctaaactatcatcccgagtatgcgggctatgtccgcgacaccattatcaagcaggcagacaccattctacttggataccccttgaatttcgataaaaggtaagattcatgcataatatagatagtatccatttaataaccccactgcttcctgctaaagctccacacacattaatgatctacggttttacgcaaatgtaacccgtgaatctggtccagcaatgacgtggtccatgttcgcagccaactatctacgaaaccttcagctaactctggcaaatgagtatttcgaacgtggctacaagagctacgtacggccggagtttaaagtatggagtgaaacgcccattggttacgatggctcggcgaacttcctaaccggcattggtggtttccttcaagctctgatcttcggttacggtggcttggatttcgggcgtactgatgacgatcaatttttgatgtttttcggtatatctttgacgccgccaaatgttgaagaagtctttatcaactctattccatacgggcagcatgctaaatgtacacttcgatttaaaagcagacactctgaaatttcgtgttacgacaggattggtaagggctttaagatggcccaaggccagaagcgaaccatccttggcagatcctttaactgtaagtacacaatgtgacattggccataatcctgattacttacttttcttcctttcagtgacccgccaaaatgaagatcctcccattgagattagctttttaagataaatccaaagtgtatttgaataaatatgaagaaaattacatatttgagccggatgcatatgttgtggtattaaacttaagtatttagtacgcggattaggaagtgtctattgcatttggttgtgtatatcttgttaattaaattgctagtctttcctgcgcccttctctacttaaatttggctattgcggagccactgacacctggtacatttttgttgttgccactgagcaccacgtaagcggtcttcgtctccttttgcttctgctgcaacatggtcagtgtgcccaagggtgtgtctgtcgaactcatggttttcattagctggaagaaacaaagttacccatttatttatgcccaacatcttagattaatgaccaactcaccccatcctgctccattttcttgagacgcttctcaatcttattcttgccgggccccttgccatggaacttatgtgacaagtagcggaaagcctctttgaggttcaatatgcggccattgtcatcgatataatccaacttgacattgggcttgaaggtctccttgtccttaaagtctgtaatcggtccaaagtggaagcgatcgcgacggccaaccttctcgtcctcactaaaaaaataccatattaacataagtttgcttgtttaactaccacaacaacatacccagccgctttatcctcaatggaatagttcttggcctgcagatgggccatttttgtgttgctaggtctgttcttttcctccttttcaaggtaacccttggacagcgccaatcgcagagcattcgctacaccagctcccacatcgggctcctcgtctagaatggcacgatcttccaggtcttcacccagattatccaaatcggcgggctgcatgacttcatcgggattgaccgaattccaggtgccgtgactcagggcaggctcatcggtatgtgtttccatatgctcctccggctgttcggtcttgtcaaagtccatcatgtcattggagtcctcattacggttgcccgccataccgtacgtgggaatgtcacccagagtgcggcaaaactcagctgtggcgttcaagacaatgttgccatcgacgccggtaaggaccacacctgatgcggtgtcctccacatgttcgggttttatctcccgctgtatactttcgaagtcgacgggcaaaggcttcttgatgatattctccttttgttttagtttgcgagccttggcaagtacacgttccaaatcatcatcctctacttccacttttatttggggtttaaactcttccatttccgcatcttcgtgatcacgataacgtccacctcgactaccaaagtctgaagaacctgatgcttcgcccatcgccaaaggcgcaagatcctcggctttaagtttctgccgaagtttcttaacctttttctttggctttttaaatctggaatttaataaacgtatttgcattaaaactgtaattcattttgtgattaaaaacatacttggccaactcttctgcactgtaagtgtccgatgctagctgcagattggtgtcctccaaggtttccaaacgcttgccggctaatttggtcttaatctccaggagcttgcgtctgtgctcccgctcctcatccatattctcaccaatcacaaagttcttgcgctttttcggctgaccttccatttcatcatcgtacttctccagcactgaacgttcgatgggattgcccaattcatcgtactgctcctcgtatacgttataaccataactgagcggattctgcttcttgttggccacattcttcttatagcgctcttcgtcgaccatgttaacattgactagagtgtcgccttcctcctcgttaagcacatcttgatccttaagagttagaataacagtgcgtccttcgccgaaatcatccatatcatgatccacacgcaggccctttagattgctatcgccatatgctcgctgacgagctttggttttctcttgctcgagaatctccgaaacaccaaaggcctcatccagttcctccaactctttggcctaaggaaaggaaaggttttttacaacaatataaagggtgaaagactaattacataccttacgcatcgcctcctcgcgttcgttgacaacccgcttgttcttgtccacccacttggacacattgtcagtttcctcatcagactctcccagtgttttgatgcgagccaggcgctcctctaagaatcgtttctccttgcgctgtttgagtttctcgcgcagcttctctgcctcccttttctcctttagattgtcggccggcttgtgcaagaactcgccccactcatccttgtacgaggagagatcggcctcgccatggggttttttgatctcgccttgactactgcttccaggcggagggcctgccttgctgggaccactatcaacttcgagtggcttcagacccagcttggcgcgaagtttgttcgtctccgtaatggacaggacatcgccggctccgttttctggtattggcgagaaggaacgagacgatggttcgcgttccttagtggctggtttacgcgacgacgatgctggcgactgggatcgggaccgttccctattacgttccctttcacgttctctgccagatcgcttgcgggcgtcccgttcccgttcgatctcacgctctcgcctagactcatattcggcatgcttggagatttggggtggtggaggagctgtgagctcccgtacacgttcgcgttcccgctccctctcgcgctccctaaggcgttctttctcgcgttctctgatacgttccttctcacgctctctctcgcgctcctcccgctccctgagacgctccttctcacgctcccgttcgcgctccttttcccgatcccgatccctctcccgctcacgatctcgttctcgctccctttctcttaggagttcacgatcgcgtccagaatcccgctccttgtcacgattggacgattctctggcgtccctcaacttggcctgcgcctgcacctgcgcctgtaccggcacctccacgcagtcggaacctggaaatagggaacaccggttagaactgtctaatcatcacagctggcgaatcgtttcaaccacatctccgctttcccactcacaatctgcatcagcagcgggatacctgaaaaaaaggagaaacatggagaaacgcaacggtggttttagtacgttcggaaatggtaaagtgcagcaccaagacaattgccgggcaatgggcggtccgtcaatcagaatatcgcttttccgccggatcccccgcctacggcaatcgcccttgagcctggcctgcactttgtgtgtgaaatatagggcaaacacttactatccgagtccgattcctctagggagatgacctcgttcgcgcgctcgcgctccttttgcttgtggtgcttgtggcggtgctccttgtgcttcttgtgcttgtggtgtctgtgccgcgacgaggagtcgtcggtgagatccagtgtgacatcctcgtcctctgtgacgcgccgcggtcgctccgacgatcgcgagcgatgacggttcttcttgtccttcttgtgtttctttcccgacgacgaggaacccatatttattattattttcacaacaaaatacagaaaatttcacaagaaaaagacgccggtgtgaccgcagttcgggaagcggaaatataccaggtgtgccacggtaaaattaaatgccaatcacagtgatgcgcgcacaaagccaccgaaattgtttaagatattaaaactgaatgtaattattaaattatcacgcaatgtagtacttcggaactttttatttgttaaaaggacctttttatttagaattcgttttgttaaaattacctttttgaatgactaaacttacaccgcctactcttcttcttattttttgttttgccattcaccacgaacttaataacaacttaacacgcggagatctccacataaacaatggaaattaaagtacgtaaacaaattatttgcgacctaaaacttatttcattttgatccccgtagaagtccaagaaatcaaagaacgacaagaagtccaaggcgcccaaggagtcgtccgtttcgctcaaactgaacgctttgcatcgcaagcaaaaggaagtcgcccgcgtgctcactttaaaacaagaaatattactgaaatcgggtgtatcctatctggaatattatgagattctggcagaaatcgaacgactcaacggcctaaaggagtcatttatgcgccgcgctgataagctgaagcaacaggacaaatagttgataagttggtttggtttagaaactatataagagtaaagaaatctgtagcagttatatttcggaatgttttgtacatacatacatgtaatcttttttgtaattaacttttatttacttaaaagctttcaataacatgatgaataaagtagaaagttatatatatagtcaaagctgatcataactaaatgcacgttgaaaattagtcaactcaatcgaagtgataaagatttcatacggattatactgttaggtatacattttgattacttttgttttgcttaattaatttggcactcctttgtgtgtgaagatcaagctgccttaaaaagttttagtttaattgaaggcacttagaaaataagaactataattatttggcatac

SEQ ID NO: 14540 - DNA, 3151 bp, DROSOPHILA
cttcccgaactgcggtcacaccggcgtctttttcttgtgaaattttctgtattttgttgtgaaaataataataaatatgggttcctcgtcgtcgggaaagaaacacaagaaggacaagaagaaccgtcatcgctcgcgatcgtcggagcgaccgcggcgcgtcacagaggacgaggatgtcacactggatctcaccgacgactcctcgtcgcggcacagacaccacaagcacaagaagcacaaggagcaccgccacaagcaccacaagcaaaaggagcgcgagcgcgcgaacgaggtcatctccctagaggaatcggactcggatagttccgactgcgtggaggtgccggtacaggcgcaggtgcaggcgcaggccaagttgagggacgccagagaatcgtccaatcgtgacaaggagcgggattctggacgcgatcgtgaactcctaagagaaagggagcgagaacgagatcgtgagcgggagagggatcgggatcgggaaaaggagcgcgaacgggagcgtgagaaggagcgtctcagggagcgggaggagcgcgagagagagcgtgagaaggaacgtatcagagaacgcgagaaagaacgccttagggagcgcgagagggagcgggaacgcgaacgtgtacgggagctcacagctcctccaccaccccaaatctccaagcatgccgaatatgagtctaggcgagagcgtgagatcgaacgggaacgggacgcccgcaagcgatctggcagagaacgtgaaagggaacgtaatagggaacggtcccgatcccagtcgccagcatcgtcgtcgcgtaaaccagccactaaggaacgcgaaccatcgtctcgttccttctcgccaataccagaaaacggagccggcgatgtcctgtccattacggagacgaacaaacttcgcgccaagctgggtctgaagccactcgaagttgatagtggtcccagcaaggcaggccctccgcctggaagcagtagtcaaggcgagatcaaaaaaccccatggcgaggccgatctctcctcgtacaaggatgagtggggcgagttcttgcacaagccggccgacaatctaaaggagaaaagggaggcagagaagctgcgcgagaaactcaaacagcgcaaggagaaacgattcttagaggagcgcctggctcgcatcaaaacactgggagagtctgatgaggaaactgacaatgtgtccaagtgggtggacaagaacaagcgggttgtcaacgaacgcgaggaggcgatgcgtaaggccaaagagttggaggaactggatgaggcctttggtgtttcggagattctcgagcaagagaaaaccaaagctcgtcagcgagcatatggcgatagcaatctaaagggcctgcgtgtggatcatgatatggatgatttcggcgaaggacgcactgttattctaactcttaaggatcaagatgtgcttaacgaggaggaaggcgacactctagtcaatgttaacatggtcgacgaagagcgctataagaagaatgtggccaacaagaagcagaatccgctcagttatggttataacgtatacgaggagcagtacgatgaattgggcaatcccatcgaacgttcagtgctggagaagtacgatgatgaaatggaaggtcagccgaaaaagcgcaagaactttgtgattggtgagaatatggatgaggagcgggagcacagacgcaagctcctggagattaagaccaaattagccggcaagcgtttggaaaccttggaggacaccaatctgcagctagcatcggacacttacagtgcagaagagttggccaaatttaaaaagccaaagaaaaaggttaagaaacttcggcagaaacttaaagccgaggatcttgcgcctttggcgatgggcgaagcatcaggttcttcagactttggtagtcgaggtggacgttatcgtgatcacgaagatgcggaaatggaagagtttaaaccccaaataaaagtggaagtagaggatgatgatttggaacgtgtacttgccaaggctcgcaaactaaaacaaaaggagaatatcatcaagaagcctttgcccgtcgacttcgaaagtatacagcgggagataaaacccgaacatgtggaggacaccgcatcaggtgtggtccttaccggcgtcgatggcaacattgtcttgaacgccacagctgagttttgccgcactctgggtgacattcccacgtacggtatggcgggcaaccgtaatgaggactccaatgacatgatggactttgacaagaccgaacagccggaggagcatatggaaacacataccgatgagcctgccctgagtcacggcacctggaattcggtcaatcccgatgaagtcatgcagcccgccgatttggataatctgggtgaagacctggaagatcgtgccattctagacgaggagcccgatgtgggagctggtgtagcgaatgctctgcgattggcgctgtccaagggttaccttgaaaaggaggaaaagaacagacctagcaacacaaaaatggcccatctgcaggccaagaactattccattgaggataaagcggctggtgaggacgagaaggttggccgtcgcgatcgcttccactttggaccgattacagactttaaggacaaggagaccttcaagcccaatgtcaagttggattatatcgatgacaatggccgcatattgaacctcaaagaggctttccgctacttgtcacataagttccatggcaaggggcccggcaagaataagattgagaagcgtctcaagaaaatggagcaggatgggctaatgaaaaccatgagttcgacagacacacccttgggcacactgaccatgttgcagcagaagcaaaaggagacgaagaccgcttacgtggtgctcagtggcaacaacaaaaatgtaccaggtgtcagtggctccgcaatagccaaatttaagtagagaagggcgcaggaaagactagcaatttaattaacaagatatacacaaccaaatgcaatagacacttcctaatccgcgtactaaatacttaagtttaataccacaacatatgcatccggctcaaatatgtaattttcttcatatttattcaaatacactttggatttatcttaaaaagct

SEQ ID NO: 14541 - protein, 964 aa, DROSOPHILA
MGSSSSGKKHKKDKKNRHRSRSSERPRRVTEDEDVTLDLTDDSSSRHRHHKHKKHKEHRHKHHKQKERERANEVISLEESDSDSSDCVEVPVQAQVQAQAKLRDARESSNRDKERDSGRDRELLRERERERDRERERDRDREKEREREREKERLREREEREREREKERIREREKERLRERERERERERVRELTAPPPPQISKHAEYESRREREIERERDARKRSGRERERERNRERSRSQSPASSSRKPATKEREPSSRSFSPIPENGAGDVLSITETNKLRAKLGLKPLEVDSGPSKAGPPPGSSSQGEIKKPHGEADLSSYKDEWGEFLHKPADNLKEKREAEKLREKLKQRKEKRFLEERLARIKTLGESDEETDNVSKWVDKNKRVVNEREEAMRKAKELEELDEAFGVSEILEQEKTKARQRAYGDSNLKGLRVDHDMDDFGEGRTVILTLKDQDVLNEEEGDTLVNVNMVDEERYKKNVANKKQNPLSYGYNVYEEQYDELGNPIERSVLEKYDDEMEGQPKKRKNFVIGENMDEEREHRRKLLEIKTKLAGKRLETLEDTNLQLASDTYSAEELAKFKKPKKKVKKLRQKLKAEDLAPLAMGEASGSSDFGSRGGRYRDHEDAEMEEFKPQIKVEVEDDDLERVLAKARKLKQKENIIKKPLPVDFESIQREIKPEHVEDTASGVVLTGVDGNIVLNATAEFCRTLGDIPTYGMAGNRNEDSNDMMDFDKTEQPEEHMETHTDEPALSHGTWNSVNPDEVMQPADLDNLGEDLEDRAILDEEPDVGAGVANALRLALSKGYLEKEEKNRPSNTKMAHLQAKNYSIEDKAAGEDEKVGRRDRFHFGPITDFKDKETFKPNVKLDYIDDNGRILNLKEAFRYLSHKFHGKGPGKNKIEKRLKKMEQDGLMKTMSSTDTPLGTLTMLQQKQKETKTAYVVLSGNNKNVPGVSGSAIAKFK

SEQ ID NO: 14542 - DNA, 4276 bp, DROSOPHILA
ggaacaccagtactgaaattaaacggaacacctatacaaaacaactgtgaatccgcatgtctgtacttctttccaaatctgcagttatgcgtaggtagacgccgccatatggcggcgtgagtgggaacgagagggcgccaccaccgtctgagtcacagacttcagttagtttgtgttgttgctgctttttggggcaatcgcggagttattgacctttgacagtgatgtacacatgccccgcaccaataccgttaccgtcattggacattttggaggtcatgcgcagtggaacacgattttctgcacgttgcagttcgacttgccccagtttctcacgttggcttcgccctaacctcaaccatgctaatgaaatgcgccgctctcgctggaatttgggattctataatctaattccaggtcaagcaatacgtacgtctttatctgcttgaagggcggggctctgcgccccaggtgctatttccatttcagcgaaacgtgtcgacctgttgccgttcgtcgcgtgagagatgcgcacagtggacactcgttagggcgaacggcgatattgtctgatgttcgaaaacaatttttttgaaaagcacaatatattttcctaaaattgtaaagaatattttattcaagtatttgaatctagttgaaatagaaccattttcgggataaaaagctaaaagtttttcttcgctattctcatacattgttgaatttaatggtttttaatatacatacatatgtgtctatttatgtacctttccattcttatgaagcgttgttgaaatggagtattgttccaagaaaactttttaacaataaggagaacaacaagctatacaattctggtttattttgtggtctttcaaattaaattatatttttgtaaagaagtagtaaactgggcagttcaatagcagattattttcaatgggaatcttttgtaaataattgaaataggttaatctaatcgaatatgttaattggttatttgtttgtacccaacaaaaaacgaatgataagtacccatccaaccggaattaaaacttctttcagttcggtttacgtataaaaatgctaataacaaattaaattttatttcgttcataattttgatgcttcaaactgtggcaaaaacgattcaccaaatgcacttccaccgcacggcggaatgtccatggaaatgtcagtcagaattagttgctattttctggttttgttcatgctgaattttaaaaaatctttaaatatttatatttacctttgcacaaaatctttcgcttagcttacaattacactaatgctcctcgatatggactattgcataagttatgccatgctttcagtatgtatagaattggaatgaatgccgaacgcatttcaacaaatacaaacgttaataagttaacaaaaattcggaaagtacaactgaaaatcaaacactttcttttacttagctcttggaggggacattcggaagtgatgggcggggtattgtggcgccgtagtatactaaaatttcataatgtttgagtcgcactgcccacaaacattcaacatgcgctgataactatacagatcattgtacaaggacaccggtgggtcgatcccattggcatcaaacataatccaactgtatgtagatctgcttgacgcccaccgcctcaaagatcatccgtgtgtgcgtcaccacgtacttgggatcgacgttcttggacacctccagcttgagtgcgcccacatagacatcggagcaaagggtccagaagtgcggctcctgcacagcgtaaacgccagccaggccggtgactttctgatagcactgcggcagcgatcggtccaggtcggcgggttgtcgctgcatcaggatcatgatcgactccttgatcagactcagcacactgagcgctatcagcaaggctatgaagatggagcaaatggggtccgctatcatccagccgaacatgtgcatcagcaccgccgagatgatcacgcccaccgaacccaaagtgtccgccaggatgtgcaggaagacgccgcgcatgatctgcgagttgctgcccgacatgtcgccgtgcgagtggccatggctgtcgtgatcgtgtgagtgtccatggcctagaaatgggcggatttaaaaaggggttattagaatattgtcccattcctagtcaatataataagatataatctccaactgcagttaccattgtccaaggtgatggcttggtgattgtgattgccggcgtccgtgtggccgtgcgagtgcccgtgcccatgaccaccaccgtgggagtgtccgtgtccaccgtgcgagtgtccatgtccgccgtgattgaaggcatagatgcccaccaggttcaccagcagtcccagcacggagacgacaaacagacgctcgtgcttgacctccggcggttcgataagtcgctccacgccctccgacagaatgaagaaggctatgaacaacaggaacaggctattcacgaagccggccagcacctcggcgcgcacatagccgtaggagaacttgtcgttggccttccacttggtgataaccgacgcggccagtcccgccaagaggccagtgcagtcgaagaacatgtggaatgagtcggagatcaggcctgcggattaaccatcaagtaggttataaactgcggataagataaaaagccattagtggccaagtacgcacccaaactgttcgtcacaatgccgtagaagagctccacgaaggcgaagctcaggttgagcagcagaaagaggaacagattccgggagttgcggtcggagaagatgagtcgtttccagctgttgagcttctcccggatccggtagcccagactgctccggtccttgtgcgacagcggtatcatcttgccggttatggatctgcaaaagagcacgagaccaacatgagatctaagcacctaactaagaaagcacactttgtttgcatacgtggtattatcggttggctatagccgcgctccagctgattccgtgattcccactccgcttctggccgggttcgcgagaatctttatcggcaacggcggcggcggcaggtctcttttctttgattcccaaattatctcacaagcaaaatgcttcctgcgcgacttcgtcgtcgtcgtcgtcttgtgtgcgcagttgtgcggcgcgggctcgtcgatctgcgattcagctgcagcttaattcatttttactgggtaccagataccagaaccgaactcccgtctttgccagcaccaaaccaatctgccgtgttgtcatcaaaataatggtaaccacgtaaacatttcgtccgaacgaaagcagcgcttcgttgtgaatggcaaatggccacagtaagtgcaccactgaaagtttgttgggtattcattttactggtcgctttttagttagatcttccggcattttgtttgaaaagtataaattctaaggaagtttgatttattgcggtcttttgattattattatttttcactttaatcatgtattaagaattgccagtttctaatttttataccttattgaatgaaactttaataaacttcaatggcttttcttttgacttcattttgtcgtcaattatgaagttacaattgagtactcactgtcacgtgaaaactgagagggtgaatggcttgagagcaagaagaagattagtactaattcttattgggaattcgttatttttttataaacaaatattatttaatataagtgaaaataaccaaattcttgctgatgtgaattacagcaaatgaatcatgattttactgtttgtattcaaatgataaccattcaaagtgctaaattcaactaaaaaatacatttcagcggctgttttaaaaatagttcctcattgataacaaacttgaaagacattaatgaaatgttcactttcttagaagtatttttgattaaacgcacattgcaatgaataataattgctattataagaattcttgatatcctgatttgcaaatatattgcacgtcagctgttcgatttgtaagaacaatagtttttgggctatatgatattttacattcccagccgtataactccggctcgacatcttgaaaccagcgctcagtgatacatccctctataagagggtatatctttatatcaattaaacatcacgcaaatgtcccttacatcaataagaaagcaagtttattcaacgttacacacacagcggcatcgtagtgctatcgatacagagttctattgtaaggcgagtgcgactacg

SEQ ID NO: 14543 - DNA, 2047 bp, DROSOPHILA
cagattggtttggtgctggcaaagacgggagttcggttctggtatctggtacccagtaaaaatgaattaagctgcagctgaatcgcagatcgacgagcccgcgccgcacaactgcgcacacaagacgacgacgacgacgaagtcgcgcaggaagcattttgcttgtgagataatttgggaatcaaagaaaagagacctgccgccgccgccgttgccgataaagattctcgcgaacccggccagaagcggagtgggaatcacggaatcagctggagcgcggctatagccaaccgataataccacatccataaccggcaagatgataccgctgtcgcacaaggaccggagcagtctgggctaccggatccgggagaagctcaacagctggaaacgactcatcttctccgaccgcaactcccggaatctgttcctctttctgctgctcaacctgagcttcgccttcgtggagctcttctacggcattgtgacgaacagtttgggcctgatctccgactcattccacatgttcttcgactgcactggcctcttggcgggactggccgcgtcggttatcaccaagtggaaggccaacgacaagttctcctacggctatgtgcgcgccgaggtgctggccggcttcgtgaatagcctgttcctgttgttcatagccttcttcattctgtcggagggcgtggagcgacttatcgaaccgccggaggtcaagcacgagcgtctgtttgtcgtctccgtgctgggactgctggtgaacctggtgggcatctatgccttcaatcacggcggacatggacactcgcacggtggacacggacactcccacggtggtggtcatgggcacgggcactcgcacggccacacggacgccggcaatcacaatcaccaagccatcaccttggacaatggccatggacactcacacgatcacgacagccatggccactcgcacggcgacatgtcgggcagcaactcgcagatcatgcgcggcgtcttcctgcacatcctggcggacactttgggttcggtgggcgtgatcatctcggcggtgctgatgcacatgttcggctggatgatagcggaccccatttgctccatcttcatagccttgctgatagcgctcagtgtgctgagtctgatcaaggagtcgatcatgatcctgatgcagcgacaacccgccgacctggaccgatcgctgccgcagtgctatcagaaagtcaccggcctggctggcgtttacgctgtgcaggagccgcacttctggaccctttgctccgatgtctatgtgggcgcactcaagctggaggtgtccaagaacgtcgatcccaagtacgtggtgacgcacacacggatgatctttgaggcggtgggcgtcaagcagatctacatacagttggattatgtttgatgccaatgggatcgacccaccggtgtccttgtacaatgatctgtatagttatcagcgcatgttgaatgtttgtgggcagtgcgactcaaacattatgaaattttagtatactacggcgccacaataccccgcccatcacttccgaatgtcccctccaagagctaagtaaaagaaagtgtttgattttcagttgtactttccgaatttttgttaacttattaacgtttgtatttgttgaaatgcgttcggcattcattccaattctatacatactgaaagcatggcataacttatgcaatagtccatatcgaggagcattagtgtaattgtaagctaagcgaaagattttgtgcaaaggtaaatataaatatttaaagattttttaaaattcagcatgaacaaaaccagaaaatagcaactaattctgactgacatttccatggacattccgccgtgcggtggaagtgcatttggtgaatcgtttttgccacagtttgaagcatcaaaattatgaacgaaataaaatttaatttgttattagcatttttatacgtaaaccgaactgaaagaagttttaattccggttggatgggtacttatcattcgttttttgttgggtacaaacaa

SEQ ID NO: 14544 - protein, 366 aa, DROSOPHILA
MIPLSHKDRSSLGYRIREKLNSWKRLIFSDRNSRNLFLFLLLNLSFAFVELFYGIVTNSLGLISDSFHMFFDCTGLLAGLAASVITKWKANDKFSYGYVRAEVLAGFVNSLFLLFIAFFILSEGVERLIEPPEVKHERLFVVSVLGLLVNLVGIYAFNHGGHGHSHGGHGHSHGGGHGHGHSHGHTDAGNHNHQAITLDNGHGHSHDHDSHGHSHGDMSGSNSQIMRGVFLHILADTLGSVGVIISAVLMHMFGWMIADPICSIFIALLIALSVLSLIKESIMILMQRQPADLDRSLPQCYQKVTGLAGVYAVQEPHFWTLCSDVYVGALKLEVSKNVDPKYVVTHTRMIFEAVGVKQIYIQLDYV

SEQ ID NO: 14545 - DNA, 23044 bp, DROSOPHILA
acatttctgctgtatttccatagtgttagacatatatccatttagatattcgatatttggtatcttgtttcatatagagaaagtccgtttcgaagctttacatgcatgtggttttgaacaatatcttaggattagcataagtatgttatcatatagtgttgtatcgtaattagtatatttatatgataagttggcattttgttgcatggcatctttactcagggtttcatttttaaaggcgatggaattgatctatttcatgactatggctctaaaagtgaatctttgggcaaagagcgtttcaggattggaacaatttgtcttggttttaaagcttaagttattagttgttagttatttagttagttaggtttcgaaagaatacaatgataacagatggagaagggaatacgtatcgaaacaagtcataatgtatatatatagctatagcaccttgaaagaacattagatagttcgtagcgttgttggttaactttaggtttttgtttagaggttaaataaccaatttgcctatgttgcgaaattgggtgaaaattttagccttaaaacggcgtcaatctgcacctcgtaatctcccctcgggtgaaaaaaatacaaggacgagtgcgtgtccaacattaactggatgcatcaccaccctccagcttgacattgtcacgttcaggtggcggatgcatttgcatttgcatttgcattcacctgcattagtggcgtccaccctcgggctgatgtaagtgcctcttgattgattgattgatgcttgcgggggatattcatagcacaagtgcggggagttgggcgcggaatgcagccgcccacttttagggtgtactgtcacaatgattaacaacaattatctacagattgtagccacacatatgtttttacttaggtagtctcaaataaatgtggtatccttaaaaatagctacatttatttcgattttaattggtaattaaataaagtacgttatgcaaatacacatagaaaatataaatacatatatagtataatataaaatcgatgtactgatcttgttgttatcatttcttaattttttactttaagtggctcgattctgtgttgcaaattgtttgactggataaatttccgttttggtttgattttgggggaaatatatactctcaatatcttaacgtacgataaacatttatttaagatttgaacatttatattagatttattttataccaatagcttcgtttcggtttgaatctctcaggattcatccccgattccaatatccttttatttttttgtttatttgctgccccttttaatgcagctctaaagtaaacaattgccttgaagcccattttggcctcatttctggatttcccgcgttcgggtgacaaaaatagagttggctaaaatctctttttggtatgttctcgaacatccggcttactcctcgtcgtcgggcgatattttggccagtgttagcagaatcatggtcagttctttccgggagatctttccatgcttgtcggtgccaactccccgcatgatggtctcctcgaaagcggccagatcctgggcatcatagtcgtcctggcaaccacacaatattaacattttatttcatttgtctttaagagcgacactcaccttcttgaccaactccaaaaggtccttcaagaagcctttgagctcctcattttcaatggtgccgctattgtcctgtaatgatatcatattagattttacatctttatatatattccttagtcttttgctttacttacacgatcgtagagtgagaatactttttcaatatcctctttggtcaactttgtggcgccctgtggatataaattgcaatcctcaatataatattatccaacaagttttgtttatatgcatgttccacataaaatagtatttataaataagatttagcatactttttcctacataaataaaagtgtttggataacgtacaaaaggaataaactaaatttaattacgaagtatgctaaatccataaacaaatgtgtgtagcaaaacagttttttttaagatttgcttagactatcttgaaattttccaaatgggttaccctttaatatcataggcctaaactacgggtcaagttgtattggttggtgcgattttggttttgattagttaagtataaaggtatgagctcatgcaagatacagctaattataatgaaaacatgctcttagaaatgcaatgggaaatgggacaaatttgtcttaggaaaatcctaagagattaataaacatgctacgtatgtataaaaaacttgtataccaaattccacactcattcattaagcttaacgtaaaagcctaattatcctaaataaaacatactgccgtttaatatatgtgttctctgccgttgacactcgctaattaatatgaattattgcccaggtagagcagatttgtcattaccattcactgcgctcattcgggatttttccggatgtgttttccacgagggaacacgaaatttatcgattccatttgcgcccggcaaattgcacgaattactttgcccccatatataaacctcctttcacatacatgaatttaccccccacatatactcatgcagtttggaattttgggggttatgcaatgtggccaaggtggcgcctcaagttcactacacgtatgaaaaaaatatggcaacatagtgaaatttcaatttaaattttaaaaaatgagccgatagtaagttgcttaattatacaagagaaaacatttaaatctcgtaaaatgttgcctaaaatatgcatcagggatgaatcgtttaatataatgtactatgattttattttaaaatttcgcgaaatatttttaccagtgaacttacggtgcgaaaaattgaaaagctgcgaggtgaaacttaaggttttgttttctttatccttggtaaagtctgataacatttgttttactggcgccaagaaaacgcagcgggcgcactgttatttcttaccgggattagaaacccattaactggttacccttttccgcttaagctttaaaaaaaaatgtgcttagcacggcattataaattgcgatcctatttccacttggcggtagcaaagctgctgaaattgaatttcacacgaacgcaaaacgtatatatcgcattttgctgggtttttactttcactttcgtcgcctggctctttgtcaaattgcccagactcaagtcgatgttcgccttgaacgtgagatgtgatgttatgtgatgtggcccccatgccaacacattgatgaaatgaagtaattattttacacttcaacactttgaaaagccggtggcagagagcgtgtcagcctgcggctgacattatccatatggcacttccacaaaatatatccattcccccagctcgccagcctctgcagccaccgaactgaatgactaaattatgcaaaaggttcccatggaggaggaggaggaggaattccacatcaacgtgtaatttgcgtggacctcacatcgttagggccaaagctgttcacgtactgggtagccgggatgtgttaagtggcaaatggggtggaccaatgccatcaaaagtctaattagtagctcgtagatatcattttcttgtttcgagttggcttgtggctttcggctaggaccctaaaaacggcaaattgcaaatgactctaacttttactggcagcaagtttagttgttcatcgttaatagaggtgtaagctttcattagttactgcaacaaaaggaataaatttgaagaattgtctaaaaacttggacgcaaaactagcaaaatgcatttaaaaatttaaaaattcattgcatacgtttgaaagtatctcttaggtgtcttaaaaaacctcataaatatgtacataacactctttgtcactatttgactccattattttcactttgttaagtttatttgaatatatacactatgcttataaattgaattgaaagatttatgtatatcattcacacagcaaaaagaatattttaattctcacaaaatagagcatgcatttttttatgtacatgaatttttcaggaaattttaaaacagtaggtattggttgttttattttaataaaattaaattgttacgtactcgtcaaaacaaaaaatgattgtttaaacaagtgttatccaaagctcaaaatgatacacttttattaagagtttaaatgggccaccagtgttattgtaatcactattttacgcacatgagttaatattttttgttgggcttttcttttattttttggttgtttgaatgtttgatgatggggtgaaaaatacttacgtcaatgccctccttcagtgtgtggtttaaatatatatatatatatatgtatatatacgttttttatgttatttatttcatttcatttgtatcggttttgtttgcagtaatgcaaatagtttgtgtattgttttacgaaatattttggtttgtttttattgttggcagtgcaattggttgcagattgttgtatgcaaatttttgtatatacagcagatggcaagagttttgatttgcggtaattgttttgttatttcagagttgattttcaaattgcatttgtgagataagtcggaagttgaaggtggcagcccaaaatgttatacaccacgtgcacggtatagttaattcggtaattgattatttttagtttggttattgttaggttgtttgttttgaaataaaaatgcacaagattatagaagtatatgcaaagatatatagtatattatgttgatagtatacagatggcatagaggaggttggcgggggggaaacgaaaaagatatatagaaagttagaaaagtcataaactaaagcaatttaagtctgttgaaggctaattaaaataggcaaattttaaaaagtttcttttaattatttgccagctttgattaacttatctttttaatgttgtatacatgattttagtctaaaattttaattattattgtagtaagctaaaggatctaagatctggatgcagtaaaactaaaagtgagaaatattaagtatacgcttagttgaacgtaagctagtcaaatgcattaccaattgtggagcaaacgattttagctttcttagttaattgctcaaaattgtttctaattgcaagttgaaaaattaagttacaagaaaaactgaaaaactgaaaaattgtctgtgccgcaatgtcacgtattcacttagtcgagtccttgggttcatatagacgtgttttttgttgttgttttttttttttacccgtctgaaaaataagacgcccgacaaaacgctaagtgtaccgggctatttttcacaatgtcctgctgcttcgtgtccttagatgtctgtccgccaccctttttccgccctttcctgtccacacctattgccatttgcagtggcttttcccgttgcagcacattatgtcactgctcgttgcggtgcatgcggcgtatacgtgatgtgcattagcataacgctttctggcacttttggccaccagccagcaatacactgcgccacataattggacgcccggagacagaagtttctgggagttatgcagcttctcgaaaaagttgggcgtcattgcatacgtatgtgtgtatagctgagcagctggcccactccggttatcaaaatgctgatgcatgctttggcttttatggcccccgaagaaattatgttgaaaagtaataactgcaccttgggtaaatgtgctggaaatgcctattttatggctgccagaagccgcagcttccagccttttttatggcacttcataacggccgacttacgatggcgaaagtacggtaagtacagacgcgtatctttggtggtcaggtgcctgggcatccggatgccttaggattcagtggcttggaactgagtgacagcaaccatgtccgcgccgtggcgttttcgattaaaatccaacttgtctcgctacattgttatgcatgactccgaacgactggtgctcactcccttgcccaacattgcccaccatcctaccatcaataaaaaccaaataaaatgtcgtttgtgctgcgagctgtaacaatgagcaaatatgcggcatgcaacccatgagcaccgagcactgggcattgttcgttgtgcaatcctgcggcttcttctgctcctcgctcggactgccgctccacatggctgcacatcgctacatggctcacggtcgtccccactcctgctccagatcctcctacttttcgcctggcaaagaggacgtccctccgcgcacaacacaaatatctcgttgaaggaacatgcgagttgcatttgaatttacaccagcagcttgccattttagattggaaagcgtgaaggatgtaagctgacatcaagatgacttcaatatgtttattttggatgggacagtagtgaaaaaagtattggcttgtcaaaatgtttgcattaaatttgctgagccaaaatgtagtaggtggtttgatgaaatttaaaactctttatttaggctgtgagtgaaataaatttggagaagcctttataaaacatataaaggatatattaaatcaagccaagcacgtatgtctctcacaacaaaggcaccaaacttttcctgccatatttgcgtttcaaattcaaagtacacttgttatattggaaatgtattttttctctcttttcgctgcgaaagttgcaataattagctttgaaatattagaattaaactgtagtgggtgtttttgtgcgtttccacagcgtcagcaaagccaattttcgatagaaacatctacaagttttccatttcgttttcaacaacgcgtgggattcccaccaagcagccaacaaaagggatttagtgcaatgggaatccgattgcaattgaaaaccaatacaaagtgagttcaggctgaatgcaacacttttgattttgagaacactgttggaggcgccacccacatctcccccccccaaaatttgcccgaaaaatgccgcttcgatagctaacacatccaacttttcggcaactactgccaatgagcaatgagaatgagcgtcaatgcgactgaggcacgtacatttgcagcaaataacaataagagctctcaatgccccttcaattccactatccccccccctcagatcattttgctgtgcatctaacccacttgattgccaagaacaacaccgacaaccgaatggaggtggttttcctttgggtggatagaccatggattgcatacatacatatgtggcgatgtgtggttcatgtggcaaacagcaaaaaggaaacccaaacacgaggacgaacacgagaagaggaaaaaaatgtgttcgatcaggacgtgggaaacgcgactcgggaaatttcgaaggggctggctcagcaaattgggagttttcaaggctgcaggtccaacatttatttccgcctgcccttagttagtagtattatttatgtacagtcgagctttctttccgcacactatacacatttaatgcttaaattgatgagagcactttggttttaaataagttttgttaagaagttttaaataatgtttggaaactgctgatagagaaccaaggcctccatatacttggaacatgtttcagccagaatttcttaagcagctgctgctttgagcaaacaaaacgtttatttttggtatttggatggcccgattccttgccagaatgcttaaaatgcgcaaacgaaaaacatgctcgaaatatatgttctttttggccaagttttggcctgcgggaagctacgtgacattcgtaggcagcctcaattgcaatgacagtgcttcatttaaccgcatttggcatcatcagcatttgggccaagtcgaaatgggttcgtagaatttcccaggggaattttaagccccaacatctggcagcggcggcggcggcggcgttcgtggccaaaaagtttgttttcccaacaccacatggcttttcttctgctaattgttcggctgggcatctcttcgaggcaaactaatattaaagtatttaatggccagccatttggggactttccaccttctgtttgtgcagtgattgctgtttagcttccccttttttacagccccattcaaatcgcatcaaatctgttgacgcttcagcaaaaactgggggaaaaaaggaagctgttgccttcggaaattgattccaccaactcccacgcattttttttgcaaaaaaaaaaagaaagaaaagaaatgggagtgggtggaaagcacctgccagtttcagctgagctttgccattttgcttcgtttatttttacgatttcagacaatatttcttgctattttttgttttccttttcggcggaatagctatttgtgtttggccatggctttatttgttgcgacgcaaacaaaattggcttgaatatatatatttttttttatggccacaacaattcaatgttgcattcagtgtcgaatgcgaaagcaagaataaatagtggcattgtccttttttgtcaaaaaattgtatttgctgatctgtcgagcgagaatgaaaagcctttaaaaggatttagaatcgctgttgattcgggattctattcagaaaagcataacactttcccttccgatccatttatttttgaaagtttgtttggaccatggaattttatgattgtaagcattgcaatgtatttaaccaattaatgtttgttcatgggtgaaaactaaatttggtaattgatttttataataattgatgaacaatatgattttatttagttattgatggttggttggctaattctctgcatggaaatttaactacaaacctgctgttgtatattgtttttaatgccctataaatatgatattgaccattttctaataatataaattcgttgatttcttaaagattagttcccaagtcggcacagacatcgtttgaaatgataggtaaacaaaagaaaagacaaaaccaatatgcattgctgtttgagttagttgcaaagctaagttagttgaatagtcaaggctgcagctagtgataaaccaaaagtccaggctaacctaggtgctaaacgtgttttgttcaaggcaagccgagtttgatttggtttcataaacaagttcttaataaataaatgtttggaaaaccgcgatttgctgatagtatctgctcttggcaatttcctcgaatgaacgatgttttcacacaatttatctttggcacttaccttaaacacttggcggcacaggaagttctctttaaccggaagcaatctgcaataaataagttagttggctggctgctgcatagaatttcagaacgcgacttcaaggacacttacttggccatttccgacaactgcagacgtccgtccttgttggcatcgaatacttggagctgaaaggaatcgagacgggattggtaattgggcatacattatcgtgtgcttatagcaaatcggcattatttacacttttgtgtagaaagtgcatagtcagtcggtcaataatcacagcagtttagaatctaagcatgctattgaatcgtttttggtttggcattctatgtataatcattagggaattttgaacaagaagtttatttcttgaaaaggatattgaggccttaagaaactcttagataaatagtaagtattcatgtattcataaattatcgttcactttagtttagctcttatcctctatctactaatgaatttcctaagcaaaccaaagtaatgtcatgcatttatgtctgacaacttaccatagtatcggtgtactcaatgagcttgtcctcggacacgtcgttgatctttttggcctctttgagcaaatcgcgcaagaaatttttcagctcatccgcttcaatgtaacccgaattgtcggtgtcgtattcacgccagatctaatttaattgcagacaaattatttggggaatttcaggatgtgaaattcctgattgtcacttaccttcatgaattcaacgctagattccagaggattatcgaagcggaagagcaaaaggaaattctcctccatgggcaaaagttgagccagctgcggaaaagtagtacaagaaaaatacctttttgtttcagtgcgtgacatgacaattgaaataagttataaatgggaatgctccgaggacgagccgggttcctaagtctcctgtttatccggtgcattgcgtgaaaggcgaggatatcctgctgcactttcattagcaaacagccggaaaagtttcgcttctggcattcgttaaaagtttccggcataattcaagtgtcgaattgaagcccttaccctttacaagtaatcatctgtggcagggaaaactttataattcgctgtggccgtgggatttacatttttatttgctgttggtaattatagcactatcgtaattaaagtttatcttcaggccaaagccttgtcgacagaccagtaatttaaccgtcccagccatttcaatcgctgttcgacgtggcgtatgaataatgtggacaacatgaattatgaatgccctgtgccttttgtgttgcaagcaatcttaatcaacaatacatgggggacccggctacttgaactttttacttttcttcaccaaaactttcccttttttcgtgggctcatttatcaaaagtccattgtgcaccgctgtattatttagtataaaaaaaagaaaaacggaaaatccccttccaatagtccgtacttctgctgccagttcaacttcaattaaaaactcatttaatgtggcctccacacaatgagagaaaacgaagaaaaaaacttttttttggccaaagaccttgccagaaagttgattccttctccagggaaaatcgccaaataatttattggtttcggcccggccgagacatttaaaaaccaatttaaaaaaaaggcaaagaaggcgccgtcatgactaaaggaaatgtcatttcgtatacaaaaatccatacagacaacattgcgcatacgacatgggagcccccatcaaactgaaattttgggtccgaatgagtcgtaggtattacccacctctctgatatcgattttaccatcctgattgtcatcgtaggcctccatgaagcaggactttagctcctcgagcatggtgtccgttactgcctgggaattgggaccgagggattaagatgcaagtgttccataccacttcagactcacctctggactaatgtctgtggcattggcactcgacacgaactcccgcaggaatccgtccagctcggtgccctcaatgtagccatttcctaaggtaaacaatttaaataagtaatgagttattaaacctctaatatatcattttgattaatagatactaactaaatgtgtttcaagtgtggattaatttatataaagtacaaattattaatgtggaaagttaagcaaataattacaattctaaggcagtagtgaaatacaatgattgcaaattttgttagtaagatctaaactcaccatctttatcgtaatgcgcccagacatccatgaactggttggccgacagcttcttgagttccctggactcgggatcacgatactggcgcataaagttgtgggccttctcgatttgaacgcgcttggcggcggcggcggcggcagagtccatttcttatgtttttttttttgttctcgggtttatttgtcctcgctgagaaactagatgctgctgagcaattatctctggggaggagaaaggcatacaacaattaatttgcagccattaaacgctatgctcggtgtctggggaaaagccagttgtcagcgcagctgaaactgtcaaattaatagcataaaacagaaacacccacgaaaacccacacagctgcagctccatacacacgtatacgtatggcgggtgagaaatggtcacagtgggactcccattgcagccgaggaagtgccgacattgcatccgtgagcggggatttcccgcagttgaaatgagacagaacgccacctccacgaggcccccaggcgaacccccagcccaatacaagtcacaagtcattgtgggttaaacacaccgcgcggaatgggagaaaacaagaaatgtaaacaaaattgctgggccgcccacatctgcagttgcctcgcgggtgggtgggtttggtttgctctaaaaataagaaagcaaagtcctgggctcaaggcgcgtctgcagatgatgttggcttgaaagggacacttagaaaaataattaccaagggtgacccaactgcaatcggcctttctgtgctatgtttattttatatatattatttttttacgtttacttttagttactcaaccaaaatcattataacaataactttctatttgtgcaagttattttctgtttaggaaatgccaaccccttttaaggactaaagagtatgaaccttttaattgcatacttttcagcgttgaaattcatattttttttggttctatgggatgagaaaagtatcgaattatatttgaataaattttccatacccctttgtatattattttgccttttattcacccactacgggttggctttaaaacgtctccgttatatgcatacaaaagtcaaaatttggcattcaaattaataaaagagtaaagaaatgattataaaatcatggaatttgccaaatgccaagctatacttaagtggtatttgagcagtgccagtttggcttggatttagccagctcgtttgccgacatccggatgaatgtacgtgtacatatatctgcggtgggaatcgttgacagtttgctgcggtcgctcttctgtggctaaaataaagctcagaatagaaaagccgtgagcataaatttgcagcagctgttaccactaaatgagtttcgcactgcacactgttcttggcacacaagaaaatcgccactaatttcaatttgaaggttaaaaatggttgcgacaatatctggctatctaaaaccgaaaatattctttaagaatatatctattaatctagaattcatattaaggcacaactaaacctcattaaaactgcgaaatgatataggtatatgtagaaatttgtagaaaaagttaggtagataattttctcgataaaactaaggcatctagccaattctcaaagacattaggcacagtgcgataatcgcattaggatcaacttgttgactacgtccctattgtttatcgaacacgctgccaatattaactttcatttaatttgccgcgaaacttttcgcatcgttcgcgaggactttggttactcgtgttatctgcctgcagaacaagttggccgcattaaccggcttgtatgatggccattacctgcaaacgctttcgttcgagccaagtgaaaggacttttcctgctgttttttcctgcctagccattttatggcctggaaattgcatttcacccactgcagtcgcctcaagcctcctccgctgtttacccaacccaccaacatcctttgttgtccttgttgttttttttttctcttttattttttcaaatgtatgtagagaaaggaagtgctagaactgtatacgtatttatacgattatggcggaatgctggtcgagaacttttgcaatccagagtgcaatatggcaaatacttttggcccagctccaactgccagctaatgccgaactggatgccgagggttaagttacggctttaatataaattgtgtaatgaactatgggcagaactgggaattaagtacgctcgatgggagaaaattacataggaatacgatgcacttatacaaatataaagtattcaaatatgttttaatatgcaagtcttttattaaaggacataattcggaacagtctgtattggcgaaacataataatcataattcccaaattttattttaaaatatttctgtttttattatttagtactgtacgtaggaaactctgatttgtctttctctctttttgtctctttttgttatcaatatgaccacggttaaatgtaaagcaataatttaccaatagaatctgcttgcaaacggattttcctaatctgagattgaatagtttaaataaatggaaaaacttttaactggaattttgccattcggatatgcaaacccatgcagcttggcaaggaaataaataaatcaatatgactaaagcaatgaatatataatcagccgcagggattcagaaaaataacttcaatagcgattctgcattttagtgtgtctacatagcaagttgcagtttgtactaacgagacaacttttcaactggtactttgcaaaagggctttttgaatattcaatactttttagcctagtgcccaacaacaaattaaatcaataaaacaacgagaaagcaaaaacatgatataaaatgctgcagataaaaagttcgttccaccgaaaacggccgcaaagagtccccaaggaaataaacttggcaacttcatatttaaatattctttcgccgccacgaatcaatgggagggtggggggagcctattgaacaggaaatatattggttgactcgacgtcactaatggccgccttgcatggcaaaaacagccaaaggcaaatcgagcctttgggccaagaaacgcagataagcaaaagcaaaccagactgtcaagccccgttggccgcattgcataagccgcggcttacactcgattttcagttctcagttcttggcatttctcgggcgcgtgctcgagtgccacaggaaaagtccgggatagtcaaggggatgggttgggggggggggggggtggtagcacggaaaagcgcagagcacctgcttacctgtcaatggtaaccattcatccgtccgtctgacattggcattgccccacaatggccacccccccacatttgcaccctttcctgggcatgtactgactttaagtgcattaagctcagttcgcaatttaatttgagtgtttttctgtttattttccccgcttggcggcctgtcatttcccccgcattttccacgcttttccttttcccttacccattcctttccctttcctggttttgcccccccgcttgttgctggcgtatctgttattatttctattttaagagtttgcgcccgaccgcagcgtttttgcctagtctgaattatagactagggtttttgccttttatttggtttgatagcattccagtctgtctatatatagctttaattaccgcacagttttggtatagatattggaaaggtgtataatttaactactaggacgaaactataaaaggtactgttaaagcttgaaatatgtagattagtgcacaaaaagcaggacaaagctaatattttgcagtttatatgtaacatgcgatttttttaacaaatagttatctatcattcagttcttgcgttaatttgattaagctttgtttcaattttgtgtccttttaattaatgatggcctaaatgatgaaggacgcctttttctttttcttgggtcacttgtatggatcaatggtatctcaagacatccatcatatccaccatccattacggtatcccataatggtttttctcgatgctttcccacccacaaaggtgataaaaacgaagtgtgtgagagctaatagaatcatatcaatgttctaatgcacctaaaaatgcacttaggtaaaagcttgtgtacaacaatgaaggaacttccgccccgctttcgtttaataggatatttcctgtttacaacctgaccataattcttacaattttactgcactttcctcgctattggccctgagtgaagcagttgtaaaactagaagatgactttcacgtgtagctaaaacccttacacttgtagcttgtaacccttacacaacgaaggcagttgcccaaaaaaaaaaaaatatatacatatataaatgtcagccaaagtatttcgcattcataaataataatatggaaaactcctgctcgtacgaaacacggtctcacacattcgacatttgaaacatgagcgaacatagccgacagacagttcgctgtaaaatgtattcaagtgcaagagtcatgaagctcgggcattggaaaatgcaggggattgaaataatatactcactgactaacagaaagttttccttgcccgctagctttttgtacagggaagtctataaataaggaaccttgattaaacacttgcatttctaattgacaaaattagtgaatacctatatatatcttactaagtcggtttataaataaatataaagaaatgagaaaaatatatacacattgtgaaatggtaaatgcaaacaaaccattctttctttctcattagcagaagattctgtagtctaaatggactaaaatataatctttattcatgttctgatttatataatttcggaggagccactgtgcttagcatttgaaatgtaaaacacaaggtggtgggtgtactttaagttggttctttgtttttcttatgtctttgagttcaagggttacggcactcacactcgagggcctgcatttttcgcggcataataaacttagccttggcttgggccactccgggccacccaaaagtaaacacaggcgagccgaggaaaatccaaggcccaacaaggccagttgacattgacatttgcttggcgtgcctcaagaaatatgtttatatatgcaggacgactggttatcccaaggaatattcatcagttaatccccccagttggttattaaattgttcctccaccattgatttgcttgcccacccaaaaaagccgaagatttatcccaaaacggcttatgtcggacacaaaagattcggccgagtaaggggtttgaatttatggcccaaagtccggcagacaatttgccgaaggatcgacaagaaaaacagcgtaatttattgcattacggtttattttatttggcccaaaagaaattggtagtcagagggttgtggaaacatcataaaaatgcagttaaaaatttaaatgccaatttgctaggtcatcgccgagcagatgattacgtgccaaggtaccgttggccattatgcgaaaagtacaaaatgaaaatctcttgatatatagtgttgatttcagacggcgaacttgtcgctgatttattgagccgaatgcccaaatttatggcgtgcaaacataaattttaattgcccaaaagtggtcatttcgattggttataattataattcacatgttaagctgctcgcagagaactcacttaattgaatggtttatggcttttgattttaataaatcgctttatttatttttccttcctcagcagcggcgaacgatttagtaggaagcctcagatgttgatttatgtagtttgcattcggaggatgagagagctgcctcttcctccggacttgggcactttgtaaacaattatagaaattatagaacggcgagaagaatttctttgtaatttactgtcgataatctacccaatttgtatactcgtgttggagaagcgatttgctaaattacaagaatttttgggggggcatattgcatctggttcgctaggcgatttaatctggtttttttgtcatgccgagctggccaagaagttgtttacgatgtgttgcctgatgtgcctgctggtcggaagcttttgtgtattttatttttcatttgtgtttttctttttactctcagccagcgctgcgtgcgaaagaaaatgtgtgaaaattcgcagggccagagggaaactactttcagttctttacttttaagctagttgcggtggtgtagtagccacattttttctgcccattttttgctgttgcccggactttaattacattttattggtcaccgcggagccgtaattagcttggccaactctggttaaccactgggatccgttgaatttatattgaaaaataatctaccatggatgaaatctaaagaataatggttttttgcatgacactacgcattttttttttttgtttcttcttgtccggcgactggcacccgctgggctttagacagttttaattaaattccgaatgggcggaggggaaatgcgatgtcctgccatgccaactccccatgtggtcatacttatggattgttattagtccctgtcagctgtgaataaaattcaattcgcttgcatgtaaaaaccgtgtcctttgcttgtaaaaagcaataaagtaaggagaacagattaattatggagtgcatactatgtctggggtgtgacacttaaattgatttcatcttggaacgaattcagttctaatgatggcatacactgcgtatacgtgatgtgtgggaagtgacacttaaaatgaaacctaaagcaattgacaaaaaacagcaaagctaattattaaaatagtagccatattaaattacaggatctttcgtactttcatttcgaggtagtttgctttttgaaaaccgaaaccaaatcgatatcttattaatattatgatgaattacaattttttcgcaaaaatgccaaatcaccagaaaaccatttgggatgaaaaacacacttcgtaatggatatgcctgtcagtcaatttggaaattgtcactgtagccagaacatgacagttgtaagggtcgaaaagggctcaaaaatcaaaagctataaataacaaactagagcgtggagtcctgacaatctatatcacaattttaagacgacagaattggaaagtattgaagtttgctcaattactggaattgcatttttataacctgccataataaataaaggatggcgtggaaacgaaaaccgggcaaacaagccaagaaaaaaaaattgggccaaaaaaacctgcgtcatttgtttttctttattgtattcttttgtttttcatggaatccaggaaaaagcagaaccataaaaagatcacaataaatgcaaaattgccgaaggtatgcacatatgtatattttccccacacgaatatttacttcaacgtgttttttaaaggcttccttagtgtttattcagtttggtgacgcaacgcgtaattgctgccgaaaaacctcaagtgatgatgatgtaaatatttacatagctaatagaaggcactttttacgctgcctttgcgtaaatagtaatcaagaaataataataataataataaataataataatgctcttcggggccaacagctgtaattaaccagctggatgtcggcgtgtggaaagatttccgaccaaagtcaatacgcaaaaatgtaaaatacaacaagaggcaaattatgctgattgctttgggatccccgccactttttggctggtttgtttgcacggacaaaatacatatttgacaggccctgcggggcattcaagcacctcgataacttttccagcaaaacgcctcgtaattagaataattattaccgctaggcgcgaacgttttttaatggcactttgtgtttttgacattgttctaagataattacgcccaatacctgtgggcgaaactgcgccttgcgattgtggcaggacatttacgaaggtagcgggtgtcctgaaagtaagagcacttaactctgaaattttttaagcctaactaaaagaagataagaaaagaaaggtttggttacaatttagaaaacaaaatattcaattttcatagaattttaataatatctttcagttcgcatgaaaaccaactcaaaaaactcgtaatagcattttcctccaccgattttttccgagtttatatttatttttatactaggaatctagatggctttctgaaaaccacgcatttcgttcagctaaaccagaattaatattgcgtataatttatttctttgaaaaaaagtacacaaataattgccggaagctttgttttacgaattgctttctttactaactggaaattcacagaaaccgtatttattttggcagcggagagattacatcattgtttccattttgtattccaaagcccacacaatttgaactgcaaataacccatcaatcttgctgaccctgaatagtgtgatattaatttaaattaatggcaatcattgctcatctctgcgtctgtcaaatgacgtcgccatatttggccagtgttttccatccgcttaatcacccatccttttgcgaatagccatctattaataaccaagaatccaacttccttcccaatgccattaaatggctgaaaatgcaaacaaaatgcctccattcttcgctgacaaacgtatttattttgataattcttcggctctgatattccgattcccatttgttttcgctaaacgagagcgtgtacaaaatcgagaaaaacgtaaatgaaagcatcgaaaattagatactcacagtaaattagttattttaattgttcgtacacgaaattccttgctcgatattgtgttaaactaggaatgcaattgcaattaagccatttgctcgaatggaggacaatccggctcgtgctagttgcaagtggtatgtcatctaattagccaattttgcacttggcaaacaacgctgcgtggccgaatcttcaggggaagccagcgaagggtcgtgttttatatttagatatttcttaattatttttgacagctcccttttatgctgcacaaaacataaaaggttgcacatgctctcacaaggctcattttgatttatcatcaaattggctcataaatgcgctaattctatatgttcttttagtaacattttaatggacaaattagaagcatctctatagttaattacgaaattattctatattaattttttaatttttctttagattttcaagtgcatttgaactatattaacataattttttgaaaaattgttaaaatttttgtataattttttataaaacatcctggacattttgaagggtatttagatcttcgtcgcctcacagaagtccttgatgtagtcataactttcaatttgccttatttcattgcattgcatacattctggcgtcgactgcgtcgccgattgcaagggatttccaccgagggagatttatgaatgagcataaattagggggactcgtaaatgttggcacgcagacccacttgccccacgtgccccaccaccattgccacactgtagtgtagtgcccattacccattaccatggcattccaacccattcccgctcattatttgtcccttctgctgtttaattttgcgtttgaataggcaaagtcaaggacattcgtcgatggcgacggcattttagtgtcagctcctgtggctgccattcggcataccaatgaggagggttcgactcctatcctaattgaatgcggacttcttgaaaaaaggtttgcccctggtgtccgggaaaattcagctatttgacacggtttaagctgtcagcgggttgaatacggaatgcccgcacattttttcactgttgctcttttttttttgcgacgacctcttcaaaccaattttccacctctttggaaatccattgcaaattgaacgcttttttccaaaaggacaatctgctttgcgtttgtcagcttaggctagttagcccagatttaaaaggcttttagcataaattataaaatttaaataaagtgattggaaatcgtgagaaaaatgtaaatttttttgtttgaaacgcatttttatatacagcgagatataaacgagttcataaaaaactgactttgaaatgcgcagcatgtttgaatgtaaatcacttattctgcttgcggagaatacatctattttaaataaaatgttttcgagcatttcttgtaaaaacaaatgcataaagtgttattttgcgccctttaaaaaatataaatataactgccgaaaccaatatagttgtttagtgttcttcgccaagaaaatgtttcaaataacaaatcatatttactttttaaaactgctgcttgcttttggaatttcttcttttccaaaaactaaaattcacttttctcgaccgtttttccaggtaattttcgattttaagtatatttggttaaaacgcacgcgacgattgccgttgcctaatacttgacggtattttatctttggagaaccgctggcgcctagaatcctttgcagactgtttcgattatggccaggtcttttgcttttatcaaagtgaaaaactcaacacggagagagcgtaggagagtgttgcagcagcgcgttggcaacatgttgctggcaacaaactgttgaattgtttttctttttcgccagagatttcctgggctttttcttctctcatgtgttatttcgtccgggcaaaaaaaaaaaaaaatgcgagaaaaatacgcagaatataggctttgttttctgtgatatggctaattccgagtaaactttgcgccagcacttgcagttatctacaaaatatcataaacatacatatgaaaatgatttccgccaatgtcgaaactgctatgttttccctctccgttttgtgggtggctatgggtggtggtgcgcttaattgtagtccccccagggccttttgactttcaatgttttatctgcatgccatattataattcactagaaacgagcttccttcggctgcccttcgggcgcagtgcgtatgtgtgggttttccttttcccattttcctcgcccaggcaatgtcaagtgttactcatgaatggccgccgagcttttccacattttcccgcccccaatccacctggcttctgctcgcgtgcggctcattcattattcatcttttactttttactttctgcctttttcttcgtgttctattatacacatgtatgttttgtgtgagactacaattgtgcaaggatttatgtctaaacctttaaagttaattgttatgactctagaaaaggtttccattttgaccgaaacgaaaactaaaagtgtttattaatcatacgccccatgaacgccattgtgtgtgcctgttccctaatctttgggtcatatcaaagggacggacctgtgtccattatgcaattgccactggttctcgagtggcagctcactgactttgtgacttaaagcttaaaggtaaaacagaaggttcagtttaagcc

SEQ ID NO: 14546 - DNA, 1618 bp, DROSOPHILA
ttctccaaagataaaataccgtcaagtattaggcaacggcaatcgtcgcgtgcgttttaaccaaatatacttaaaatcgaaaattacctggaaaaacggtcgagaaaagtgaattttagtttttggaaaagaagaaattccaaaagcaagcagcagttttaaaaaagataattgctcagcagcatctagtttctcagcgaggacaaataaacccgagaacaaaaaaaaaaacataagaaatggactctgccgccgccgccgccgccaagcgcgttcaaatcgagaaggcccacaactttatgcgccagtatcgtgatcccgagtccagggaactcaagaagctgtcggccaaccagttcatggatgtctgggcgcattacgataaagatggaaatggctacattgagggcaccgagctggacggattcctgcgggagttcgtgtcgagtgccaatgccacagacattagtccagaggcagtaacggacaccatgctcgaggagctaaagtcctgcttcatggaggcctacgatgacaatcaggatggtaaaatcgatatcagagagctggctcaacttttgcccatggaggagaatttccttttgctcttccgcttcgataatcctctggaatctagcgttgaattcatgaagatctggcgtgaatacgacaccgacaattcgggttacattgaagcggatgagctgaaaaatttcttgcgcgatttgctcaaagaggccaaaaagatcaacgacgtgtccgaggacaagctcattgagtacaccgatactatgctccaagtattcgatgccaacaaggacggacgtctgcagttgtcggaaatggccaaattgcttccggttaaagagaacttcctgtgccgccaagtgtttaagggcgccacaaagttgaccaaagaggatattgaaaaagtattctcactctacgatcgtgacaatagcggcaccattgaaaatgaggagctcaaaggcttcttgaaggaccttttggagttggtcaagaaggacgactatgatgcccaggatctggccgctttcgaggagaccatcatgcggggagttggcaccgacaagcatggaaagatctcccggaaagaactgaccatgattctgctaacactggccaaaatatcgcccgacgacgaggagtaagccggatgttcgagaacataccaaaaagagattttagccaactctatttttgtcacccgaacgcgggaaatccagaaatgaggccaaaatgggcttcaaggcaattgtttactttagagctgcattaaaaggggcagcaaataaacaaaaaaataaaaggatattggaatcggggatgaatcctgagagattcaaaccgaaacgaagctattggtataaaataaatctaatataaatgttcaaatcttaaataaatgtttatcgtacgttaagatattgagagtatatatttcccccaaaatcaaaccaaaacggaaatttatccagtcaaacaatttgcaacacagaatcgagccacttaaagtaaaaaattaagaaatgataacaacaagatcagtacatcgattttatattatactatatatgtatttatattttctatgtgt

SEQ ID NO: 14547 - protein, 310 aa, DROSOPHILA
MDSAAAAAAKRVQIEKAHNFMRQYRDPESRELKKLSANQFMDVWAHYDKDGNGYIEGTELDGFLREFVSSANATDISPEAVTDTMLEELKSCFMEAYDDNQDGKIDIRELAQLLPMEENFLLLFRFDNPLESSVEFMKIWREYDTDNSGYIEADELKNFLRDLLKEAKKINDVSEDKLIEYTDTMLQVFDANKDGRLQLSEMAKLLPVKENFLCRQVFKGATKLTKEDIEKVFSLYDRDNSGTIENEELKGFLKDLLELVKKDDYDAQDLAAFEETIMRGVGTDKHGKISRKELTMILLTLAKISPDDEE

SEQ ID NO: 14548 - DNA, 5420 bp, DROSOPHILA
aagaacctgctggactgggagcgggtggagcggctgatgagcggcgaggatcccttgacggagcttcaggagcccgagttgcgcaacgagatcgccgactggcaccgaaagttccctagcctgctgggccgccggactcgaacgctgcgccaccacagcttcgatagtcagacgcgggaggatattgactcgatttcaaatcttagtctgaactccctggacgacgacgatgatgacgaggaggcggaggatggatttctgacacccaaggcagaagaaccagaacagcctcatcaccactcctatttacggcacagccagaagaagctggtggatctactggacagggatctgcgggttacctccgtttcggttagactcctcaaacgacagcgcagccagcagaaccagccccagctgcccatctcagccaccacccaatcctcggcacgcctgcgcatgccgcccattctcaatgtgctcgataccaaccggcgctttcggggattgctcaacaaccgcagcttcgttcagctcacccaggtgcagcagaaggagcagctgcagcatcagaaccaggccaagtccgccgtgttgccacatcaaagtcatcgatcgtccgcctggcacatgcccatggccgccaatcgcttttttaacaacaggaacgcggtagtcctgccctcgcttaatctgggcaggcacagcagggatttgctggccaccaccacggccacttcgagccaaaccaactccagcggcgggggcggacacaacagccatggccacagcaacagttcctccaaccgctccacactgcatccatttggggcgaccagcgtttccagcaacacaccatccacgggacgatctatctcggcggcagttcatcatccgcgaaccgaatttgcgcccagcagcgccttctacataccctacagtgcctcgaaattcaaagccttcaagtaacctcaaacaataaaactgatctcaaaagagtgttttcttaaaattcttctgctttaaaagtggtaaattttaaatgttttaggtatgatagtatgatgatagtcttttcaaatttctgctttccaaagtatagtgcatacaaaaataacacactagttctccaaaactcatgtgtatgacgacatatcccactaaagacccatattatccaagcgcagacgtccatcgtgttctgtgaggtagagggtgtcggctaaacattgctctgtgatcagctcctccacgcgatcgtgcatctgtaggggattgtataatagatgttaagcttcctgggaacaaaccgagatatattacccccttggctttgtgctcgacgagcacctcgggatacttgaaggcgggtccgaagtttacgctgaccgttgcacttttgtggatcgagatggccgggaaatagctgccggcataaatgtcttcgaatgccacaccctgcgattgaccgttcttaaagaactcgatgcggctgccctgcaggatgtgcagatttttcagggtttctgtgatcttgtccttatcctcgtagtacagatgagacttgaacttgaccaggggctgttgtagaatgaatagattttgaacaagattgctaattagggagggttgatttgtaaagatgcaattatatgcaaattcagcggcgtggtattatataggctaattatcaagatgacctatatcattttacaatacaaaagatcggtattgttcgattagaaaagagtaaaacaagaatctaaacccacccgatctttgaatgtgttgggcagatagtcgagcgacgcctcctctggcagctctatgaggaatcccaatgtatcgccctccacataggcatcactgtagtgtttgccatggctctcggtaaacttggtgcccttgcgagatctccaggagtaaccgaacttgtcgtatcccaatggagcctgcaagttgccgtactcccggccccagccaagtcgcgtggcagctccgtcgggcatctcttcgatggtgacctcaaagtaccagcatccccggttcacagctgggaaaagataatcaatataactatgatttcttcagggaactatatatatctatatataacgttacagtgtgtggctcggaccatgcagtaaccacgttcgcccgtcaccgccaaccgatcctcgcttattttcagctgtggtgcccgatcatgcagcgccaggagcacagaatgtggcaccaggatgcggtagagccagccggggataggtttgccagcccaatcggagctctcgtcgaactcctgacgaaatggagcatgtggatccggttcggcgagtatataacgatagccatccttgttgaaggggtgttccaatggatagccatgcggtggcaactttacattggccgtaatatcggaactgggccgacccttcttgcccgtgggacccgaatccgtgccgggaaatttccttttctgtcgattgtttttggagagggaagctggaagcatgtggatcaatcattagttacaaatccaataatagacatgtattgtggaaatataaaaacagctaatgcgtgatagtaatagtggagtagatcttggggcgtatctgcaatgcttccagaaggagctatccccaaggaaattcgttcaccaaggaaattgattgctgggacatatgtagatgaatgggcaaagttcgggtcggtgctgtttccgggcttacactcctcgtccgtaaaagatgacgccatcgcggagggagaatgagcaggagcagaagcaggacccggtcacaatggaactgaaggagcgggggccttgcaattgcgtagtgctcaaaatcaaatcgcaatcaattcccccgaaagagcaccacacacacgcacactgagacactggcgaagtgttccaagcgtaactatttgtttgtaatgaatgagccaagttgagcgcgcctctgccagccccaccccaccccacttcgccccgcccacaatctgactacgtggggctctctctctctctctctctttctctgtgtgtgtgcaaatctgaaactacgatccgcattgcgattttgttagttgttgttgttactttactctggcaaacacttgcgaaagagcgtgcgaaaggaagcggcgataaatagggggagcgaataggcagcggaataggcgacacaaaaaccactgtgccaaaatcagctggtcgaacagtgttgccaatttggccgccaaaagataattcatttagctttctaccactgagcgttcgataacacatggggtcaagtttttagcattcaaattatagacttcaaatcgatttaaatgtctatcatcttatttacactcaccttgagtatatccatcgtcggtgagtcgcagggcgccgctcttgctcatgctctcgtagttgggcttgatgattcgcagatcctgatggaatagtccgtacatggcgccatgttccgcatgctcctcgtaggtgaacagggtctgcacatccttgaccaaagatcgctggacggtgctgtaccaggactgggtgagtctgcgtggcatggtggtcatggcctcccagtactgttcgatgtacggtatgatctccttgtccttgctaaactgaatctggcgacgtccgtccctggaagccgcctgctgcatgttggcaatggcacagtggcacatctgggatatggctggaagtggatattgttattatcaagagggataaatgtgcggggcttctttgcacttactagcctggctcttgcgaaagctctccaatccgctggcagagcaatttttacagacgaacacatagttggtgatgaagggcagaagtttacccttaccaagctggtaggaaacgcaggtctcgtgcacccagcgtgaacaggtggcacacagcagctccacaatattgagattgcgctccttgccgctaaaaacaatgtcaatagaagggagccggccaagcaaaaaacccatacaaagagctcaccagtaacaaacgccggctgcggaacgcgtttcctgcgatttatcctcctccgcagtgaagttcacctcggagctggactctgtcggcgagcttgtgtccatttggctgtcctccattgcagtgataaaggttttcagtcaacaattagcatgtaaacaaatattagcggcccgcaagaaattcggtggctggccagagtgaccgttggcgggcaaacacatggtgcgtttgcaaataccagaacgtcgccaaagagcgataaacgatagacgacaacatttagagcacacagcctgacaaccctgcccctgcctcttcgctccaactctggctcttgcttcgattgtaattgtatatatatatatccctaccatatatatatgtccgagtgtagaattatcatttttttgttgccgaaaaacagtgttccgtgttgagaggcgagggcgccatcctaaatggcattgcacgaccgccgggagcgagccgagcgaccaacgaatagcaagaagagcaagtgcccgcaactcagaccgtgactccgccagcgtatcccagactccgactactctccatagacggccaggagtcgtcgccgctggcaaggcggccctaacccctggaagctaccgattcggtgtgcagctagtggagcaccatgtgcgaggtgtgcgccgacttccagaatctcctggagctctgtaagtgaaaagtgcactgcgaaaaaaaaatagaatgaagacgaacaccggagcccctgccccctgcttacacatagtattccgaattccttttgcagatgaggtgcgcgtggccagctcggatctgaagttccagctgctgctgaagagcgagatcgagaccaccttcaactacatccagtcgtggccgcagcgtcagtgcatgtgcctgtaccgggacaccaagaactatgaccgtttcaacctggtagtgcagtcgctcatctgtctgacggtgcagcatctgaagcacatcgaccacctcatcgacaactacaagcggctaacggccagtgctgcccaggtggtggcccaggcccagcagcagcgtgaacagcagcgggacgaagcgtcagcccaggcagaggcaaaggaatcatccgcgccagcggaagaacctaagaaggaggagccatctgggtccgccggtgaggaggctcagggctccggcgacgggccagccaaaaagccgccagttggcccctgcactccccctcccccgcaaacggccaatcctcagcacaaatcccacctgcagtacacagaggagccctggatcctgcccgaggtggagaaactgttggtgctcgtttcaaaggtgttcctgctcaacttcccgctgtacatcgcccacaaacatggcatgcactctcggctggacg

SEQ ID NO: 14549 - DNA, 2060 bp, DROSOPHILA
tgataattctacactcggacatatatatatggtagggatatatatatatacaattacaatcgaagcaagagccagagttggagcgaagaggcaggggcagggttgtcaggctgtgtgctctaaatgttgtcgtctatcgtttatcgctctttggcgacgttctggtatttgcaaacgcaccatgtgtttgcccgccaacggtcactctggccagccaccgaatttcttgcgggccgacagccaaatggacacaagctcgccgacagagtccagctccgaggtgaacttcactgcggaggaggataaatcgcaggaaacgcgttccgcagccggcgtttgttactgcggcaaggagcgcaatctcaatattgtggagctgctgtgtgccacctgttcacgctgggtgcacgagacctgcgtttcctaccagcttggtaagggtaaacttctgcccttcatcaccaactatgtgttcgtctgtaaaaattgctctgccagcggattggagagctttcgcaagagccaggctaccatatcccagatgtgccactgtgccattgccaacatgcagcaggcggcttccagggacggacgtcgccagattcagtttagcaaggacaaggagatcataccgtacatcgaacagtactgggaggccatgaccaccatgccacgcagactcacccagtcctggtacagcaccgtccagcgatctttggtcaaggatgtgcagaccctgttcacctacgaggagcatgcggaacatggcgccatgtacggactattccatcaggatctgcgaatcatcaagcccaactacgagagcatgagcaagagcggcgccctgcgactcaccgacgatggatatactcaagcttccctctccaaaaacaatcgacagaaaaggaaatttcccggcacggattcgggtcccacgggcaagaagggtcggcccagttccgatattacggccaatgtaaagttgccaccgcatggctatccattggaacaccccttcaacaaggatggctatcgttatatactcgccgaaccggatccacatgctccatttcgtcaggagttcgacgagagctccgattgggctggcaaacctatccccggctggctctaccgcatcctggtgccacattctgtgctcctggcgctgcatgatcgggcaccacagctgaaaataagcgaggatcggttggcggtgacgggcgaacgtggttactgcatggtccgagccacacactctgtgaaccggggatgctggtactttgaggtcaccatcgaagagatgcccgacggagctgccacgcgacttggctggggccgggagtacggcaacttgcaggctccattgggatacgacaagttcggttactcctggagatctcgcaagggcaccaagtttaccgagagccatggcaaacactacagtgatgcctatgtggagggcgatacattgggattcctcatagagctgccagaggaggcgtcgctcgactatctgcccaacacattcaaagatcggcccctggtcaagttcaagtctcatctgtactacgaggataaggacaagatcacagaaaccctgaaaaatctgcacatcctgcagggcagccgcatcgagttctttaagaacggtcaatcgcagggtgtggcattcgaagacatttatgccggcagctatttcccggccatctcgatccacaaaagtgcaacggtcagcgtaaacttcggacccgccttcaagtatcccgaggtgctcgtcgagcacaaagccaaggggatgcacgatcgcgtggaggagctgatcacagagcaatgtttagccgacaccctctacctcacagaacacgatggacgtctgcgcttggataatatgggtctttagtgggatatgtcgtcatacacatgagttttggagaactagtgtgttatttttgtatgcactatactttggaaagcagaaatttgaaaagactatcatcatactatcatacctaaaacatttaaaatttaccacttttaaagcagaagaattttaagaaaac

SEQ ID NO: 14550 - protein, 572 aa, DROSOPHILA
MCLPANGHSGQPPNFLRADSQMDTSSPTESSSEVNFTAEEDKSQETRSAAGVCYCGKERNLNIVELLCATCSRWVHETCVSYQLGKGKLLPFITNYVFVCKNCSASGLESFRKSQATISQMCHCAIANMQQAASRDGRRQIQFSKDKEIIPYIEQYWEAMTTMPRRLTQSWYSTVQRSLVKDVQTLFTYEEHAEHGAMYGLFHQDLRIIKPNYESMSKSGALRLTDDGYTQASLSKNNRQKRKFPGTDSGPTGKKGRPSSDITANVKLPPHGYPLEHPFNKDGYRYILAEPDPHAPFRQEFDESSDWAGKPIPGWLYRILVPHSVLLALHDRAPQLKISEDRLAVTGERGYCMVRATHSVNRGCWYFEVTIEEMPDGAATRLGWGREYGNLQAPLGYDKFGYSWRSRKGTKFTESHGKHYSDAYVEGDTLGFLIELPEEASLDYLPNTFKDRPLVKFKSHLYYEDKDKITETLKNLHILQGSRIEFFKNGQSQGVAFEDIYAGSYFPAISIHKSATVSVNFGPAFKYPEVLVEHKAKGMHDRVEELITEQCLADTLYLTEHDGRLRLDNMGL

SEQ ID NO: 14551 - DNA, 4874 bp, DROSOPHILA
cctaaaagtgacaagcctccccactttattgcttattttgtaccgggtgttttcttttttcgatgataacaatatttgccaagttaaaaacggaaaaataagaaatgaagtgtaagacccaaaagcaaagcctgtttacgcaccacatgtgtgcgtgtcgccagaactgcactgaactgcctgccacccagtgcattataagataaacatttgtttttactttttcatttggcaaataacataaaagcgttgaactcgatcgcggaccataaagcggaaaattcgcctataggatcggcaacggtagatgttgactataataaatgcaaatttcgaaaaaaaatctattagaaactgtataaaattctcttcgaaaaattggaaaaaacatacttcaattttagtataaatatatctacatatatggctttataatcagctaaaaatccaatctcagaagcgtacagttttcataaaaattcctctttaagaagttataagcaatcgaaatgagcatttcccagtcgaatcaattgaactgttatcgtatcgaatatatcccgtatatgacgcataaaattcctatcaaaacctttgcaagtaacgcacttccacgaaatcgaaataatcgcgccgagttaaagttaaaacaaagaaaagaaattccaaccaatcagtcggtcagtcagtcagtcagtcaatcagtcggtcagtcaatcagtcatttagtcaggcgaacggctcaagtgctgaaaagtttattgcactgcgagcgtcggacttttgctatggcaaatattgtttaataccatttttaaaaataaaatttactgattaaatgtgcagcgacgacaacgacaaagtcgacgaacgttgacacaatggcggtcctaccccaagacgaaattatttgagcactcttgttttaatgggacaataaacggactgtagctatagagcttctatagcaataaggcgggaacagagttcagagccgagactatattccggcgcctatgaccatcggaatcggaatattgaacgtcagcatcacctctatcattagcacgagcaggagtgtggtttgaacggtttcccttatcagcatcatttgattttcccggtgatcgcccttgttccataccagatactcattatccaacgcgtcctgcagcgaacagtccatgtatccgtatggatacatcatttgcacggtgatacgccatattagaataaagaatatactgggactgggaatgaggaagtttcttacaggccaacgactctgatcctgcatacttcttaacttacgccatgctcaagggcaatccgctcatccagcctgtctttggtaatttaaaagtactaaaatagtggggaaacacttattccaatgcctacttatctacataagttggtaatatatgcaatataatacaaatgttaaattactcatcatacaacgtattttgtacatatatacaaagtagataaaagtcaagtaaaatgtgtggcaatacattttacatgaaggcaaccaagttgacatgtaaattggtttgtgtccaagctgtgttcaattcagtagatttaatagtgaagccattttaaaaggtacatatgtatgtgtcttcaatccaacgttaccttcaaatggagcagcgttgaccatggcccacagagaacatcatccacagtagggttcatcgtgataccttccagggcctgaaaagcatccacataggacaggtcttggagctgcctgccaagttgaccgtgcttgcaccaaccactgacccatagccgcccgcatcggcggatcagcagagtgtgacgagatccagcaaacaccctcagcggtgcgcaatcatcgttgctctccccgctttgggagcaggcacattcgggcagatcttgcaactggggcagcggaaatacagtgggctctttgaggacgccaccgggtttcatcacacgcaatcccagctgaccgctgcagttgaggccccaggtgtagaggtctccaaaggcggatatggccgcactgtgccaaccaccggcagcaatttgagttatctgcaaggcacttgaatgtgtgacagacaagataagtggacaagtcaaatatatatataccttgatccccgccagcgcctccagcaattgaggcgtctcctccactctcagttccgccagacccaactgtccgcgtctgttaattatgacatagaagtgaaaaaaattgttaggaattagaataagaaactcgctaatatctaaatatcttaaaaccagaatatgtaaatatttataggctgcatttctgcacagccaacgcattcattatgacctttacttacagtccatttccccaggtgaacacgtcgccattggcattgaggagcacggcatgttcatggccgcattggagctgcttcacccgaaattggcgctcggaaaactgatgcaggcagctgggaatgctgtagacacagttttccgaacttatcgctacgtttatgtgcgatccacatgcaatatgctctatgatcggcgacgaaggcgccttggcagccccaaagatagagcgctttgtacccgaattggatctgggagcagcttctagtctaacagccaccagttccgcttgcagttttggttgcaccctgtaaagctgaccgctttggagtagcaccaggcagtgggaatcggcagcggcaagggcccttatgttccccgttgcttccagggtcacgcactcatttgggccatcatccaagagcccacgcaggcacaacttccggccaaaagcgagggccgcataccgccagccgatcgaaatcgtgcactggttctgagtcgagactggcgcatttaattctgtaataaaggcagaactgaattagtacacatacatacatacggtggaagccccctaaaaagattttgtctaagttattagtttatcaatttcattgctatgtatgtatttggccaatcaaaaaatgcagttggcaccaagtaccgatgtgtaatttaccctataactgtcaattaaaatgcagtctatatccaatgcatgaatatgaatatgcaaagaattttatggattaatgtcctacgtatatattcacctgaaaatcactatactctattttaaacatgaaatcttaaaaattcatctggcttaaatcggattcagttttataagatagaattagaattgtaaaaatggtataagctgcatgcatcccagcgagttctatagcgagtgcctactgtagcaactaagtgatcggcggcttttgttgccggttacaaaccgctgaagccggctgcgcagtcgacgtcgccgcttacacattcatgctggccaaatgcgttgaagcccgtaaatagcagcggcatcttcttcccgttcccgttccaattcgaataccgctcgacccgcacccccaccacgtcccccgtctaacaatcctttgcagcggttgctcggcgaccgttggcgctgttgttgttgctgtcggaatttgttagagcgttgagcgaattttgttttcagtagttgtgcagcgacgagccagtgatgttgtgtttggtggttgaagttgatccaattctcaagttatccgacttttcctgagttgaccaccagaagacaccgtcttgggcggccagagcagattgccgaatcggggggatacagatacggatatagtggtcggagatcgcaccgcctcctggctgttattctcgcgttaattatacgatggtaggttgtctcccggttccgtaacagctaattaagtgccttgttgttccgtaattgcacgatttgttttcattttgcgatcgtcgccatggaaacccgcctcaaaaactatacaacacttttttgttagagcagaacttttttcagcactacttcgaaagttttaggcgcgtaattatcggtattcgaaaaaaaaaaccaaattggtggttcggaaaacaaagaaacataataagctttttgtagcacacaatggaaaaaagagttcttaatttttaagtgaacatggcaaatttttttaccaataaacatttttatttcattcaaccttgttgtcgtttcttttggcgagcccttatctcaattccaacaatatgtttgtaaagttcacctgttgataagctttttgcattctatcactaagagaacgttttaattgcaagttttttttttacaactttacatcgtctttattgataacaacattgataataacaaaacatgtgtgtttacaagcatatgttgcatttataaaaacacatatatttattaacaattttacaagtttataaactaccaaatgtagattgttattcaaaatttcaaagatagaccagaggatactaccgagtctagactaatactggtaatcaggtgctagaataacacaccttcaaaaaactaagtagaaaaaacaacaacttaatagcttacaaattttagggtctgctatcgctgttgcgtaaactgagacccaatccggaaaaggaggctcgcatcctgctcctaggattggataatgctggcaagaccacgatactgaagcagctggcatcggaggacataaccacggtgcgtataaaggcggcgaacttcttccgttttccccataaaatacggagtgaaatcccgcaggtaacgcccacggcaggatttaacatcaagtccgtggcagccgatggtttcaaactgaatgtatgggatattggtggtcaatggaagatacgtccatattggaagaactattttgcgaatactgatgtgctggtaggattgttatagatctaaactcaattctgttagctaatagtttcgatta

SEQ ID NO: 14552 - DNA, 1921 bp, DROSOPHILA
cgggtttccatggcgacgatcgcaaaatgaaaacaaatcgtgcaattacggaacaacaaggcacttaattagctgttacggaaccgggagacaacctaccatcgtataattaacgcgagaataacagccaggaggcggtgcgatctccgaccactatatccgtatctgtatccccccgattcggcaatctgctctggccgcccaagacggtgtcttctggtggtcaactcaggaaaagtcggataacttgagaattggatcaacttcaaccaccaaacacaacatcactggctcgtcgctgcacaactactgaaaacaaaattcgctcaacgctctaacaaattccgacagcaacaacaacagcgccaacggtcgccgagcaaccgctgcaaaggattgttagacgggggacgtggtgggggtgcgggtcgagcggtattcgaattggaacgggaacgggaagaagatgccgctgctatttacgggcttcaacgcatttggccagcatgaatgtgtaagcggcgacgtcgactgcgcagccggcttcagcgaattaaatgcgccagtctcgactcagaaccagtgcacgatttcgatcggctggcggtatgcggccctcgcttttggccggaagttgtgcctgcgtgggctcttggatgatggcccaaatgagtgcgtgaccctggaagcaacggggaacataagggcccttgccgctgccgattcccactgcctggtgctactccaaagcggtcagctttacagggtgcaaccaaaactgcaagcggaactggtggctgttagactagaagctgctcccagatccaattcgggtacaaagcgctctatctttggggctgccaaggcgccttcgtcgccgatcatagagcatattgcatgtggatcgcacataaacgtagcgataagttcggaaaactgtgtctacagcattcccagctgcctgcatcagttttccgagcgccaatttcgggtgaagcagctccaatgcggccatgaacatgccgtgctcctcaatgccaatggcgacgtgttcacctggggaaatggactacgcggacagttgggtctggcggaactgagagtggaggagacgcctcaattgctggaggcgctggcggggatcaaggtatatatatatttgacttgtccacttatcttgtctgtcacacattcaagtgccttgcagataactcaaattgctgccggtggttggcacagtgcggccatatccgcctttggagacctctacacctggggcctcaactgcagcggtcagctgggattgcgtgtgatgaaacccggtggcgtcctcaaagagcccactgtatttccgctgccccagttgcaagatctgcccgaatgtgcctgctcccaaagcggggagagcaacgatgattgcgcaccgctgagggtgtttgctggatctcgtcacactctgctgatccgccgatgcgggcggctatgggtcagtggttggtgcaagcacggtcaacttggcaggcagctccaagacctgtcctatgtggatgcttttcaggccctggaaggtatcacgatgaaccctactgtggatgatgttctctgtgggccatggtcaacgctgctccatttgaagacaggctggatgagcggattgcccttgagcatggctcccagtatattctttattctaatatggcgtatcaccgtgcaaatgatgtatccatacggatacatggactgttcgctgcaggacgcgttggataatgagtatctggtatggaacaagggcgatcaccgggaaaatcaaatgatgctgataagggaaaccgttcaaaccacactcctgctcgtgctaatgatagaggtgatgctgacgttcaatattccgattccgatggtcataggcgccggaatatag

SEQ ID NO: 14553 - protein, 484 aa, DROSOPHILA
MPLLFTGFNAFGQHECVSGDVDCAAGFSELNAPVSTQNQCTISIGWRYAALAFGRKLCLRGLLDDGPNECVTLEATGNIRALAAADSHCLVLLQSGQLYRVQPKLQAELVAVRLEAAPRSNSGTKRSIFGAAKAPSSPIIEHIACGSHINVAISSENCVYSIPSCLHQFSERQFRVKQLQCGHEHAVLLNANGDVFTWGNGLRGQLGLAELRVEETPQLLEALAGIKVYIYLTCPLILSVTHSSALQITQIAAGGWHSAAISAFGDLYTWGLNCSGQLGLRVMKPGGVLKEPTVFPLPQLQDLPECACSQSGESNDDCAPLRVFAGSRHTLLIRRCGRLWVSGWCKHGQLGRQLQDLSYVDAFQALEGITMNPTVDDVLCGPWSTLLHLKTGWMSGLPLSMAPSIFFILIWRITVQMMYPYGYMDCSLQDALDNEYLVWNKGDHRENQMMLIRETVQTTLLLVLMIEVMLTFNIPIPMVIGAGI

SEQ ID NO: 14554 - DNA, 2615 bp, DROSOPHILA
gcgggctcgtcgatctgcgattcagctgcagcttaattcatttttactgggtaccagataccagaaccgaactcccgtctttgccagcaccaaaccaatctgccgtgttgtcatcaaaataatggtaaccacgtaaacatttcgtccgaacgaaagcagcgcttcgttgtgaatggcaaatggccacagtaagtgcaccactgaaagtttgttgggtattcattttactggtcgctttttagttagatcttccggcattttgtttgaaaagtataaattctaaggaagtttgatttattgcggtcttttgattattattatttttcactttaatcatgtattaagaattgccagtttctaatttttataccttattgaatgaaactttaataaacttcaatggcttttcttttgacttcattttgtcgtcaattatgaagttacaattgagtactcactgtcacgtgaaaactgagagggtgaatggcttgagagcaagaagaagattagtactaattcttattgggaattcgttatttttttataaacaaatattatttaatataagtgaaaataaccaaattcttgctgatgtgaattacagcaaatgaatcatgattttactgtttgtattcaaatgataaccattcaaagtgctaaattcaactaaaaaatacatttcagcggctgttttaaaaatagttcctcattgataacaaacttgaaagacattaatgaaatgttcactttcttagaagtatttttgattaaacgcacattgcaatgaataataattgctattataagaattcttgatatcctgatttgcaaatatattgcacgtcagctgttcgatttgtaagaacaatagtttttgggctatatgatattttacattcccagccgtataactccggctcgacatcttgaaaccagcgctcagtgatacatccctctataagagggtatatctttatatcaattaaacatcacgcaaatgtcccttacatcaataagaaagcaagtttattcaacgttacacacacagcggcatcgtagtgctatcgatacagagttctattgtaaggcgagtgcgactacggcgatgcgagatgggcaaaaggtaaaacattcatttacgcctcatcacccttggtggcacgtgtgtagatgacctgggaatgatgctgcacgacctgcttgatcagacctgaaagcaaagaagagtgccattaggatttatgctaacgaaaaggtaggaagcgtaaggaaacgtacccttctcgcgcagctcgatgagagcacgcttggccagggagccgcggatcttcagacgctcggagaccaccgatggggtgatcagcttgtaggcgggcacttccttgtacagcttctcgtaggtggccttgtcgaacagcacctggttgttcagcttgtccctgacttttcccttggaccacttcttcttcttggccttgccgccgccggatccctccttcttcttttgtgtcttttgcggctgcttggccgaagacttcgcgtccttcttaggcggctggaatgttgcaaagaaaaacgggcttgtattaacaacttgcacttgaatcccagacataaataaaccccattgaccaccattgagcagcacctggagttgcttgctttcgaggttaaggcatgcttttgttttttgcccgcattttcacattttcccacttgagctgggtgttgttttcatggcccagccctggggcggcacttcactcatattttgcctccatttgcgggccactttcacagtgaaaaactattattttcgcagaatttagtagcagcgaactcaccatcgtgaaaagtcaatgcagaaagatggagggcggaaacggccagagttaccatccatcgcacgggttgctcgcctgcctatcgatagttggtggtggagtgtataaaaataccaaacactattcataacggatttcgtagatattgaatatgaataatctgcatttcttgggaaaattagacttctcacatttgtgaacatggaattaaacaattgttttgactatcgaaacatttttggataaaggtgcccgttgcgcattcaaagtgtattttgtcattctgagcaacggtcacactcctacgcatgtcaaacaaataaatttaaataattggcaaatcaattgcataaaatgaaggagttctgccgcacctgcggcaagaccgtcgtggccgatgaatgccttcagatcttcacgcctgcgggccgaaagttgctgcagtgcgtccgttccatcacaaattgctgggtaagtgaacaattccactcagtagtttccgtatccaaccagcgattgtttcccatcttacagctgcagaatgtccaggatttgcccaatcacatatgtacggactgccaggtgctgctcagccaggtgcaaaagttccggcggcgttgtgccaagatcgagaagtacttcgccaggcggcggaggagaatgaatctcggcgaggctccagcggccatggagcaacttcgcgtccagcaggcagctgctccggatccgctgggcattgacgagctgatgtcggccagtgacatcaaaata

SEQ ID NO: 14555 - DNA, 547 bp, DROSOPHILA
atgtctgggattcaagtgcaagttgttaatacaagcccgtttttctttgcaacattccagccgcctaagaaggacgcgaagtcttcggccaagcagccgcaaaagacacaaaagaagaaggagggatccggcggcggcaaggccaagaagaagaagtggtccaagggaaaagtcagggacaagctgaacaaccaggtgctgttcgacaaggccacctacgagaagctgtacaaggaagtgcccgcctacaagctgatcaccccatcggtggtctccgagcgtctgaagatccgcggctccctggccaagcgtgctctcatcgagctgcgcgagaagggtctgatcaagcaggtcgtgcagcatcattcccaggtcatctacacacgtgccaccaagggtgatgaggcgtaaatgaatgttttaccttttgcccatctcgcatcgccgtagtcgcactcgccttacaatagaactctgtatcgatagcactacgatgccgctgtgtgtgtaacgttgaataaacttgctttcttattgatgtaaggga

SEQ ID NO: 14556 - protein, 136 aa, DROSOPHILA
MSGIQVQVVNTSPFFFATFQPPKKDAKSSAKQPQKTQKKKEGSGGGKAKKKKWSKGKVRDKLNNQVLFDKATYEKLYKEVPAYKLITPSVVSERLKIRGSLAKRALIELREKGLIKQVVQHHSQVIYTRATKGDEA

SEQ ID NO: 14557 - DNA, 3274 bp, DROSOPHILA
ccaatcagctgaccaacgaggtttaccataccaattggctggaatgtcggccaccgattcgaaagttactcaatgcctacatggagcacctgaagaaaccggtgaccatccgggctggcaacttcttcgccgtgggactaccaatttttgttaagaccatcaacaacgcctacagtttcttggctttattactaaatgtatcgaattaacatgtcaagcttttaataaatattactgaatgcatctgaaataataaaacctgttttctgaattttaagaatgggacaccattattaaaagcatatgttataaagagatattaagtcacaagtaccataaaagttttatagattacataatggaagtcatatagaaagccttaccatcaaatgtattcaaattcaagagtcttgaaaaatatggaacgtattcaaaattatttcaagaaaaattcatatgtaaacatgtttaccggtgaacaggcttcattgcactgatgataaatcgtcgaatttggtaataaaaaggggttttgaatgatgagttcttcccctaagaatcctgcttccaattgcgtgtcttagccatttagtatcggtcaacaattaacgtatggtaatgtcgacaagctaattattgtaattgccctgctcattagttgtataaatattttggctggttacctaagtaaatcagggacggaacgcactgagaactaagctcacaaaatgaaccggttccttaaaatgtaatataatcacaaatgaatatatatattgttataaaggatgtcagcagtaattttaaggaactagaagtgaactaggatgtagaaagtaagttcaagctggacaaagtaaaatgataccaccctagttcaccttgaatcaacaaaaaattccacaaggctacccattgaggctattaaaactcaaaggttataaaagccttaaaatctttcgagcatttcattaagttaattaaaactaagctgctggaaatggagtctacaaatcgcctaagtgccatccaaacacttttagtaatccaacgttggataggacttcttaaatgggaaaacgagggcgaggatggagtattaacctggctaaaacgaatatatccttttgtactgcaccttccactgaccttcacgtatattgccttaatgtggtatgaagctattacatcgtcagattttgaggaagctggtcaagttctgtacatgtccatcaccgaactggcattggtcactaaactgctgaatatttggtatcgtcgtcatgaagctgctagtctaatccacgaattgcaacacgatcccgcatttaatctgcgcaattcggaggaaatcaaattctggcagcaaaatcagaggaactttaagagaatattttactggtacatctggggcagccttttcgtggctgtaatgggttatataagcgtgtttttccaggaggattacgagctgccctttggctactacgtgccattcgagtggcgcaccagggaacgatacttctacgcttggggctataatgtggtggccatgaccctgtgctgtctatccaacatcctactggacacactaggctgttatttcatgttccacatcgcctcgcttttcaggcttttgggaatgcgactggaggccttgaaaaatgcagccgaagagaaagccagaccggagttgcgccgcattttccaactgcacactaaagtccgccgattgacgagggaatgcgaagtgttagtttcaccctatgttctatcccaagtggtcttcagtgccttcatcatctgcttcagtgcctatcgactggtgcacatgggcttcaagcagcgacctggactcttcgtgaccaccgtgcaattcgtggccgtcatgatcgtccagattttcttgccctgttactacggcaatgagttgacctttcatgccaatgcactcactaatagtgtcttcggtaccaattggctggagtactccgtgggcactcgcaagctgcttaactgctacatggagttcctcaagcgaccggttaaagtgcgagctggggtgttctttgaaataggactacccatctttgtgaaggtaagatttccgcaaaagtttaaaaaagatatcagataactttaaagctttatataaataggaagatgcacatcttaattttcttaatatatttctactctctaacccataacttttggcagaccatcaacaatgcctacagtttcttcgccctgctgctaaagatatccaagtagagtgaagcgtgagtagggatccgccgactgctgcggcgccacaatggaaacgcacccacgggtcggatacgtaacattgtaactcatacgccccgttgttgtgaacatgaagaataaacgcctgcagccaacaaggcatttcgccagctattaaactaagtgtcgcagccaaaaagggaacaagaaatcgggctagcctgcgactagacgtcgttggatatgagaatgagatatgcctgctaacaggatacaaacaggacccccaaatcccgctcccgccatcccgttttaagaccagcggaagcacgcgccgctgcctagtgcagcgtgaacttccacggagacattgttggcgcacaaaagaaatacaaaatacaaaatacgaaacgagacgagaagtaaagaaaggcagccagccaacggatatgcgaaaaacgcgtgcaatgcaagtgtgaatggcggcgctgctgtcccgccggaagtgcattcaaagggttaagcgcaaatccgcacaatggcagccccaacctccaacccgcagtgctggccacatgagcttttcacttaccatttgggtcctttgtactcgtcgcccggagttgcgttcggagttgggtagccggagacggatcctgggccgtagttggtgttggtgctggtggtggtgctggagttgcccgcattgttggcggcaacattttgtgttgttgtatttgttaaatttaatgatgtcggcgttaaaattattgttgcagcgttttgtgtggcgtcagcgccagcctcatcctctgggattttctgtatgtctaatttggtatgcagcgggcgggtgggcaggatgtcgccctgtgagtcctgcggcgctgcaccttgtgtcatgttgtcacctggcgccagtgcccttttggtgttgttgttgttgcttgacggctgctgttgctgctgcagctgccactgatttggctgctgtctgctgcgttttgctgtaagtggcaaacag

SEQ ID NO: 14558 - DNA, 1152 bp, DROSOPHILA
atggagtctacaaatcgcctaagtgccatccaaacacttttagtaatccaacgttggataggacttcttaaatgggaaaacgagggcgaggatggagtattaacctggctaaaacgaatatatccttttgtactgcaccttccactgaccttcacgtatattgccttaatgtggtatgaagctattacatcgtcagattttgaggaagctggtcaagttctgtacatgtccatcaccgaactggcattggtcactaaactgctgaatatttggtatcgtcgtcatgaagctgctagtctaatccacgaattgcaacacgatcccgcatttaatctgcgcaattcggaggaaatcaaattctggcagcaaaatcagaggaactttaagagaatattttactggtacatctggggcagccttttcgtggctgtaatgggttatataagcgtgtttttccaggaggattacgagctgccctttggctactacgtgccattcgagtggcgcaccagggaacgatacttctacgcttggggctataatgtggtggccatgaccctgtgctgtctatccaacatcctactggacacactaggctgttatttcatgttccacatcgcctcgcttttcaggcttttgggaatgcgactggaggccttgaaaaatgcagccgaagagaaagccagaccggagttgcgccgcattttccaactgcacactaaagtccgccgattgacgagggaatgcgaagtgttagtttcaccctatgttctatcccaagtggtcttcagtgccttcatcatctgcttcagtgcctatcgactggtgcacatgggcttcaagcagcgacctggactcttcgtgaccaccgtgcaattcgtggccgtcatgatcgtccagattttcttgccctgttactacggcaatgagttgacctttcatgccaatgcactcactaatagtgtcttcggtaccaattggctggagtactccgtgggcactcgcaagctgcttaactgctacatggagttcctcaagcgaccggttaaagtgcgagctggggtgttctttgaaataggactacccatctttgtgaagaccatcaacaatgcctacagtttcttcgccctgctgctaaagatatccaagtag

SEQ ID NO: 14559 - protein, 383 aa, DROSOPHILA
MESTNRLSAIQTLLVIQRWIGLLKWENEGEDGVLTWLKRIYPFVLHLPLTFTYIALMWYEAITSSDFEEAGQVLYMSITELALVTKLLNIWYRRHEAASLIHELQHDPAFNLRNSEEIKFWQQNQRNFKRIFYWYIWGSLFVAVMGYISVFFQEDYELPFGYYVPFEWRTRERYFYAWGYNVVAMTLCCLSNILLDTLGCYFMFHIASLFRLLGMRLEALKNAAEEKARPELRRIFQLHTKVRRLTRECEVLVSPYVLSQVVFSAFIICFSAYRLVHMGFKQRPGLFVTTVQFVAVMIVQIFLPCYYGNELTFHANALTNSVFGTNWLEYSVGTRKLLNCYMEFLKRPVKVRAGVFFEIGLPIFVKTINNAYSFFALLLKISK

SEQ ID NO: 14560 - DNA, 2823 bp, DROSOPHILA
gtgtccacaatatcggccgacttccggctggttctccgttcgtttagcgagataaagggtggccttgaatcggactcatcgacggattccaatagaacggccgcatccagacaattgatattgcgcagtgcattgatcagcaggttataggcggtgggaccacgctgggtgatcttcaataggagcctacgatgctgctccacacgcacatccttctcgtccatgttgaatggcttgccattgagatcctgcgtatttcttagcatctgaacggttaggatgccctgttgcacgcactccatggccagacgctcgtagttcgtccattcaaccagtatattcagattcttgcgtatatgctcgcgatgcctcttcggcattccaatctcgagctccggcggctgcattccggatatggcttccacgcgttccggtgactccgcttattgggcgcgccaaggatggctgccgtgatcagtctccaattggcagtggtattggcagtgaatcacccgtctccaaggttttcccgggaatgatttcgtttatcgctacttgtcgattctttgtctccgctttgttgttgtcgtcgttgtttttgttttgcgactttcaagaaaggggcacaaatcggcggccctgctggtgtccttatttttccaaaagtaaattaactagtctatatattgcactagatgatcctagcaaggatcggggatcttcgaataggatttctttcgaaacaaaaggaccaacgagcgtttcgcgccgccaaactcgccactaaactaataaatgaaactttgggattggtgtggctgcttgtgggtgcgccattttaaccagagaacgcgtccgggataaatccatgacatgaaccgtctccatgttccacttattccaccattccttcattgccgcatcaaatgattcaatttaatactaaataccaaataccatatggggtcagcctaacaaaccgtaaacataaacaaaagaaatggaggaggagcaacaatttacgccggaaccgaaaaactccgcgcaaaaaggcgcagaaaagcctgcaaggattccgagagaggtgaaagttaagctgcaaaggcaactaaacagactgggctactcacagcaaatcctgctcgaagcagccaagcagcaaaatcaaaataattcgaatggcattctccgtgagttttcttaaaacatgcataatgcaataaaagtacattgtcccccaatcccttttctagagtatgtggccgacatgattggcaagggcgaggaaatggtgaaaaactgcgactccgttagcttaaacaacattaaccagtggctggagctcatgaaaagttcgcaactcgctgaactctgcgaattcgaagcagccgtcgttgtgaactccataatccaaaatgagacaaagccatcgccaacggaactgaacggcattgacttgaagtaggaatggttttgataaactacatttgtatttagcattgtggtactttcagtgaggcctacaagtttctggaaaacgctttgatgggccagccgcaaaagaagatgagcgatgcgaccaaagaatttttgtccaaggaaattgaggtgagcagaaggctgcatcaactttccaaaatagttaaaaaaaaaggaaatcctaatgccaacagctgctcatagagaaggcaaacaccgacgaatccgacgatgtggcacgcagcatggggcagcgtttatttgaccaccagtttttggattacatggaacagcggcaaaagtgcagtttggatccactattcctggacgagaagctaacgtagaggctgttattgagtaattgaggaatttagcacacagagcatttattcatttccacacatttattaaacatttaaattcaattgtttgttacatacgtacattgtcacacgcatttgcaccgctccattatcatcaatcaaatcatcggatcccacgtttatacattattagtattactatgccaaatgccccaacctttgtacgtattaatatttgataattacactcttaattaagtacttgactataaacagttttagcacatttaaaatctagaattcctttagttgtacacaattacttcgagtagtgtaagaaaaagttgtgggtctttggcctttggattctctcaattgcataacatttattgtgcatgattgttttcaattgttggggctgccaattagcattgcatagactagtgtagagataggtagtttagttttaggttttgctacgattagctttgttttaaactttaagaggcataaaaacagttgagtgctgcttgactcccatagcatcacaatagaatcacaagagacagagttggcttcatttcaattcaattcattagaggatctaggatggtacacttacgataacataacgtacatacgatcagaattacatacaaattcgaatacaaatataatacccttttgttttaggcgcagttactagcactaaaacgatcttcacacaatcaaatgcaattcaataatgtacataatataactcttaaatgttcagtccagtttgagcttttggttttcccctttttctttgatttagattttgtttttaattttttcatttttaaatttttttttttgtttcttgtgtttaggtttctgtcttgtcgcgtaaacattaattaaaattaagtaaatctaattatatatacgtacgattaaacgctagtaaaccatatcgatatgcttgtctaaggtgaaataaataaacaacaaattcggaccgaacaaaatgcaaagcaat

SEQ ID NO: 14561 - DNA, 642 bp, DROSOPHILA
atggaggaggagcaacaatttacgccggaaccgaaaaactccgcgcaaaaaggcgcagaaaagcctgcaaggattccgagagaggtgaaagttaagctgcaaaggcaactaaacagactgggctactcacagcaaatcctgctcgaagcagccaagcagcaaaatcaaaataattcgaatggcattctccagtatgtggccgacatgattggcaagggcgaggaaatggtgaaaaactgcgactccgttagcttaaacaacattaaccagtggctggagctcatgaaaagttcgcaactcgctgaactctgcgaattcgaagcagccgtcgttgtgaactccataatccaaaatgagacaaagccatcgccaacggaactgaacggcattgacttgaatgaggcctacaagtttctggaaaacgctttgatgggccagccgcaaaagaagatgagcgatgcgaccaaagaatttttgtccaaggaaattgagctgctcatagagaaggcaaacaccgacgaatccgacgatgtggcacgcagcatggggcagcgtttatttgaccaccagtttttggattacatggaacagcggcaaaagtgcagtttggatccactattcctggacgagaagctaacgtag

SEQ ID NO: 14562 - protein, 213 aa, DROSOPHILA
MEEEQQFTPEPKNSAQKGAEKPARIPREVKVKLQRQLNRLGYSQQILLEAAKQQNQNNSNGILQYVADMIGKGEEMVKNCDSVSLNNINQWLELMKSSQLAELCEFEAAVVVNSIIQNETKPSPTELNGIDLNEAYKFLENALMGQPQKKMSDATKEFLSKEIELLIEKANTDESDDVARSMGQRLFDHQFLDYMEQRQKCSLDPLFLDEKLT

SEQ ID NO: 14563 - DNA, 2696 bp, DROSOPHILA
tagatctccctgaagttgcgccgacatggttgattgtggcggcggcggagggggcggcaaagcggttcgagtgccattcgacatgtacatggtgctagcctctcgcggatgcagatgcccggccagtgaatggggatgatgtgtggtcgtgaccactgagccggatccaccgccattggaagagctggtgcggcagaggccacggatcttgaggatctcaccgccgcgcaggacctcgttaagtatgtcgttggaaactgtggcctcgccgctgtacatgtactgaaccaggatctggatggcgcgatggctaagatccggcggcaggaccacatacagcactccattgggattggtgatcggtgccgtttcgaacatggtggcgaagaactgggacgaagcactcaggatgaacttgtgggccgagatgcccactgtgggtatatccgaggggatgccgctgctgttgtaggagctgtacagaaccacatcggcgaacttttcgttcctaaaggggaaatatgatgcgttaatatagcatatctacgtattttgtagtactcttggagaatattgaagaagggttcttagaaaatgtgtgtttaatcctctgaccctgatacatttaatgtttttaacattaaacaattaaaaacgctgctagatcacaattacaaaaaacaaaaaacttcaaatatgtaccaactatggtacagtggtacttacttataaagtgtggctatggaagagttaagataggtgaggtgtgagtcccacttaaggtgatagttttcggcggccatctctgcggccggcagctcctgtacaacgataaaatcaataaataaatcaataaatgccgccagtggggtgtttattttgaatctcccgatcccaccacaccacccaaggagtggtgaatagagggtttagccaccatgctcttgtgacagcatatttctcacacgaagcaacggtcatacttattcgctagcttccatttgtttacatattttcatttgtgtttattttgaaaatatcaaaatgtcgcagttcgacacgcgacttattgagctggttagggctaatcccaagctttatgagcgcgaacttagaaacgcaccctacgaagcgcataagaagcgacatccggaaatctggagcagcatcgccacttcattaaattcagaaggtaagaaactgataaattgtataaatattccctaattcctcattatattttaacttagctagtgcctgtgtcagtcgttggaatcatctggtggccaaacagcgtcgggagctggccaaagaaaaggccggaggcactggctccgattggagtcttctgccgcatttgaaattcctgcagcatcaccaccatccgattaatcaccgaaattcgggtgatctgagtaggagcacactgaaatccagcgacgaggtcaacgatgatgaggatccgctccaggaggccatggatgagcagctggccgttgcgggagctgcaccagcaccacccacaaatcctgcccatgcaacgccagtggctcaagcagaaaagaggatagaagccctgcttgaaggactgggcgaagcaaaccgaattaaggcggagaaacgcattctggcctacctatgcaaatgcaatctgcgcgccctgaacgacgagcaaatcgatgatatagttatttaggaagattgccaagatgatatagttataaaggaagattgccatgatgataagttaaatacatacatgccgtgataggatatcaaaagtagcaaacatcactgatcatataattgtttaataattaagtcatttttgttatagtttatatatctggacaattatcttaagcgaatactaaataacttctttttccaaatgtatgcttccctaaaaaatattgttaatccattcatttaacctaatcttcgcatctaatgaagtttactatacaaactaactattgcattgtatgatatgataaaacattaacacgcctgtgattaaatagtttattttatttgaggcttaagattagcaatttaaaattcaagacaactggtaaaccccaaacaaagcatcaattgtcgccagaggtcatttatagagccagagacttgcgggagtgtatagtaatgcagtaggaagctatctgtgtggcaaaagccaactttgaacaggcgggcggggagcaggtggagtaggcgagggaaaatcgaattgagccacgccaaaaaactcctactatgacgcagctgctgctgggaactggtcaaagagtcaaagaatgcgcgcgcaagcaataacatgtccaatatccatgtctggatcggatcgggggaaggcctccagcacggggacagggcgacgacgacgccaaaacaagcatttagtttattaatttgacgactgccgcagggggagcagtgggccgaaacaaaaacataacgagcgaggagcgtcgtgcacccttaacgactgatgccacactaccactaccccctcgtaccgactgagtcccccttacttcacacgtacatggtgaaccctccgacgcactaagccactatatgaaccaactactcctacggccagccacctacccactagaccattcccattcccaatccccggactcagctcttggtattaacaccgtattatcgattgatttccagcacaa

SEQ ID NO: 14564 - DNA, 638 bp, DROSOPHILA
tttgtttacatattttcatttgtgtttattttgaaaatatcaaaatgtcgcagttcgacacgcgacttattgagctggttagggctaatcccaagctttatgagcgcgaacttagaaacgcaccctacgaagcgcataagaagcgacatccggaaatctggagcagcatcgccacttcattaaattcagaagctagtgcctgtgtcagtcgttggaatcatctggtggccaaacagcgtcgggagctggccaaagaaaaggccggaggcactggctccgattggagtcttctgccgcatttgaaattcctgcagcatcaccaccatccgattaatcaccgaaattcgggtgatctgagtaggagcacactgaaatccagcgacgaggtcaacgatgatgaggatccgctccaggaggccatggatgagcagctggccgttgcgggagctgcaccagcaccacccacaaatcctgcccatgcaacgccagtggctcaagcagaaaagaggatagaagccctgcttgaaggactgggcgaagcaaaccgaattaaggcggagaaacgcattctggcctacctatgcaaatgcaatctgcgcgccctgaacgacgagcaaatcgatgatatagttatttag

SEQ ID NO: 14565 - protein, 197 aa, DROSOPHILA
MSQFDTRLIELVRANPKLYERELRNAPYEAHKKRHPEIWSSIATSLNSEASACVSRWNHLVAKQRRELAKEKAGGTGSDWSLLPHLKFLQHHHHPINHRNSGDLSRSTLKSSDEVNDDEDPLQEAMDEQLAVAGAAPAPPTNPAHATPVAQAEKRIEALLEGLGEANRIKAEKRILAYLCKCNLRALNDEQIDDIVI

SEQ ID NO: 14566 - DNA, 17212 bp, DROSOPHILA
agtcattcagtccacgaaacatctggttgggtataacacgaccatcggtcatcttgtaaaaggctccgcgtgggcaaatggcacactcctctgttataataaacacaatggctgccagccgttcctcctccttaagcttgaccacttcagggcggctgataccagccacctgattgcctacgatgtcaaaagtggggtcctgtgtgcgtacaatatcagaaaaaccaccaccacatttacgtactatcaactcaccagcttaacgtaggtcatcaggctgggatctcctataaatggctcccttgccaatatagtcgcctgaaatatcttggggctctgtacgaacggcagcaactgccattggaactggtccagactgtagaaatacttgcgatccttgagacagtcattagtgtagccaaaggcaatgtagtaatcgttcttggtggccgtaatgcgaccccaaagatacatgcccgtaaaacgattgtcattttgtaaagcgatcagcgagttttcaatcaagatgcgctgctccggcgacagcttcatgccgcagtacattaggcagtcgaggccctcggtgaagaactccaaattcatgacgaaagtatcttagcaatttatatgtgaagtgttgaaataaaatatggatttaagtgctgagagtatttgaaagaaaactcagaaccgtaaaaaaaaatatgttagcggaatggatttttaattacatggcatgcataaatcagcacaaactctttgaactgccaatttcccccatttattcatctctaccctttctctttcaaggagctgctttctggacaaatgactggcgaaaatcactctgtcagtgctccgaatgcctgtcgctttacaaggaacttgccgtggagtttctgctggatgtcgaggattcggctaagacgtacgaggagcgcggcatgaagcgggctgaagagaattccagttatgagcaaggaatccgggcactggcctccattgaccggacacagcaaatcgatgcgattaccgaatacaatcgcatgaaggacaagctaaaggaatacctgcaggcattcgccgccagcaagaaggtagtgaccgaggaggatatcaatcggttctttgccggcatgcgcaatgagaacaatgccaacctgggtcagccctatttctgtcgctaaacagttagcactctatattactctagtattacccacattcccccatgaaagcgaaacatacatacatacatcatgtaaattctaaagttatattttatttaaacaataatcattttcaattcacttttgtcaataacgaaaagtcgtaacaaggcatcgggcaatgagattcgcatttccctcattaaatttatgtacattgcggtaaaatagaattatataagacaggttttgtgttgaagttcattttggattgagacctttttacatgtagctctaattggttaatttccgatatattttatgaaatatatgtacactagtatttagcaaagtttgttgttcatttgaatggctgaattcccaagctattgagttctgcctcaatgtcctggataagttcgctggtgtcaatgggcgccatgcctatgctgctggaaattagatcactaaacgattgggtgggttcatctgctggaggttgctgctcctgtggctgctgttgctgttggtactgcgactgttctggatgggattgggccagatatggaatggactctggctgcaattgcggcaggaactgctgagtctgttgatatacctgtttaatgccaaaatttccttgtggcggtatgcttatggcactcattttctgacttaaaaagtcattgttattgttattaattagtacattgttgttattattgattggtgtcatagagccaccactgaaatgggtaggactacagccgtttaccggaaagtttgaattctccggcagatacatatggttattcctctgtccgatttgaaacggcggaatgctatccactgtactgcaattggacgaaggcgatgcgaaattcccattaaatgtgaagtttgtggcatctggcaaataaagatgagtttgattttgccccatttgcatcggcggaatactatccactgtactgcagttggatcgaggcgaagcgaaattgcgttccactgatggacactggctactctggctatccacatccatgaatccattctccatcttgatatcctgcacaaaattgggacttccgccgggaaacatcaaaggcataccaggcgacacctgtgtctgcggtgttgtggtcgcaatttgtggcttggaaaatatcgtatactggcctagaaaataaataaaaagttgttagccttgtgtttccagtattaacgagaaaagcgtttcaaaacttaaaatgcttttattaagataagcataattaagataaaactcaggtaaaactaaagcaatttgcgagaactcaaaagggacaacagcagcaagccacaacatcaacctgccttggcagtatcaacttacattatttgatgtccaactttggtggcaaaaatggagtttgatggaaactagacaaaaattggaagggtagacacattttcggttgtccgaatacttaaagatacccttgccattcaaaccttttgcttattttaataaacttttttagagattggtgatctaataacttttaattaataagatgaaaaattgaagtcgcagcaaaagttttttaaagtttaaatagtacgtataaaataatataaatattattaaatataatttattgttaacggacgaatataatcgctagttaaacatttaactataacattattttttgatttctttacaggcaagagcattttaaaattttaagaaattgcaaaatagttcaatgccacgacttttacgaaaatcttttattcattaatattgaatacaataagaacgggtgaaacaaacatttttctattcgaacggtctatatattcattaatggggttcttcgactacaacgttacatttcccaacaattctgggacggacaacaactttatccattggtccacaaggtattcaatcctgtactatcaatagtgaattttcagcaaacatttttgctagtcaatataaataacaccatcgagtgatgagtttgtgtatttttgtgtggttaatgagtttttctaggaactgcacagatgaaatgcttctataaagaaacccagtcccggcaccagtataaatgcggaaaattcgtgaaaacttactggaggttttaacctgcttggatggatgtaaattggtgctcatgagactgcgctttaggctttcaactgttttttgggcaacacggcgattgtgtttggttaggagttctacaaagatatttaaattttatgtcgattaaaaaaagatacgtatacaattgaatttggtgagcgatcgatctcaggggttcttagctagaaatttgtgtaatcattataattaatactgaaacaaaaagacgactagaaaagtttaatttgttggtgcagttgtgtgttttgctgttaagcactaactaatgctagggttttggttaactgattcgattataaatccgcacatttaagaaaatatctcgttatcccattttgtcttcaaatcagttatccgtaacccaattcatctactccaagccatttgcctccgccagccgccgtgctatttcatccgcactcaaaaaatcggtcgtatccactccaccagttgctgctccaccttcgccgcactccccgccaaatggtggttccggacttttgctggtgtacaaagcaaagtgttccgcctcggagagatccacactgggatccagcacaacaccataggctccctcgcacagattcttgatgctctgcctgtcggcgatggcaatcaattccatattgccgtcacttatgggaatatccgccagttgcagagtgctcagggtcttcctatccagcggtcgaccgtaactaagggtgctggcattcgagtagctctccggtcgtagcaaactgttctcgctatcgcctcccttcaatggtatgtgaataacatccgcatccaggtgggcaggtcttttacccgatacactgctcgaactacgaccgactggcttgccatttcgaccctcactttttcccagtggctgcatcgatcttgtggagctgcgattgggatctcccagggaaaagtgcgcaacgcttggttccctactgccggtgggtgttgtggctttcgatccccctggtagttgcttattggggctgccaccaggtgtcagagattcttcgtcatccgtcttgctccttcggcgagaaaagaatctcgagaagaatccctgacgcttctttggcgaagcactgggcgtcggttgccttttggtgggactttgatcaggggttcgcattataattataggcgaaggtgtagttctattggagcttaggctgccgtttcgcgagcggctcacagaaattgaatcactgacagcactcagatcctgggagtttctctgcggtttcggtggtaagggaggtaatctctgatctgaaactggggaaggagttcgaggtggcaatggcaggggcggtgaggctgggggcgtggctggtgtctgagcagcgttcactttgatcctgggagctggtggatttgtcagcaccaccagttcgtcatcatctagctgaccaaacggattggtgggtggataaatgggggctgcttgtttgctttctttgggcaatcctatgtctatgggattattaaaggctatttgtaggctcgtatatgtggctgtctcatcgaagttttcatctaaatccatagaggcctgggcactggctgaaaccatttccggttctttttcattttccggtagctctttcacggccggattctcgagggtatccctgcgagaaccattggccaaaagaccgtgggcttcctcgtccaactggttcgttatggtcgtattggctgtcaagctgctgacattggtaaatgctgtttgggccgtgctattcgatagggattgcgtgtccccgttctccaccgtcaggctatccgttctctcgaactcgctgctcttcatccactcggtgattgtttccacattggacaggggtcgcgattgcagctgcggatgctgcagaatctcctccatcggcgtggacgtctgggtgcagtcatcggccagttggggcaacaattgcggaacctccagctctatttccatatctggttcgttatcgttatccgtgtactcggtgacagtgccaccatccatttcgtgcgattcacccctctgacgcatttgcattttcttgacggctatctcgaattcgttgagagttcccgaactctgttggtcatcggatgaaaccgtgttattatcctcctccagatccatcggtgggcacgagtatttcgtggccgtcgtttcgctgtctagggaaaggatctgctggaacacgtccagttcctggcggcgtttcaactttcgctgtagccgggcaaaggttactgtacctggattcgggtagtactcgaacggcagtggggcactcgtcgctccatccgagggtctcactagtttcagctccacctggaaggggggaaaaagtggagttagttctatttcattcgtgcaaaaaatttaaactcggaaaattaatgttttcggaagtacaagtattcgattaatggtacttagagcgcaaatgctattttcagtttattttacgttattaaatttgttttttttttattgtaaccattgatacatatggaaaatccgttgtgtgcagcatcgagaagtgctctattttattcattaattgcactttttaaattgccgctcgacatgcacatgtcaattcagtcacttttagataacagagataagtttaaataaagtattgaaattatttatttaaaaaactgaactcacattaacactttgtgtgatctcggtgttcctgtagcgcggcgtcttaaaagctatggccatctgtttgaacacgtccgtgggttggaactctgcgttggcgaaccacgtctcccgtccatccttgtccgtctcatagaatcgcacctcgatgtcgtccttggcaatcttctcgcacagcatgatgatctcgtcgccgccgttcgcagtggccgcgcaactgcacagccgggtgatggtcagttcgctgctcttgccgtaaatcggtgaggatacgatgggatccaggggcacttttgagttgcccactgtgatgaaggcctggtagcagaggcgcaactcataccgattgatcttgtcgatctggtccttgtgatcgaatttggctgaaaggaaagtatagttactaaaataatagtaggaactattatagtttgaattgcaggaggtatcatatagttttaacatccttaagtaaagtgttaataagatgactcaccattgaagggatcgatgtttctcctttccctctccaccagcgagtcgcgcatctccagcttcttggcgcactgtatgcccactttttggagcaccagccgccgctcctctggcggcaatttcttttggtagatgcccgacttgcaggcatccgcctcctccttgctgaccagccagtggggatgctggcggaagggctcgtcgctcgtcacacaggagaccacgatgatgacgggtccatcgtagttgcacacttcgatggtgggaaaggtcttgcccgtttccgagctggagttcatgcccggaatcgaaccggcggtgcgaccctcgcatttgtagcgaaagcggattatattgcttgtcggctcctccacgatacgcaggtggggaccacttcttgcacttggctcgggcagattctgattcatattctgattctgcaggtggagcggaatgtgcgacggcattaccggcagggaagtcgactgcgataatatgtgatgtgcagcaccgcctccgccaacagctcctgccacactgcctccgccggtggcgccaccattcaactccatgctggcattgataatttcctctgaggaaggtaagtattaagcagaaatcaataagtcagcgtgccagaaacaatttagcttaggctaaggaagagaactagggaaaagcgagctccaaacgccctccaagattaaatagagtgcccgtgcataccaatttgctcagacaaccaggtaaccacccttcttaggaaagtacaatttgatgttaaatattttaaataaatgttgtatcatgaaaattgaattttctttttagattggtatatctttaagattgatattaaaaaaattaaaattgatattatatcatatttactacaagtaagtaaagttttatgcctggtttttgtcaagaaagtattatgaatggtaaataccgctcagaatactacaaattcttaaagtgcttcgaaaactgaactattacaagtttttattcgtctatccgagaaaacataatttaccctgctgaatcgaaatggaaaagtgaaattgcggataatttgtatccatcagatacgcatgtatgaggggcattaggttgccattgttcattgcggaagggtgatggctcgaaggcttccttcttccatttcaattcaactttgtttttgccagatgtcgactatgcgatgacgaggtctgacgtcaaaacttgcgcagctatttgctagtcttattatgccactttttcgatatttgttgttgctgctgctggcgttttattccgatggcaacagcaacaccaaagtatctatagccaggcccagagcaataacaatattcaattagccactaaaaattccccacaaatctgatgctttctggatgggctaattaggcgcattgtcgattgacttatgcccacagattattcattaccccgagctcttgctctatattttttttaacccataatgggaattaagggggctctagatggggctagggtaatattaattggggttagtatgtgccatcaatttatgggtgtttgtacatacgtatatcgccgaaagcctcctcaaacattggattacacagttgattgcctgaaaaataaagcagtgtgatagattgtcattaacttttgcattaagctgttgtatgtacatacatatatatataatgatagattatattacatacatagcatttgctttgcctgtacaatatattctgatggatttttcaatttgacatattcaatcatcgtctatgttttacaagcattgtcaaaatatatacatcatcacattttagctatcacatatgtgaggaataaatcattatttacggaaaagattactaaaggtataattatctcttcaatcattttaatttgagatgtgacgccgcctagattaagttgctaatcttaattccgtttattccacttgtgttaagtaggtacttatagtttattgaggtgggcgaacgcccaaaactttagcaagaactcaaagtacactgggattttcaaaatccatccttgatctgatttattgagcagaaaaaccccatttccatcggccaagttattatcggtgtgattttttctttaccaggttgtgaccgataagaaaatctgtggcggcttggtgataatcaacaaaaggtgttactggaaatctctcagtatacctttgggttgcttattggtgataaccctatcaaaaggtatacaagtttacttccaggaaaattaatagagccatctaggccttgtgttccggttatcaatttagccgattttgttttcgatttgatttaaccaattcttgtatttaattaagtttttaagggatgtattccacattaaattctcttcttacaaaaatactatttttacgttacttattgctaaaaaaaaacttaatttgtattatgtatttgtattatgtatcttcacttaagagcataaacttatataatcagttgtatggaccttgtaagctcagagtccttggcttataatgaagtcaagcatatgtctttaccactaacgatttcccttagccttcgtccttttttatgtaggtatgtgttcaaaaaacagctactgtcgcatcgatcaaggttatcattgttagtcgcttgttggggataataacaatgtcggtgtaatgtgtatttaatagccgtagactataaaaaggccaaacaagtcattctctgagacacattttcccaatttcgctctacattccggcactgcagtcaacacatgccgaaagtattttgcattttctgcacataactcaacttttcaacaaaagaagaacacacactcgagcactgagagataaaatccagcaagaagtcatcgcttgggacagcctatttgtctgaatgccaaacattggcgtcgagcacacaagcatacgaaaacactgcgcgaaaaaaaaggaatttaaggaatttaatttattaaaaattaaacactaaatcaagccacgaaaaacttttaaaaggcgaacacaagtttttaaagaataaaattttctaaaaaagttataaagattttatataatagtggtgggattaagaacttaaattaataatttaaataggaatatatgttcctaatcatcaaggttttattaagaaaaattttaattacttgttgttcattgttttgaacacttagttattttgttcagtgcaggcacctatacaaagacattcgcacacacgtgggggcttgataaatttgcatatgttaattttgtttacatttatagccttgcaaaaacaatttgtccgccactggatttgcctttgttgttgctgtcattgtgttgttttttttttgtctgttttggttcttttgcaattcacaccacttgcttacactcacacttccacaaggagggcatgtcctctaaatttgtttacgaaccgcatgacgctttataggtccaccctctccaccccctgaaaaaaaacccacttccccgccccaggacggtcaacccccttcacgtgtgtcgaacatctaagctgagtaataagcaaatgcggccacaagaaaaataatattgagccttttaagtaaagataaagtaaatttgtatattatttgtacaaatacgcgtttctatatgctaaaaaggatttctcatatgcttaagccctaatgaaagaacaagttaggcagtaaggatttactttgttacaaaaagaatactctaggtgtttaattttaaagcacagaaattgtattagaactcttttttaaatatattttctaatttgggtatcgcaacttttttcttcagtgtagcagacgacgtggggcaaatgacatcaggaaacttttaagtatttggcgctagctgcggcttaactgccactgacagcagcagcatcgcttttacccaactcgctaatctctcttacacacagcattacacacaccaccatacaagcggcaacaggacgagcattaaggatgtcctggcgtgaaggggtgattggggtcatttcagcggtaccgtttaaatttttatgcaaaaggggtggcaaaaagctaaaccgtatcgattgtcctgcttatgggcataaataataaaggaactcaagtgtgacacacgcaatttgaacgtaaaattggcttttccaagaaacttttaaattcattaaatatagggcatatagtaaagtatggataacaatcaggagcaatttattcattaagccccattccaaaacttaatcctgacagtcattagtggcctgagggtaaagtgttcctaaaatagcaaaacaggctaatggggaagctaattgacttagatccggcgcaaaggaaataaatatagaattttaagtctaccaattagtcctttaaacaaagattttgtcaaaagcggtctgtatagatgagtatattgggctttattttattggaaagattgtaaaaataacttttcaagagatttctacattctcttcgattgtagcatatttatttttccttttttcattcttaatcaatcttcgaaaaatgtaaatatttcaaacatcaatattcttaaagcgtttttgccttgctctttggatttgttttttagatttcattaagtgccacaaacgcaaaaagctttccaaagcgcctaattgcttggttcatctcctcaggaccttcgcccaccatttttctcgtctagcttcaagtttcttcttcaatttgggaaaatcttaagctgaataatactttaagacagccggggctaccaactctcaacgagaaaaagaaaaaaaaaccgctacgcacaaatttaattcgcatttaggctcaagtgaggtggacggggctgaacgtggagggttggaaaaattctggtggcataaatcagagctacaaattgatgcataaataaagcgaacaagaaaggatgtcgccagccgaataaaaagtgagcaaggtaaaagaaattgttaattaaatgttgtcaaaaatagacgtcatcgggaatgaaaatgtcggttttgagttacgatagaatcgctggatcgtcgtctatctatctgaaaagtaatgatggcaatgtgacacactcacacacacacacatatttcagtagctagaaccttgtcacgtgcccaatcgattggaaaatcgcgttctgaaccgaaaataaacacacagctaaataggagaatataatggaatgggtggcactgggggagtgcttttgccggaatatgatgagatgggatggctagaatcccaaaaactcgcacacacacacagacacacacacgacattcactcaccgatggcctaatcacacccagtcgcacacacaaaattcaacatcaaacgcagacaactggccccaatccatccccaagattcaaccatttggcacctcaagtacgcaggctgacatgtgtgcctgcctggtcctgccgttgtcctgagtgccttgcattatattcggtatgtgcacaaaaaattaaattcaaataaaaactttctccacagcaccaattttgcctgtcgtcgtcgaaaatgaaaaaaacgaagagaaggcaaacgtccccaaccccggaaaatcaataagcgctggaaattatgattttcctctagttctttgacagtgtccttcacttgggccatgcccccgctgtcatttgcaggaaatccatttggctttctatatgcacggcatatataaataactaatgtttgtttactcctagatccgaagtttactgaggtcacaatcgattgaatttgtttgctaacgcaaacaacattttagatggctatgctatttatatgacacttgttcaggtgtaaaacaatatttactgcaaagtatgcaaatcttatttgatataaatcagatattttaaaacttattatgacctcaaaaacacatagtaaatgtataggttgttatttttatatgattttggagaacttcagcgaatatttggctagtttctatcgtaatataattttcggcttaacataatcgaattcttagaaattctttttcttcttattcttatagctccataatcttttatacaaaaattgattttagtacgcagcttaaatcgcttccagtttaatgaaggcacgctaaccaatggctaagcttcttttgctgataagcttatcaataagtaattcccagctaattatgaatcaaattcgactaagttaggagctaaaagttcgaagctttgaatgggaataaaacgatatttgtcacatttgacagcaattatgaagaaaataagtaaatagtacaacgacgaaaacgataaacacgaaataatatataatctccgacggtgtcaacttttattagggcaattttgaatggtcgaatgctcgaatcgtttgctatttttattttgtgtgccgtgttacttgaaaaatcataatgtataaaactaattaaaaggtaattaattcggttacatctaggttggcttcgctcatcaccacccatttgcagtcaaaagttaaattgtacagccaatcgattttcattgcctttcaagcaaatcaaaggaaacatttttgcagtcaagtaaataatgcccgagcaccccaaaaacattcccagaatgccgagccagaccacatcgcaccagacctcatttacccaagcgttggagccatttccattctaatggccaagacaaatcgttcgtacgtacattcgctttcagccaagaaaaacgaccgacacgcgatggccgaaaattggaggaaaccgcagcatttaattattttgctataaaacttttcacgattcaatcaattcagattcggtacaacatggcgtatgcgtaatgggattcagctatatttttccccgcattgtttgtaaaattgtgtggtggcgtgaattgtttgtagaacttgggctttggttggcgatgtaaatgtgaatgacagatcattttaaagtttagttggtttttgttcatgcggaaaatgaaaagaaatatatataaggtatagtactcaatctcacgccgggttatcagggagactagaatataaagccccgctgggattttcttcttgctgattaaagttcaagtcttatcagttaattgaaataagttcaaagcaattgcatttgctctcttgggttttccgaaaaagtgtacaagtattcaataaactgatcaagctgaattgactcttgaaaacaaacataattagtataagtttgttatattattttacagtaaaaatagttttgaatcgattactggtgggtgaaaatactatagcttacatgaagcttctcattgtgtattctttaaattttaatttaaattttaatttaaagaataagtaattcaaaggtttctgataattcttagcaacatatatttaaccagctctatccagagttcatcgttttgaccgtttctcaattgtttaccaattagacttgcaccctacacacaaatgtgtgtacaggctgtgaccttccttctcccgctggcatttaatttacaataactttcaattcggaaacaagtctgcttaatacaattggcaaagttatagctagactgcgactttatactgtatgtaagcaatcgcacacacatggaccaaaaggtgtgaaaagtgcggactttgtttgtgttttattttctacaattaccgaaaacaattccgctgccgttggcatcatcggttcatcgcccaatacaagttagatagctgctggctgggagcagataaatcgatatttgagtaagttttgaccatgactgttccatttcattctatttttatggattccgaaacggccaaatggccgaatgttttgcgtgcggataaggcaaaagtcttaaagactttatgccatttcgtgtctttcgattgcagtttcagttccacggttcaggttgtatattcctttgattacaaatgaaataaacgaaatcttccagatgccaccgcaaatttttataaacttttgccgtgccgatttcagttgtaaaaatatttacattttgttaatataaatatttgcatttgcttcgatttttttttttttgaccattgaattcctcttctttttggctcctcttgagcagattttctttcacatttggaaagttatttaaagactaactgagtagctatattcttccaattttttatatcaacgcctaaattatttccaatacaacagcttgaaatgtgaaaacgtcacaaacagctttggcactataattttgagataagagttataatgtttataattgcatacattattgctcttgggaggaaatgtctactctagggtgcagttccggcatatgttatgtgcaaatgtacaaatctgaaccagtatgttaatgatttttcgtagtcgaccaataaaacaagaaagaaacactgggactactagtaaatgtcgtactgagtgttattctcttttaataaatcgcagtcaaccgcctttcttgttttcatttgcatatattatacgcctgttgggttgcaaaactgcagttacactagcagaaatatatatttgctgataagcaaaaacataccatattttaataaatatttacgaagtattgcacaaagtctatatttaatgtattgatatagctatgcctataatctttcgggtgtttaggttcaaatcaaacaggaagtagattaaagaagtcacaaaaatatttaaaatatttcccgcatggacaaaaaaaacaaaataaaaataatacactaaaaattaaaattttttgtcgtttttttttgcgattacgcagtctagtgaacccggccgtattcccgtttttcacttcactattaataaatacaaatttcattacacgtggcattagataagtaattgcccgcatcggaaaattgtgtacttatttatgtatctgggattaaaatttatgaattccgccgagttgctggcacgtagttttttgcagtgccattgcaatcgaacctgacacgggaagctgtctgtacctaagtttctaaagccgccttctggaccggggactttacaaactacgccttaagctagctagctgactatagtttcagaaaatttattatagctaaccttttatggtgtagtaggtaggctgctttaaatgcttgattaaatttggattctcgatccgaatgcactgggtcagacagaaatcgaattagctctttgttgtgttgacacgtgtaattgattaaatttgtcttttatgattgactggttttcggtttatgtgtcggacttatcgcgcgcgactcacaaaaggcgcgccaaaaaaattatgaagaaattgaaaacaaaaacaaaagttgctcccacaagcgacgttgttgctccgctcatgtattttacttttgagttttgtttaatttttgctattgacactgcagccgcctgtttagagcggacattgatttatacacacatctgtagtttacgttgtagttgtcgtgcttcgtataattaaccaatacactggcagctatatagtcgcgtgcgacttgcacaatatgcgttatatgtacatctatatgtatatatatatgtatggatatctatgtgtgaacaagtcggcgcttcacgtccgtcggcggccaagttcagattgaaactgagcggttcgcttcacactcggctgcaagagagcttcggaatggcttcgatagctcaggctccattctcagctgttcgctctctgcgatcgcatgcattcggttcgtatacttgatacgtatacgtgatacgtatacgtgataaaaagttaccgctgctgatatgatggttgctgatcgcaactgacggagggtgccaatatctgtttttattttcgaaactgcttcacttttcctttatttattttcatttccgttgtgcgtactcaatgtttcgttctctctaatgtatttgtgttcaagtgcgttcctatgacgccatcgagcagaaaaaatggttatagatttttaagtggatttggaaaagtgttgagatttttataacgctctgcaggtgttccaatttcgattttcggctataagtaaacattgattcccttacaaaaaaatgtgtactttttgctgggaatgaaaatttattgttatgaatggtttggaaatatcataaaaattcaaaatacctaagatgttatttcacatgaactcttttctcattaaaaattcgtttaaaatagtgcacaggtttctggacaaatcaagatcaaaggtttattataagatcagataggaggaaaagtttttctttatgtgaatcattcgccattctggaatgagaagccgaaaaaaatcgacaactattagccagatgcataacaatagatctatttatctaatataggtatgacagctgaatgtttttattgattttcccaggaattgacagacctgaaacgagttcgaccctcggcaaatgtaaattataaaatccatacaacgttgctaattcacgccaacaaaattcccaaatgagaccgaaaaaagattcgccaacgtctaaggtcgaactgagttattaactcaatttttggcttctgttccatagacagattttagtcattgaaataaacacaagtgcagaccaaacacgtaggggaaaaatat

SEQ ID NO: 14567 - DNA, 3095 bp, DROSOPHILA
cagtttcaatctgaacttggccgccgacggacgtgaagcgccgacttgttcacacatagatatccatacatatatatatacatatagatgtacatataacgcatattgtgcaagtcgcacgcgactatatagctgccagtgtattggttaattatacgaagcacgacaactacaacgtaaactacagatgtgtgtataaatcaatgtccgctctaaacaggcggctgcagtgtcaatagcaaaaattaaacaaaactcaaaagtaaaatacatgagcggagcaacaacgtcgcttgtgggagcaacttttgtttttgttttcaatttcttcataatttttttggcgcgccttttgtgagtcgcgcgcgataagtccgacacataaaccgaaaaccagtcaatcataaaagacaaatttaatcaattacacgtgtcaacacaacaaagagctaattcgatttctgtctgacccagtgcattcggatcgagaatccaaatttaatcaagcatttaaagcagcctacctactacaccataaaaggcaatcaactgtgtaatccaatgtttgaggaggctttcggcgatatacaggaaattatcaatgccagcatggagttgaatggtggcgccaccggcggaggcagtgtggcaggagctgttggcggaggcggtgctgcacatcacatattatcgcagtcgacttccctgccggtaatgccgtcgcacattccgctccacctgcagaatcagaatatgaatcagaatctgcccgagccaagtgcaagaagtggtccccacctgcgtatcgtggaggagccgacaagcaatataatccgctttcgctacaaatgcgagggtcgcaccgccggttcgattccgggcatgaactccagctcggaaacgggcaagacctttcccaccatcgaagtgtgcaactacgatggacccgtcatcatcgtggtctcctgtgtgacgagcgacgagcccttccgccagcatccccactggctggtcagcaaggaggaggcggatgcctgcaagtcgggcatctaccaaaagaaattgccgccagaggagcggcggctggtgctccaaaaagtgggcatacagtgcgccaagaagctggagatgcgcgactcgctggtggagagggaaaggagaaacatcgatcccttcaatgccaaattcgatcacaaggaccagatcgacaagatcaatcggtatgagttgcgcctctgctaccaggccttcatcacagtgggcaactcaaaagtgcccctggatcccatcgtatcctcaccgatttacggcaagagcagcgaactgaccatcacccggctgtgcagttgcgcggccactgcgaacggcggcgacgagatcatcatgctgtgcgagaagattgccaaggacgacatcgaggtgcgattctatgagacggacaaggatggacgggagacgtggttcgccaacgcagagttccaacccacggacgtgttcaaacagatggccatagcttttaagacgccgcgctacaggaacaccgagatcacacaaagtgttaatgtggagctgaaactagtgagaccctcggatggagcgacgagtgccccactgccgttcgagtactacccgaatccagaactcctaaccaaacacaatcgccgtgttgcccaaaaaacagttgaaagcctaaagcgcagtctcatgagcaccaatttacatccatccaagcaggttaaaacctccagccagtatacgatattttccaagccacaaattgcgaccacaacaccgcagacacaggtgtcgcctggtatgcctttgatgtttcccggcggaagtcccaattttgtgcaggatatcaagatggagaatggattcatggatgtggatagccagagtagccagtgtccatcagtggaacgcaatttcgcttcgcctcgatccaactgcagtacagtggatagtattccgccgatgcaaatggggcaaaatcaaactcatctttatttgccagatgccacaaacttcacatttaatgggaatttcgcatcgccttcgtccaattgcagtacagtggatagcattccgccgtttcaaatcggacagaggaataaccatatgtatctgccggagaattcaaactttccggtaaacggctgtagtcctacccatttcagtggtggctctatgacaccaatcaataataacaacaatgtactaattaataacaataacaatgactttttaagtcagaaaatgagtgccataagcataccgccacaaggaaattttggcattaaacaggtatatcaacagactcagcagttcctgccgcaattgcagccagagtccattccatatctggcccaatcccatccagaacagtcgcagtaccaacagcaacagcagccacaggagcagcaacctccagcagatgaacccacccaatcgtttagtgatctaatttccagcagcataggcatggcgcccattgacaccagcgaacttatccaggacattgaggcagaactcaatagcttgggaattcagccattcaaatgaacaacaaactttgctaaatactagtgtacatatatttcataaaatatatcggaaattaaccaattagagctacatgtaaaaaggtctcaatccaaaatgaacttcaacacaaaacctgtcttatataattctattttaccgcaatgtacataaatttaatgagggaaatgcgaatctcattgcccgatgccttgttacgacttttcgttattgacaaaagtgaattgaaaatgattattgtttaaataaaatataactttagaatttacatgatgtatgtatgtatgtttcgctttcatgggggaatgtgggtaatactagagtaatatagagtgctaactgtttagcgacagaaatagggctgacccaggttggcattgttctcattgcgcatgccggcaaagaaccgattgatatcctcctcggtcactaccttcttgctggcggcgaatgcctgcaggtattcctttagcttgtccttcatgcgattgtattcggtaatcgcatcgatttgctgtgtccggtcaatg

SEQ ID NO: 14568 - protein, 667 aa, DROSOPHILA
MFEEAFGDIQEIINASMELNGGATGGGSVAGAVGGGGAAHHILSQSTSLPVMPSHIPLHLQNQNMNQNLPEPSARSGPHLRIVEEPTSNIIRFRYKCEGRTAGSIPGMNSSSETGKTFPTIEVCNYDGPVIIVVSCVTSDEPFRQHPHWLVSKEEADACKSGIYQKKLPPEERRLVLQKVGIQCAKKLEMRDSLVERERRNIDPFNAKFDHKDQIDKINRYELRLCYQAFITVGNSKVPLDPIVSSPIYGKSSELTITRLCSCAATANGGDEIIMLCEKIAKDDIEVRFYETDKDGRETWFANAEFQPTDVFKQMAIAFKTPRYRNTEITQSVNVELKLVRPSDGATSAPLPFEYYPNPELLTKHNRRVAQKTVESLKRSLMSTNLHPSKQVKTSSQYTIFSKPQIATTTPQTQVSPGMPLMFPGGSPNFVQDIKMENGFMDVDSQSSQCPSVERNFASPRSNCSTVDSIPPMQMGQNQTHLYLPDATNFTFNGNFASPSSNCSTVDSIPPFQIGQRNNHMYLPENSNFPVNGCSPTHFSGGSMTPINNNNNVLINNNNNDFLSQKMSAISIPPQGNFGIKQVYQQTQQFLPQLQPESIPYLAQSHPEQSQYQQQQQPQEQQPPADEPTQSFSDLISSSIGMAPIDTSELIQDIEAELNSLGIQPFK

SEQ ID NO: 14569 - DNA, 4045 bp, DROSOPHILA
acaggtggaaatggacatgtcagccaaaattaagctgcattgaacttggattaattgctttgtcaaaaacacaagcacttcctttgaaatttcttagtaaataaatataagtagaattcaaatttcttggacaaatgcgatttactttttaatcatgtcatatgagtgactaaggcaaaattatttatttttgcacaacaaaattaaataaatattttcattccgatttcagtgttttccccgttttatttataaacgcagagctatgtgtcactcaaaacaatatttttctttaaagtcatcaagtgaaaaacctattaaattggaggtcattatgggatcgcacttcagagatcaatcaaatcaaggctatagtggcaaaaagttataaacagcgaaaatacactggcccatttaaaatgcgtgcctgatatatgtacatatgtatgtatattcaaatccctatatgcgtaaacatatatctacgtatgtatgtgtaattgtgcaatcatttgcatgctgattagtgttacaataatagacaacgctttaatttcaacccgattcgttcgcttaatgatcgtcacaattgccggggagttgaacaaattgggacagacacaactggatgatcactgggaaataccttcttcgagtaaacgtaggcttaagtggcaccgatatacaactattacttggaacgactgcaagtccgttcaccagcgcgtctaactataaactgagtccggtgctccaaagtagcttggtacttaaaacccaaagcgcagcttggatatcgatatccgatgattgtcactcagaaagtcaagatgtgggttgcttcaacgggtttgcgtttcgtgcaaaagttgttacttaaactgcgatacaaatgttgtgacttggatatgagcttttgagagttgtatggaaatttaaaagtattacctttcaataagctagcttatatcgaaattaataaatgaaaataacagttggtgcattatagagcatatttttcttcaagtttttcaaaaacacacaagtcttaaaacacttctagtgctgcatttgcctgggatcgctgtagacgcccgcaaagagaatcgtgtctaccttttcatcatagataagaaacacgaacgggtggttgcagttgaatttggtgggatcgggctgcctgctggatcggctgaccaagaggatggtggccgctgccgcagtgctgcccacttcgtccactttgatcttggccagatgttgggcgtcatcgatgacaagggaaatgggatcggcagtcaggtctccaaaggtggcgtttctcgtgaacattgtgttcactcccattaagctgaggatctgaaaaggtaacagcttacgtgttagtgcgactcaagtggtccagttaggtcatagcttacaggggtcagttccaggcgctgctcaaactggaacttgggcagcgacaactcgatcttctgcggcaatgcccgttcgaaccatttcttaacggaatcggcatttagccgggatatgacacggttaagactgattttgttggagttcggcagaatgataatcatggagatatcggatttggactcgggggtggaaatgtgcgtctccttcgacttgtatatggtgcggtagggcagcttgatgatctgcgattgcaagccctcatcgatggtcatcttgaaggcgcccgtcttgtgcatcatgtaaaccatttcctgctcacgctcgttaatgaagaatggcttcaaggcggtctcctccaccttgaactggctgagccactggcccttcatgtaggcggcgttggccagcaccaacatggtgtggggtgtgatctcctcggagctgagcatgtcgcggatctggttgtgcgtcttatcggctatccagtcgttaatttcctttaggccagtctccggatcattcttgaaatccaattctttggttgccccgtagagtaaagtgttgaatttgttggaaacatttattgtcctgtcgacgaaaattctgttcgcagacgagagctccatgggactttggcgccaacgaaattcgtcctgcctctgtgccaacgtgtacgaaactaggacctgctgtttgtttaatgcccatcccaggttcagtgcctgggccagctcacgttccgtctgctcggaggaactgaagtaggcgaggagcagggcgttgtaggtgctgaacggcgagaagaacagattgccgctgggatatatctctcggatctgtttcattaatgctaaggagaagtctcgttctcccttgaaaatttgtgagaattcatttagaaatgatagctccggcttgtccaaggcagctatggttactacgggaaggagggccaacaggaccaaactgaaggtgtgcatagttggtactgtctaaaaatttaaggacattcattaagtatgaactataaagaatttatgaactagaactaataaatagtgaaggatgtgatattatttctcacaatgtgaatttttccaaagaaaaaacatgaatcattaaataatcttggcctcataacattatagtttattgttcatatgtatgtatattgtgggattttgccagagatagtgttggaatccttaatcgactttgtggcacatccaaattttgtcggactattaaaaatgagctttttacaataggattttaaatataaacattgacacgagcccaactgagacaagtttctcagaaccattaaaaaaatctctttcttcacatttcctagaattctgtatttcttgtattcatcataattcttataacatatatatttatatatatatatatattatatagtatatttatactgataagaaactttcatgtgccggagtatgtgtttaaatcgattgcaaacataaattattatgtatagtcgttattgatacaagcgtatgaaatatttattttaaaagaatcttgggttttaccttaacggaattttgcacagaacttaaatcaaaacggaaacaatggtggtccaaccgattgcacttacaatcactgactaatgcatgtggcaataaacggcagagctaggcttaaaaataatgagaataatgcgataagcgggcgaaatcgcagctgatcctcgaatttaaattgataacgtactgttccgtcactgaaataagacggtttttctaaacagtgatttaaagtaagaattggtttcctaattggagttctgctaaatttaccatgtttaaataatattatctcatttttctatatttattaaatttatttagttgattactgcaaaaagaaataatttttgattcgtacagaaatatatattatctactcagttttgtttttaagcgatagcttttttcaagttttatgttctgctgaacgggaccattcgcggtactgaaaaagagtgactgccactgtgactgctaaacgataaccgctaaagcttggttcaccactagaattccgcacttgacaacactggcagccaccaccgtgattgaatagtcgcgaattgacaacaaaattacgcgataaacaaaccgaatttggcacccgctcaccgaaatgagtgcatcgacgagcacgtcgacggcggcgtcccaggacgcctgctacatatcgctccttggcctggcggagtacttccgcacctcgcagccgccgaacatcaagaaatgcatccagtgtcttcaagccctgttcacatttatgccgccctcgaaggtcgaggcgcggacacatttgcagatgggccagatcctgatggcctacactaagaacatcgatctggcgcgccagcatttggagaaggcgtggagcatatccgaaccgctgcccaatttcgacgttaagttcgacaccgcctcgctgctggcccaactgcatctgcagacggacagaaactcgcatcaggccaaggcgatgctccggcgggccgtggaactgtcgcaaaacaacgtctattggcactgcaagctgctgctccagctggcccaaatacatgccagcgatc

SEQ ID NO: 14570 - DNA, 1416 bp, DROSOPHILA
gtgcaatcggttggaccaccattgtttccgttttgatttaagttctgtgcaaaattccgttaagacagtaccaactatgcacaccttcagtttggtcctgttggccctccttcccgtagtaaccatagctgccttggacaagccggagctatcatttctaaatgaattctcacaaattttcaagggagaacgagacttctccttagcattaatgaaacagatccgagagatatatcccagcggcaatctgttcttctcgccgttcagcacctacaacgccctgctcctcgcctacttcagttcctccgagcagacggaacgtgagctggcccaggcactgaacctgggatgggcattaaacaaacagcaggtcctagtttcgtacacgttggcacagaggcaggacgaatttcgttggcgccaaagtcccatggagctctcgtctgcgaacagaattttcgtcgacaggacaataaatgtttccaacaaattcaacactttactctacggggcaaccaaagaattggatttcaagaatgatccggagactggcctaaaggaaattaacgactggatagccgataagacgcacaaccagatccgcgacatgctcagctccgaggagatcacaccccacaccatgttggtgctggccaacgccgcctacatgaagggccagtggctcagccagttcaaggtggaggagaccgccttgaagccattcttcattaacgagcgtgagcaggaaatggtttacatgatgcacaagacgggcgccttcaagatgaccatcgatgagggcttgcaatcgcagatcatcaagctgccctaccgcaccatatacaagtcgaaggagacgcacatttccacccccgagtccaaatccgatatctccatgattatcattctgccgaactccaacaaaatcagtcttaaccgtgtcatatcccggctaaatgccgattccgttaagaaatggttcgaacgggcattgccgcagaagatcgagttgtcgctgcccaagttccagtttgagcagcgcctggaactgacccctatcctcagcttaatgggagtgaacacaatgttcacgagaaacgccacctttggagacctgactgccgatcccatttcccttgtcatcgatgacgcccaacatctggccaagatcaaagtggacgaagtgggcagcactgcggcagcggccaccatcctcttggtcagccgatccagcaggcagcccgatcccaccaaattcaactgcaaccacccgttcgtgtttcttatctatgatgaaaaggtagacacgattctctttgcgggcgtctacagcgatcccaggcaaatgcagcactagaagtgttttaagacttgtgtgtttttgaaaaacttgaagaaaaatatgctctataatgc

SEQ ID NO: 14571 - protein, 426 aa, DROSOPHILA
MHTFSLVLLALLPVVTIAALDKPELSFLNEFSQIFKGERDFSLALMKQIREIYPSGNLFFSPFSTYNALLLAYFSSSEQTERELAQALNLGWALNKQQVLVSYTLAQRQDEFRWRQSPMELSSANRIFVDRTINVSNKFNTLLYGATKELDFKNDPETGLKEINDWIADKTHNQIRDMLSSEEITPHTMLVLANAAYMKGQWLSQFKVEETALKPFFINEREQEMVYMMHKTGAFKMTIDEGLQSQIIKLPYRTIYKSKETHISTPESKSDISMIIILPNSNKISLNRVISRLNADSVKKWFERALPQKIELSLPKFQFEQRLELTPILSLMGVNTMFTRNATFGDLTADPISLVIDDAQHLAKIKVDEVGSTAAAATILLVSRSSRQPDPTKFNCNHPFVFLIYDEKVDTILFAGVYSDPRQMQH

SEQ ID NO: 14572 - DNA, 3032 bp, DROSOPHILA
gctcttgcggaattgcatgtacaattttaaatggatttcgattgtttatgacaaatcgactatctgaactggcattgcttgattgcgaccagctcctctacctggtgtcctgcgtccacctgagctgcttatgtatgtacgttccgatttacgattaagtcaaattagtaattatatattcaaaagggatgtgagtgctgttcatatttggtaaatcaaaagaaaacacctctttacgaagtaaaaagcaagtgacgaataaagcgttggatacggtaattataatcaaacagcatattacgtacgtattaatcgggctaacagctgcttttattagagggccggcaaccgtccttccaattttcgtagtcaaaaggtaacaaagtcagcaaaaattttgtatgcgtctagtccaaggtaacattaattttggccctaggataaatggtcccacctacgttccatcgaccgctcaatcgcaacgacaaggaaagagagggctgcgatgggctcttctgagggggtttgatcgttcttccgaagattttttaagtcgacgggaattctggccatgcatatctgtcagtatgtctgcccggctgtctgttcgtttgaacgtctaaatgtcagaaacaataaatgctagaaagtttagatcatgtccacgtcatagacgcagcggaagtttctttcttcaacggagagcaacaaatattttgataaaaagtgtcgaatttaaataaaatatatttaaatatatgtatatatttaaattgtttaaattctaactatagtttctggttgggatcgtcactactttttacccttgcgtgatgttttttttttctatgctaaaataatgtttgactgtaacgtttcctcttgtttttattaaatatataattaccacgagggtatttactttgggtatatacaagttgttagattcggtgtttagtgcttagtgtcttaagtcaataaaaaataacgtctagctcaaatgcataaaattgtttggtttggaactttaaataagtcgattggctacatcggtaaaaagaagacctgtcttctgagtccatgcgagaaaatatgcctgaattcagctagaaaaacagtacagagatgcgacaaaaactattcaccaccaaagttaagaagaatcaagaatttctatacctacagtgttgtgttggggagtctcttcagtatagtcatgtgggccatctataagctgggcaagcccgaggaagaccatcggggtcccatagaagatgagttcagtcagcttccctggttccgccagtacataatgaggatgtggcacacacttcagtattatgaaaaaatgatggaagagccccagatggcaaggctgctgccaaatgttgtcccaccgccgtatatacaacctccctattcactggtgctggaaatcaaagacgtactggtgcatccagattggacttatcagacggggtggcggtttaaaaagcggcctggtgtggattactttcttcagcagtgcagtcgaaattttgaaattgtgatatatacttctgaacaaggtatgaccgcattcccccttctggatgctttagatccctatggctacataaaatatcggctagtaagaggtgccacggacttggtagagggtcagcataccaagaacctcgattatcttaacagggatctgagccgtgtgatagtggtggactgtgatccgtataccactcccctgcatcccgataatagcttggtgctcacaaagtggctgggtaacgatgatgatgtccagctctttgatctcacggctttcctgcagttgattgccgaacaccaagtaaatgatgtaagggaggtgctgcgatactatcgccaattcgaggaccccatggaacagtttaaggacaaccaacgtcgactgcaggagcagagtcaggaaagcattcagaatttaccaactagtgaacgtcagtggaacttaactttattgggacgctcccttcgagggtcttcaatcaaataaattttcgtttatgcaccttatatctattgtagtaacgtcttgatcttggaaactaaaaaatctagtcattaatctagtaatttaaatgttcaaaattgtttaccttttttacattttattatttgttttaattattttcattgttttggcagttcgacaaccacagaggtttcgatttttatatccgttaccgaagtttaaattggtctactagatttactgccaagctaaacacaattatacccattacaggttgagtaaaagggtatactagatttgttgaaaagtatgtaacagggagaaggaagcattttcgactatataaagtatatatattcttcataaggatcaatagccgagtcaatctagtcatgtccgcctgtccgcctgtccgtatgaacgtcgagatctccggaactataaaagctagaaggttcagcatacagattctagggacattggcgcagcggcttaactcgaaagtacggcatgagataatttttatggagatgaagagctctgtagagataaatatattgaaagaaatccttgagggtcgcagatataattacccgtgaagcgcattatatcaaaaacatctaaaaaatctatattgtaattattattgaaaggcttgactgccatgtgtccagattattttattaaactggtaagcggtaatgaaacacatgttaggtaacaaagggacacccagaggggtcgcccgatcgcactgttgctgcccatactatccttttcgaggcactttacgatgcaaaaagtttaaaatttatgcgaactgaaccaggtggaaagggtttagcgctgtaggagtcagatggacatccggagagtagagcaccacttttgtgcttgaccccgcagcagcctgcttagtctcttgactaccgttggcaaagccggaatgggatgtacgcttgtatacgtatgtggtcgcctcttcggtggtgcgttgttattttatgggaccgccgccacc

SEQ ID NO: 14573 - DNA, 1032 bp, DROSOPHILA
atgcataaaattgtttggtttggaactttaaataagtcgattggctacatcggtaaaaagaagacctgtcttctgagtccatgcgagaaaatatgcctgaattcagctagaaaaacagtacagagatgcgacaaaaactattcaccaccaaagttaagaagaatcaagaatttctatacctacagtgttgtgttggggagtctcttcagtatagtcatgtgggccatctataagctgggcaagcccgaggaagaccatcggggtcccatagaagatgagttcagtcagcttccctggttccgccagtacataatgaggatgtggcacacacttcagtattatgaaaaaatgatggaagagccccagatggcaaggctgctgccaaatgttgtcccaccgccgtatatacaacctccctattcactggtgctggaaatcaaagacgtactggtgcatccagattggacttatcagacggggtggcggtttaaaaagcggcctggtgtggattactttcttcagcagtgcagtcgaaattttgaaattgtgatatatacttctgaacaaggtatgaccgcattcccccttctggatgctttagatccctatggctacataaaatatcggctagtaagaggtgccacggacttggtagagggtcagcataccaagaacctcgattatcttaacagggatctgagccgtgtgatagtggtggactgtgatccgtataccactcccctgcatcccgataatagcttggtgctcacaaagtggctgggtaacgatgatgatgtccagctctttgatctcacggctttcctgcagttgattgccgaacaccaagtaaatgatgtaagggaggtgctgcgatactatcgccaattcgaggaccccatggaacagtttaaggacaaccaacgtcgactgcaggagcagagtcaggaaagcattcagaatttaccaactagtgaacgtcagtggaacttaactttattgggacgctcccttcgagggtcttcaatcaaataa

SEQ ID NO: 14574 - protein, 343 aa, DROSOPHILA
MHKIVWFGTLNKSIGYIGKKKTCLLSPCEKICLNSARKTVQRCDKNYSPPKLRRIKNFYTYSVVLGSLFSIVMWAIYKLGKPEEDHRGPIEDEFSQLPWFRQYIMRMWHTLQYYEKMMEEPQMARLLPNVVPPPYIQPPYSLVLEIKDVLVHPDWTYQTGWRFKKRPGVDYFLQQCSRNFEIVIYTSEQGMTAFPLLDALDPYGYIKYRLVRGATDLVEGQHTKNLDYLNRDLSRVIVVDCDPYTTPLHPDNSLVLTKWLGNDDDVQLFDLTAFLQLIAEHQVNDVREVLRYYRQFEDPMEQFKDNQRRLQEQSQESIQNLPTSERQWNLTLLGRSLRGSSIK

SEQ ID NO: 14575 - DNA, 17282 bp, DROSOPHILA
gcacttctctaaacttctttattcctaaatgggaaacacatttttataatagtcgtctggagtaaggacgtttgtaattcaaagcatgctatagcatgagtgaaactaaatattctaatgcaatatctttaatgtgcttaacgaatgtcaggcacagacaagaattgttgaaacaaatttatatttatatttactgatacaatattaagagagcgatctaaaagccaagaacttgtttccaacctttagttgcattagaatgcattaaaaccacattgttcctatccttcatagtcctcgaacccgattcgatttgttttagatctgcattagatgagagtcaaacatatgccagttcagttgccagtcctccacaggacttgcttgggcaatgcatgtgtggtatactccactgcgtatacgcaattccggacaggaccagaaatgtggattttggcctccttcatggagcgaacgtgcgaattatctgcaccgaaatgagcagcgcaatgaacaaacagtttagttgcaacttgaatgcgaaatggaattcgacacgacacgactgccgaccttcgaccccccttttggcacctggacggtccaagccctgtgggctgggggcaaatcgtaattttagtatggtgtgacccagtccgtacgtgttcgactgacttcagttaattaacgtccccgaaacgcttgccaaatggccattagagggacatcaaatcgaatttcattaaattttcaactccagcgaccaaatgaccatcgggtaacggtcatccgagctttggacagtgtcgcattgtggcattttgttggctgcacttccacatccacttgcgcacacccctttaccacgctcaaccaacatttcccgccaatgtcgccagttttgctcctcgttgtctgattaagctgtatacttcattttgcaaaaatgtcaaagggggctggaaaaaatggtttgccaaacaaagcgccaaagaaaaccaaaaaggattaaatttcactttatctagcttcatattagctagtcgtcgtggcgtaggaaaatgaaattaaaaacgtttcccgctgctttgtaggttcctctaaaatttgtgaaagcttttcatgaagagtttttaattaagtcaaaggcggcattaaaactgccaaagcagaagctacctcacacacaaatttatttctagaatactcgtagaggagaatctcaaatatttaaagtactaaaagaagaactgaatatatgtgaataagtttcaacaagtgtgcgctaatgaatttaattcaaagtttaaaaatgtaatttttatatattttttttttcagcaggcgacaatttcaaatacatggcctacatttaagggcaaacgcaactcaattacccccgctaacctcactgactctccacattttcttgtccttttcagacagatggccatgcccgcagcaccgcccaccgatgataattgaataggaccattaattgcactgtggtttgttggttctcgcaccacacccacacacacacacgcttcacacacacacacacacacacacattcacgggggagagactgaggcacacacacatcgacctaaataaggccacgtggtcgagtcatgcaaacgagggagttccctcaaaggcccctgggcctgctcctcgtgctccttgtggtcctgctgcaatcatcgctcatcaagagctacttgattatcgtgcacgaggacacgcctcctggcacggtaatcttcaacgcctccgtctataaacttggttccgaacggcattacaagatcaatgcccacaagtcggccaatttcgtgcaccatctagtctccgtgaatcacaaggatggccagattcagctgagaaaggccctcaagtgcgatggcatttactatccgaatctgttcaccttctacgtagactccacctcgaatcggctgcgcagcatagattactatagtctgcctgtgcgaatcttcgtctcaggccacagttgcaatgaggataggaggatagagcaggaactgcatcatcatcactatgaggaggaggacaatacgggctactcaaagcgcaggcgaaggcgatccacccaggagatgatccaactgaatggcaatcagctggaggaggtgttccgtcaaaacagcactgagttccgagcaggagatctgatatttggcgacagcttcgacaatgagatgagacacaggattctgagccgaaagagaagagcagtgggatcgccggatccgctgcacctccagcccgccctgcatcgacggatctcggatgccaagcagtggatctcagagacgtacgcctcctatgccattcacaccacggacaaatggaaccagatctgcttgagaagatcgcagttcatcaacagcctaaatgcctttctgccacgatccgtttgccagcattgcaaggttagttttctggatgtgaacgacgagcgatttgccatcgagcaccagagcagggatctggtggccagcagggatgtttgcatcgcagagtccatgtggaaagtgagcataaccttcaacatcaggtgcgatcgacgtgacattgtggactcggaccatcgcctgaagatcgtttaccaccatcaggagttcaacgatacggatatcgctcgaagggttcggagagagctccgcaatcaatcaccctactttgaacaagccctctatgtggcctccgttctcgaagagcaaccggcaggcgcagcggtgaccactgtgcgggcccgagatcccgaagactcacctgtggtttattccatggtctcactgttggactcgcgctcgcagtcgctgtttaaggtagattccaggacaggcgtagttaccacctccgccagtttggatcgtgagctcatggacgtgcactacttcagagtggtggccacggacgatagcttcccaccgcgatctggaacgacgacgctgcaggtgaatgtcctggattgtaatgaccacagtcccaccttcgaggcggaacagttcgaagcgagtatccgtgaaggagccactgtgggatccacggtgataacgttacgagcaaccgatcaggacattggaaagaatgcggaaatcgaatatggaatcgaggcagtgactggtaagttataaagatttattatacaaatattttgtatcgctattgaaattttaagtaatttaataaatattaattttgtgtattatatcttattttctagatggcgccggattggcacaagaccaggaaatgcccatcttccggatagactcccgatcgggcgtaatctcgacgaggagcagtctggaccgggagacatcggatagctatcatctgctagtgaccgcagcggatttagcttcagcacaaagtgaacgacgcacggccacggccagtgtccaggtgaaggttctcgacgacaacgacaactacccgcagtttagcgaacgcacctatacagtccaagtgccagaggatcaatggggtggcactgaggataacaccgttgcacacatcagggcaacggatgcggatcaagggaacaacgccgccattagatacgccataatcggtggaaacactcagtcacagttctctatcgactcgatgtccggtgatgtgagtctagtgaaaccgctggactacgaaagtgtgcgtagctacaggctggttattcgtgctcaagatggaggcagtccctccagaagtaacaccacccagctcttggtcaacgttatcgatgcgaatgacaatgccccgaggttttacacctcacagtttcaggagagcgtgctagagaatgttcccgttggttacaacatcattcgggtgcaggcctacgactccgacgaaggtgccaatgcagagattacatatagcatttccgaacgagatgataactttcccctggccgtggatcctcgcacaggttgggtgcaaaccataaagccactggatcgtgaggagcaaggtcgctttgccttccaggtggtggccaaagatggtggtgtaccccccaaatcggccagttcctcggtggtaatcaccgtgcaggatgtgaacgacaatgatccagcctttaatcccaagtactacgaggcaaatgtgggggaggatcaaccgccaggtactccggttaccacagtcacagccacggatccggacgaggactcccgcttgcactacgagatcacaacgggcaacacaaggggtcgctttgcgatcacctctcagaatggtcggggtctaattaccattgcccagtcgctggattacaagcaggagaagcgcttcctgctcacagtagctgccaccgactccggaggacgttctgatacggccaccgtccatatcaacattacggatgccaataacttcgctcccatctttgaaaatgctccatatagcgcatcggtgtttgaagatgccccagtgggcaccaccgtcctcgttgtttccgccaccgacagtgatgtgggagtgaatgcacagatcacctactcccttaatgaagagagcataaacggcttgggcagcccagatccattttcgatcaatccgcagactggtgccatagttaccaatgcccctctggatcgggagaccaccagtggatacctactgaccgtaactgccaaggacggaggtaacccttcgttaagtgacactaccgacgtggagattggagtgaccgatgttaatgacaatgcacctgccttcaaaagcccactgtaccaagcttccattttggaagacgccctagtgggaacctcggtgatccaggtggcagccagtgatcccgacgttggacttaatgggcgcatcaaatatttgctgagtgatcgtgacatagaggacggatcctttgtgatagatcccacctcgggaaccattcgcaccaacaagggattggacagagaaagtgtggccgtctttcatttaaccgctattgccgtggacaagggatcacctccgctctcaagcaccgtggaggtgcaaatccgattggaggacgtcaatgattcaccaccaacttttgcttcggacaaaatcacactctatgtgccggagaactcgcctgtgggctctgtggtgggtgagattcatgcccacgatcccgatgagggcgtcaatgcagtggtgcactattccattattggcggcgatgactccaatgcgttttctttggtaactcgacctggttccgaacgagctcaactgctgaccatgacagaactagattatgaatccactcgaaagcgcttcgaattggtggttcgggcagccagccccccgttgcgtaacgatgcccacatcgagatcctagtcacagatgtgaatgacaatgcccccgtgctgcgggactttcaagtgatattcaacaatttccgcgatcattttcccagtggagagattggacgaattcctgctttcgatgccgatgtgagcgataaactacactacaggatactttccggcaataatgccaatctgctgcgcctcaatagcagctcgggaggactggtgctaagtccgcagctgaacaccaatgtacccaagtttgccaccatggaggtatccgtttcggatggaattaacgaagccaaggcgattatgcagctttcagtccggctgatcaccgaggacatgctcttcaactcggtaacggtgcgactaaatgaaatgacggaggaggccttcctatcacccttgcttaacttcttcctcgacggactggctgccattattccatgtcccaaggaacacatatttgtgtttagcatccaggatgacacggacgttagctcacgcattctgaatgtcagcttctctgcccgccgaccggatgtgtcccacgaggagttctacacgccgcagtatcttcaggagcgagtctacttgaacagagccattcttgcccgattggccaccgtggaggtgcttcccttcgacgacaatctctgcgtgcgagaaccctgcctgaatttcgaagagtgtttaactgtgctgaagttcggaaacgcttctgagttcatacacagcgatacagtacttttcagacccatctatccggttaatacgtttgcctgctcttgtccagaaggctttacgggtagcaaggagcactatctgtgtgacactgaggtagatctctgctactctgatccctgtcaaaatggaggaacctgtgtgaggcgagaaggtggctacacttgtgtatgtccatctacgcatactggtcagaattgcgaaacaggagtgggacacctacgaccttgtccgtcggaaacctgtgagggagggttgtcctgcctcagcaattatcccagctcacaacctcctccttatacggccacctgtgagctgcgagcacgtgcctttgggcgcaactccttccttaccttcgaaagtctaaaacaaaggcatcgattcaatcttaagctacgctttgccaccgtacaggagaatggattgctactctacaatggaagatacaacgaactgcatgactttattgcattggagatccatgaaggacacgtgagcttctccttttctttgggcgatcatagtgaaaggatttcggtgattcaggaggcaaaggtgtccgatggtaaatggcatcaggtagaagtggtctatttgaaccgaagtgtcaccttagtcctcgataattgtgacaccgccattgccctttctggacaactgggtgatagatggagctgcgccaatcgcactactttgaagttggataaacgctgttcgctgctcacggagacctgccatcgcttcctggatctgacaggacctcttcaagtgggcggacttcctcgcatcccagcgcacttcccggtgacgaatcgcgactttgttggatgtatctctgaccttcgaattgatgatcgcttcgttgatttaaactcatatgtggcggataatggaacgttagctggctgcccccaaaaggctcctctctgccaatccgagccttgtttcaatggaggcacctgtcgagagggctggggaacctattcctgcgagtgtcccgagggatatgctggaaacagctgccaggataatataccagctccttggcgattctccggagatgggagtctcagtttcaatccccttctgcgacctatccagttgccgtggaccacctccttctccctgcgaacacgtcagaaagaggctttcctcctccaaattcaaataggacagaacagttcggccgcagtttgtctgaggcaaggagtactgtactatatttttgatggagaacccatgtatttggctggcgctttcctctccgacggtgagtggcacagagtcgaaattcgttggcagcaaggttccgagatacacttctcagtggattatggacagcggtctggatcggtgcccatgtcgcagaaggttcaaggcctctatgtgggcaagattgtaatgggtagccccgacggcagcattggagcagttcccgaagcctctcctttcgaggggtgcattcaagatgtgcgtattggagcagggcaatcggttctttcacgaccaactattcgagagaatgtggaagatggctgcgaatcacgtgctcagtgtccggatcattgtcccaaccactcgtcctgccagagttcttgggatctgtctacttgcgagtgtgattccgggtatgtgggtacggactgtgcacccatctgtactgtgagaccttgtgcttccggagtttgtagagcaaacacaagtttacctcgaggttatgattgcgagtgcaacagcagttcccgtcatggagattattgtgagaaggaacttcagcaaccgtgtcctggcggttggtggggtgaacgtgtgtgtggtccatgtcgatgcgatctggcccaaggataccacccagactgcaacaagaccactggacaatgctactgcaagacgaatcactaccaaccgccgaacgaaaccgcctgtctttcctgtgactgctactccattggaagcttcagtggagcatgcaatccgctgacaggacaatgcgagtgtcgagaaggagttatcggacgtaggtgtgactcctgctcaaatccttatgccgaagtcacccttagtggatgcgaagtggtttacgatgcctgtccgcgatcctttgccggtggggtatggtggccacgcactcctcttggaggagttgccatcgaaggatgtcctccaccggctcgaggaaaagggcaacgcagctgcgatgttcaatcgggaagctggaatactccggatatgtacaactgcacctcggagccttttgtggagctgcgtcgccaactgtcacaactggagaaactcgaactggagcttaactcctttgtggccataaaaatggcagagcagctgagaaaagcttgcgaggcggtggacaggagaggtgccagcaaggatcaaaagatttcgggaaatggccgccctaaccgtcgttacaaaatggaatcatccttcctgctcagcaatgggggaaacgtgtggtcacatgaacttgaaatggactacctatccgatgaattgaaattcactcatgatcgcctgtacggcgctgatcttctggtcacggagggcctcctacaggagttgatcaactatgaactcatgcagagtggccttaacttatcccatagtcaagacaaatactttattaagaatttagtagatgcggccagcgttattttggatcgaaaatacgaggcagaatggagaagggcgacggaactcattcaaaggggaccagacgatctggttgatgcatttaacaagtacctggtggttttggctcgatcccaacatgacacctacactagtccttttgagatcgtgcagcccaacatggcgctaggattggacatcgtcaccactgaatccctatttggttatgaaccggagcagttaagcgaataccaccggagcaagtacctcaaaccgaatgcatttaccacagaaagtgttgtgctgccggataccagtggatttctacagcactcggctcgacagcgaccagtgattagcttccccaagtacaataactacatattggatcgtcgtaagtttgatcagcacaccaaggtcctagtgcccctggagatgctaggaattacgcctcctgaaagcgatgagatttcacagagtggacgacgaggaagtagtcatgaccatcgtgccatcgtggcgtatgcgcaatacaaggatgtgggacagctgctccccgatctgtatgatgagaccataacccgtcgttggggcgtggatgtagagctagctacccccattctctccctgcaaattttagttccctcaatggaaagggaacaggagacgcagcgcctggagattccgtcgagaaagatcttctcctcatcttcgccatcttcatcctcatcctcaggcagcacggaacaacaatttgtggaggttttcgatgttcctaaagctccaacaagcagcagtgaacaacagattgaggatatacggataacagcccatgaaattccgccaccagtttcctctgtagaacaacaggaggcttcaagtgatgaagacggcgaagagagggaaccgcacattcgcctaaatcttgacgacattgagttccatggcaactccggcgaggaggtcatatcgccagactcgcccgaaatgcttaatccaaattacgaaggtgtcagttctactggaagtgatgagcagccaaagggtgaaaacgaagcggtttatagagatcgtcgtttggtgaagaggcaggtagagatcacatatccttcagaacaaatgcagcaaacagaacaggtggtgtatagatccttgggctcgcctcatttggcgcaacccataaagctgcaaatgtggctggatgtggattcagcacgctttggaccccgttcgaaccctcaatgcgtccgttggaactcctttaccaatcagtggactagattgggctgtcaaactgagattcccgacttcgatggagactttaatcctgcggcacaacaagcgatccttgtgaactgtagctgcacccatatttccagctatgctgtcattgtggatgtgattgatccagaggacatcccagaaccttcgctcttggtgcagattacctcctactctgccttcctcgtttcacttcccctgctgctgggagtgctcttggctttggccctcctacgtggtcagcagaccaactcaaacaccattcaccagaacattgtgctttgtgtcttctgcgcggagctccttttcttcgtgggaatgcaatcgcgtcggcagctcctggagagcgaatttccctgcaagctgacggccatctgtctgcactacttctggttggctgccttcgcctggacaacggtggactgcgttcatctatacagaatgctcaccgaaatgcgtgacattaaccacggccccatgggcttctacttcgccatgggctatggtgctccagccatcgtcgtcggattatctgttggagttcgtgctcatgagtacggaaatagtttattgtgagtatccaataagggaaaccttgctcatcttaaatataaatcctagacttcaaaaactataaaaatattaatttgaattcctttctcttacagctgttggctgtctgtctacgagcccgttgtgtggtggctggtgggtcccattgcgggcatgtccgtggtgaacctgctcatccttttcgtctccgtcaaagctgcctttacacttaaggatcacgtacttggatttggaaatttgcgaacgctcctatggttgtcagtggtatcgctcccgctgatgggagtcatgtgggtcctagcggtgctggccgcttcggagcactctcagttgctgagcctgttgctctccggtgtggtgctactccacgcgcttttctgcctcattggatactgcatcattaacaagcgggtgcgggaaaatctccaacgcacctgtctgcgatgcatgggtcgcaaggttccgcttttggactcctccatggtggttagcaatagctcacacaacgtgaatgcagcggcgaggccgagtaacttcctggcaagtggatatgatacaaccaccaggcgaaacataggcatcagcgctagtagcactacgtcgagaagtacggccaaaacgagttcgagtccgtacagcgatggacaactgaggcagacctcaacgtccacctcgaactacaattcagccagcgatgctccgagtttcttgagaggattcgaatcttctacaaccggaaggagcagaggtggcgaggagaaaccatcgcggcgccagaggaaggactcagactctggctccgaaacggatggaagatccctcgaacttgccagcagtcactccagcgatgatgatgaatcccggacagctagatcttctggtacccatcgcagcaccgccgtgagttcgacgccagcctatttgcccaacatcacggagcacgtccaggccaccacaccgccggaactgaatgtggtgcagagtccgcagctcttcccgagtgtaaataagcccgtctatgctccgcgctggtccagtcagctgccagatgcgtatttgcaatcacctccgaacatcggacggtggtcccaggacactggatctgataacgaacacgttcacgggcaagccaagatgaccatctcgccgaatcccctgcccaatcccgatctcacggacaccagttacctgcagcagcaccacaacaaaatcaatatgcctccctcgatcttggaaaatatccgagatgctcgggagggctatgaggacagcttgtatgggagacgtggagagtatcctgacaagtatggctcctacaagccacccagtcactatggcagcgaaaaggactatcccggcggaggaagtggctcccagacgattggtcatatgaggagtttccacccggatgccgcgtacttgagtgacaacatatacgacaagcagcgaacgctgggcagtggctacttgggcgccaagtcggagtcgccttacctgtccaaagatcgcataacacccgatatctatggatccagggatggtcattatagcctcaagagacagcctgcctatgcaactgattccctgcactcggttcactcgctcctaaagaacgattaccaccagcagcaacagcagcagcagcaacaccatttgcaagacagattgtccgagggatcggataagaatggctaccactttccctacaccgccgaagaggatcacctgcccgccaggaagctgagccacacccaaccgccttcgcttcacggatcccagctgatgcagccacctggagtgggcctggtcaacgatgtgaacaatccgggcttgatgggaaggcacaccctaaatggaggatcccgacacagttccagagcgtcctcgccgccctccaccatggtggctcccatgcagccactgggcccactgacaagcatcacggataccgagtaagttggccaaaaggtctgcagcaagattgtccaacccagtgtgtcgcagaagtctcgaattttgtaccaaattccctggaaaatcgtatggcaccattggtaacattcggttttgggagatttctgtgacatgcctgctcctgttggcttcggtttaggttttggttttggtttcagttttgttgtggttctggtgaccagttaatgcttcttgtgctccttgtgcagcccatcctgtctcctgatttgagttttatgttggcctagatgattagttttggttcgggagttcctgttcgttctccgtttttgaatccagcaattaatctgtggtcctttgtttctgattctcttttctttatggcattcgaatcaacaactacaatgacataaacccttttgtgccattcgacttttcccacaacaatgaaaactgaaaacaatgcaaatgaatatggtacaaacaacacacactcactgcacgcctacacacacatgcacactcgtacccacatatcatatacatctttctatacgtatacatgtccatatcctttcagctggtcctgggaacgtttgaatcaaatctaatttgactatctttcacttctattctctccaatattgtgctttcgctctctctctctctctctttctgtttttgctctttgaaaaataaaccaaaaacacacacacatacgcataccgcaaacacacacttataatcgacaaaatacaaaaaaaaaaaaaaatgctaactgctaaattcgacgtaatgcaaaatgctatggcggctcgtgttccattcatccaaacccaacaaacccgaccaaatcaaacaacatcaacaacaaccacacaactacaaattcaactactactactactactactacaacaacagctcagaggtaaaccacaagtaaaatgcattttcaaatcgcacatcacatttcccattttccacttttccatcatcgtcttcgtttaaatttgtgttcgattttcgtagctagggtgtgcataaaatgattcgactccattcgattcgattcgatttgattcgatgcgtttcgagctctataactaattccaaagtgcacccgttttaatttgatttgaccattttaaattgaatgtaaatattaaatattgattttcgttttatttggctgccgctgccactgaatgtttcattgttcattagtttgattaatccaatcagttgaatctcacactttctgatttgtaatccgaatgctcgaatttcgtgctgcatttaattggaacgtgtaatatcgagtttacgcattcactacatttattaattcccatctaacaactgtatacatcaattcatccatcccaccaccccacaccactcaccagctacagaaacagaccttataaacaacctgaacatctccacagttcgacattatttggctgcatcgcaggcaacagaggcaacagtatccctggtcgctaaccatatggtataatgagtaacaaggacatgtgtccgatcttagttagccaaaaacacaaaccccccccccccccctaagttagttctagttaatttaacttaaagaaattacataattgcagactgaccaagtgaattgacgagattatttaatcagaattccctttagttagtttaaatcctcaaatgccaatagaaataagaggaaacgttcctagtaggaacttcctacaacttaatcttaatctaactacggctatcaaaatgctaatttcataaaataatctacctataaattaaaaagcacttacaaagttttgttttcattactttcataaattggaattcataatctgaacttaagtttcttggctcttaattatgaacgccacatctaaatgaaatgaaagcgcctagagtgaaaacaaaaagacccaacaacccaattgcgcccaataatgttagtgatttaccgaaaaacaaccagaatccattaacactcgaataacctggcaagttaattgggttctggccaaataaacttaaccccacatttaaacaactcacactacaacacaagtacctccaatactaacgcaccgacacgaattcacacgtggaattatgtttattttttttcactttgataattcagttgcataaattatgtttgcgcttgaacccaaccatacattaaacacgtattcgcatgcaatttatgagactctgtggcatgccacaaattgaaacttatcaaagtaccgcacgtcgtagaggagcacgtaaattaacatagtgtagcgtagatgcaaatatagaaatgtagctagatttatttgtatgtgtacgtacctgcagcataagccgatttcagacccactaatggcaaatttctgtcgcaaacaggcggaatattgatgatgacgagaccacagtgtgacgactgtcccagcagcaacagcaacagcagcagcaacaattgaagctgcaacaaaggcagcagcagaagcagcatccgcatcagcagcgacagcaacacatgcaacaattgcagcagcaacgcaccaagcaacagaagcagaagcaaacgcaatattttgccaccattagacgcaagccgcagtacaggattcacacggaggactgaggtccttcttgccaatcgatccgatcgtagcatacttttgggagcacctgccataggggcatgcccgtcattataattgaaactttgtacatacaagcacccacttaattttacgtaaacccagcttagtatacccccattcgggcacagatatttatacgatagcctagcatttacataatttgaggcgccagttgcatttcgttcggaattgcataactcgcatgcacacacagacacagaattactcagctttagccttgtgtatgtattataaattacactatataattatgtattaaaacaagagtcagactgattttatgcattttacgttctgctattatatataagccccacacaaacatttagccagcgagctcatgcatttaggtccaattaccataccattaccattaccaattttgaatgccccagatccgattcgggttcggaacgaggggcggcgatatcgggttctcagtgcgactttagtttgagaacgtttgtgtgcctcgagctttttatgccaaattagttgaagtcgaaggggaacttgtaaatgaaaaataatctgcgaaagtttgcaattcatttgcctagcatccgcacatgttgccatttagtttgggagttagttttaattgatagcatctactatccgtatgaacgttgcgaatgtacaataagccccccctgcaaaagaaagcaagtaaataaattcaggacagttcccgtatttatgcgaaatatagaatccacatgcgcagcattgacatatcctgcaaagtatactcgatacatatatctgtctataatatccgagtcctggccaaaggaagctcgaccaacagtttgatccccgactcagcaatagccgctcatgcccctcagaactatgtacaatttataaataattcataagccgtacttactgtactcgaactccactcaactgccactcattgtggcacctacgtaagctatggattgcgcttgaatgtggcacacaatatttgatatttatgtgaattgacttatttaattgtaaattatacaagtatatcaatatgaataaaatgtgtaaaatatatgaagaaaaatgaagtgtgtttttaactttctgctgcttgtaaagaaccaactggcaatgtggcaagtatgaatttaaaaagatacaatgcagagtgcaatcggcattagtatggcttgaatattaagtaatccaactattttgaaggatcagagcaccacgttatcccattccgacccgcaatagaaacagaattcggttctttgttttaccatacaccttttgcatatattttattatgggaatacaataagttcaataccattatgtgtatattatgtatatatgtgtgtatctgtatatctatgttagtatcctcataagtacgggtatgcagatgtgtgttagtgtttaaaaaccatcattgaataatatattgaattattttattttgatgttcttgtatacattgcctagttgggttattctgttgcaatttaaatggaatccaaataatgccattttgtttggagttggaattgttttcatagggattacaaatatttggtttagctgagtacacaatgcaataatcaatatgctaagtattggttcaaatgacaacaatgtagcgcaaaaatgtttgcgttatgcctatgcacgaattcatcaacaattgtttctcgggtacgtttgtattatttgctttgattttactccggtctagttttagttttagcatcagtttagtttggtttagcttaattgaattggattggattatttagttgggacttgactaaaagcgaaatccacacacgaatataaggacaaattcttgaacgagtggttatgcgcgttttatgattaattataatacaaaacagttcgaatgccaaaaggaccaagactggcttaaggcattttcgtatagaatcattccactccatttcccccttctatatcccagctctcttcccctcttctcctcccgggcactaagcaactcgttgcgctgttgtgtagattttcctggcattttcgtgggtgcggattcggtttttccgtttcgtt

SEQ ID NO: 14576 - DNA, 12791 bp, DROSOPHILA
aaaaaggattaaatttcactttatctagcttcatattagctagtcgtcgtggcgtaggaaaatgaaattaaaaacgtttcccgctgctttgtaggttcctctaaaatttgtgaaagcttttcatgaagagtttttaattaagtcaaaggcggcattaaaactgccaaagcagaagctacctcacacacaaatttatttctagaatactcgtagaggagaatctcaaatatttaaagtactaaaagaagaactgaatatatgtgaataagtttcaacaagtgtgcgctaatgaatttaattcaaagtttaaaaatgtaatttttatatattttttttttcagcaggcgacaatttcaaatacatggcctacatttaagggcaaacgcaactcaattacccccgctaacctcactgactctccacattttcttgtccttttcagacagatggccatgcccgcagcaccgcccaccgatgataattgaataggaccattaattgcactgtggtttgttggttctcgcaccacacccacacacacacacgcttcacacacacacacacacacacacattcacgggggagagactgaggcacacacacatcgacctaaataaggccacgtggtcgagtcatgcaaacgagggagttccctcaaaggcccctgggcctgctcctcgtgctccttgtggtcctgctgcaatcatcgctcatcaagagctacttgattatcgtgcacgaggacacgcctcctggcacggtaatcttcaacgcctccgtctataaacttggttccgaacggcattacaagatcaatgcccacaagtcggccaatttcgtgcaccatctagtctccgtgaatcacaaggatggccagattcagctgagaaaggccctcaagtgcgatggcatttactatccgaatctgttcaccttctacgtagactccacctcgaatcggctgcgcagcatagattactatagtctgcctgtgcgaatcttcgtctcaggccacagttgcaatgaggataggaggatagagcaggaactgcatcatcatcactatgaggaggaggacaatacgggctactcaaagcgcaggcgaaggcgatccacccaggagatgatccaactgaatggcaatcagctggaggaggtgttccgtcaaaacagcactgagttccgagcaggagatctgatatttggcgacagcttcgacaatgagatgagacacaggattctgagccgaaagagaagagcagtgggatcgccggatccgctgcacctccagcccgccctgcatcgacggatctcggatgccaagcagtggatctcagagacgtacgcctcctatgccattcacaccacggacaaatggaaccagatctgcttgagaagatcgcagttcatcaacagcctaaatgcctttctgccacgatccgtttgccagcattgcaaggttagttttctggatgtgaacgacgagcgatttgccatcgagcaccagagcagggatctggtggccagcagggatgtttgcatcgcagagtccatgtggaaagtgagcataaccttcaacatcaggtgcgatcgacgtgacattgtggactcggaccatcgcctgaagatcgtttaccaccatcaggagttcaacgatacggatatcgctcgaagggttcggagagagctccgcaatcaatcaccctactttgaacaagccctctatgtggcctccgttctcgaagagcaaccggcaggcgcagcggtgaccactgtgcgggcccgagatcccgaagactcacctgtggtttattccatggtctcactgttggactcgcgctcgcagtcgctgtttaaggtagattccaggacaggcgtagttaccacctccgccagtttggatcgtgagctcatggacgtgcactacttcagagtggtggccacggacgatagcttcccaccgcgatctggaacgacgacgctgcaggtgaatgtcctggattgtaatgaccacagtcccaccttcgaggcggaacagttcgaagcgagtatccgtgaaggagccactgtgggatccacggtgataacgttacgagcaaccgatcaggacattggaaagaatgcggaaatcgaatatggaatcgaggcagtgactgatggcgccggattggcacaagaccaggaaatgcccatcttccggatagactcccgatcgggcgtaatctcgacgaggagcagtctggaccgggagacatcggatagctatcatctgctagtgaccgcagcggatttagcttcagcacaaagtgaacgacgcacggccacggccagtgtccaggtgaaggttctcgacgacaacgacaactacccgcagtttagcgaacgcacctatacagtccaagtgccagaggatcaatggggtggcactgaggataacaccgttgcacacatcagggcaacggatgcggatcaagggaacaacgccgccattagatacgccataatcggtggaaacactcagtcacagttctctatcgactcgatgtccggtgatgtgagtctagtgaaaccgctggactacgaaagtgtgcgtagctacaggctggttattcgtgctcaagatggaggcagtccctccagaagtaacaccacccagctcttggtcaacgttatcgatgcgaatgacaatgccccgaggttttacacctcacagtttcaggagagcgtgctagagaatgttcccgttggttacaacatcattcgggtgcaggcctacgactccgacgaaggtgccaatgcagagattacatatagcatttccgaacgagatgataactttcccctggccgtggatcctcgcacaggttgggtgcaaaccataaagccactggatcgtgaggagcaaggtcgctttgccttccaggtggtggccaaagatggtggtgtaccccccaaatcggccagttcctcggtggtaatcaccgtgcaggatgtgaacgacaatgatccagcctttaatcccaagtactacgaggcaaatgtgggggaggatcaaccgccaggtactccggttaccacagtcacagccacggatccggacgaggactcccgcttgcactacgagatcacaacgggcaacacaaggggtcgctttgcgatcacctctcagaatggtcggggtctaattaccattgcccagtcgctggattacaagcaggagaagcgcttcctgctcacagtagctgccaccgactccggaggacgttctgatacggccaccgtccatatcaacattacggatgccaataacttcgctcccatctttgaaaatgctccatatagcgcatcggtgtttgaagatgccccagtgggcaccaccgtcctcgttgtttccgccaccgacagtgatgtgggagtgaatgcacagatcacctactcccttaatgaagagagcataaacggcttgggcagcccagatccattttcgatcaatccgcagactggtgccatagttaccaatgcccctctggatcgggagaccaccagtggatacctactgaccgtaactgccaaggacggaggtaacccttcgttaagtgacactaccgacgtggagattggagtgaccgatgttaatgacaatgcacctgccttcaaaagcccactgtaccaagcttccattttggaagacgccctagtgggaacctcggtgatccaggtggcagccagtgatcccgacgttggacttaatgggcgcatcaaatatttgctgagtgatcgtgacatagaggacggatcctttgtgatagatcccacctcgggaaccattcgcaccaacaagggattggacagagaaagtgtggccgtctttcatttaaccgctattgccgtggacaagggatcacctccgctctcaagcaccgtggaggtgcaaatccgattggaggacgtcaatgattcaccaccaacttttgcttcggacaaaatcacactctatgtgccggagaactcgcctgtgggctctgtggtgggtgagattcatgcccacgatcccgatgagggcgtcaatgcagtggtgcactattccattattggcggcgatgactccaatgcgttttctttggtaactcgacctggttccgaacgagctcaactgctgaccatgacagaactagattatgaatccactcgaaagcgcttcgaattggtggttcgggcagccagccccccgttgcgtaacgatgcccacatcgagatcctagtcacagatgtgaatgacaatgcccccgtgctgcgggactttcaagtgatattcaacaatttccgcgatcattttcccagtggagagattggacgaattcctgctttcgatgccgatgtgagcgataaactacactacaggatactttccggcaataatgccaatctgctgcgcctcaatagcagctcgggaggactggtgctaagtccgcagctgaacaccaatgtacccaagtttgccaccatggaggtatccgtttcggatggaattaacgaagccaaggcgattatgcagctttcagtccggctgatcaccgaggacatgctcttcaactcggtaacggtgcgactaaatgaaatgacggaggaggccttcctatcacccttgcttaacttcttcctcgacggactggctgccattattccatgtcccaaggaacacatatttgtgtttagcatccaggatgacacggacgttagctcacgcattctgaatgtcagcttctctgcccgccgaccggatgtgtcccacgaggagttctacacgccgcagtatcttcaggagcgagtctacttgaacagagccattcttgcccgattggccaccgtggaggtgcttcccttcgacgacaatctctgcgtgcgagaaccctgcctgaatttcgaagagtgtttaactgtgctgaagttcggaaacgcttctgagttcatacacagcgatacagtacttttcagacccatctatccggttaatacgtttgcctgctcttgtccagaaggctttacgggtagcaaggagcactatctgtgtgacactgaggtagatctctgctactctgatccctgtcaaaatggaggaacctgtgtgaggcgagaaggtggctacacttgtgtatgtccatctacgcatactggtcagaattgcgaaacaggagtgggacacctacgaccttgtccgtcggaaacctgtgagggagggttgtcctgcctcagcaattatcccagctcacaacctcctccttatacggccacctgtgagctgcgagcacgtgcctttgggcgcaactccttccttaccttcgaaagtctaaaacaaaggcatcgattcaatcttaagctacgctttgccaccgtacaggagaatggattgctactctacaatggaagatacaacgaactgcatgactttattgcattggagatccatgaaggacacgtgagcttctccttttctttgggcgatcatagtgaaaggatttcggtgattcaggaggcaaaggtgtccgatggtaaatggcatcaggtagaagtggtctatttgaaccgaagtgtcaccttagtcctcgataattgtgacaccgccattgccctttctggacaactgggtgatagatggagctgcgccaatcgcactactttgaagttggataaacgctgttcgctgctcacggagacctgccatcgcttcctggatctgacaggacctcttcaagtgggcggacttcctcgcatcccagcgcacttcccggtgacgaatcgcgactttgttggatgtatctctgaccttcgaattgatgatcgcttcgttgatttaaactcatatgtggcggataatggaacgttagctggctgcccccaaaaggctcctctctgccaatccgagccttgtttcaatggaggcacctgtcgagagggctggggaacctattcctgcgagtgtcccgagggatatgctggaaacagctgccaggataatataccagctccttggcgattctccggagatgggagtctcagtttcaatccccttctgcgacctatccagttgccgtggaccacctccttctccctgcgaacacgtcagaaagaggctttcctcctccaaattcaaataggacagaacagttcggccgcagtttgtctgaggcaaggagtactgtactatatttttgatggagaacccatgtatttggctggcgctttcctctccgacggtgagtggcacagagtcgaaattcgttggcagcaaggttccgagatacacttctcagtggattatggacagcggtctggatcggtgcccatgtcgcagaaggttcaaggcctctatgtgggcaagattgtaatgggtagccccgacggcagcattggagcagttcccgaagcctctcctttcgaggggtgcattcaagatgtgcgtattggagcagggcaatcggttctttcacgaccaactattcgagagaatgtggaagatggctgcgaatcacgtgctcagtgtccggatcattgtcccaaccactcgtcctgccagagttcttgggatctgtctacttgcgagtgtgattccgggtatgtgggtacggactgtgcacccatctgtactgtgagaccttgtgcttccggagtttgtagagcaaacacaagtttacctcgaggttatgattgcgagtgcaacagcagttcccgtcatggagattattgtgagaaggaacttcagcaaccgtgtcctggcggttggtggggtgaacgtgtgtgtggtccatgtcgatgcgatctggcccaaggataccacccagactgcaacaagaccactggacaatgctactgcaagacgaatcactaccaaccgccgaacgaaaccgcctgtctttcctgtgactgctactccattggaagcttcagtggagcatgcaatccgctgacaggacaatgcgagtgtcgagaaggagttatcggacgtaggtgtgactcctgctcaaatccttatgccgaagtcacccttagtggatgcgaagtggtttacgatgcctgtccgcgatcctttgccggtggggtatggtggccacgcactcctcttggaggagttgccatcgaaggatgtcctccaccggctcgaggaaaagggcaacgcagctgcgatgttcaatcgggaagctggaatactccggatatgtacaactgcacctcggagccttttgtggagctgcgtcgccaactgtcacaactggagaaactcgaactggagcttaactcctttgtggccataaaaatggcagagcagctgagaaaagcttgcgaggcggtggacaggagaggtgccagcaaggatcaaaagatttcgggaaatggccgccctaaccgtcgttacaaaatggaatcatccttcctgctcagcaatgggggaaacgtgtggtcacatgaacttgaaatggactacctatccgatgaattgaaattcactcatgatcgcctgtacggcgctgatcttctggtcacggagggcctcctacaggagttgatcaactatgaactcatgcagagtggccttaacttatcccatagtcaagacaaatactttattaagaatttagtagatgcggccagcgttattttggatcgaaaatacgaggcagaatggagaagggcgacggaactcattcaaaggggaccagacgatctggttgatgcatttaacaagtacctggtggttttggctcgatcccaacatgacacctacactagtccttttgagatcgtgcagcccaacatggcgctaggattggacatcgtcaccactgaatccctatttggttatgaaccggagcagttaagcgaataccaccggagcaagtacctcaaaccgaatgcatttaccacagaaagtgttgtgctgccggataccagtggatttctacagcactcggctcgacagcgaccagtgattagcttccccaagtacaataactacatattggatcgtcgtaagtttgatcagcacaccaaggtcctagtgcccctggagatgctaggaattacgcctcctgaaagcgatgagatttcacagagtggacgacgaggaagtagtcatgaccatcgtgccatcgtggcgtatgcgcaatacaaggatgtgggacagctgctccccgatctgtatgatgagaccataacccgtcgttggggcgtggatgtagagctagctacccccattctctccctgcaaattttagttccctcaatggaaagggaacaggagacgcagcgcctggagattccgtcgagaaagatcttctcctcatcttcgccatcttcatcctcatcctcaggcagcacggaacaacaatttgtggaggttttcgatgttcctaaagctccaacaagcagcagtgaacaacagattgaggatatacggataacagcccatgaaattccgccaccagtttcctctgtagaacaacaggaggcttcaagtgatgaagacggcgaagagagggaaccgcacattcgcctaaatcttgacgacattgagttccatggcaactccggcgaggaggtcatatcgccagactcgcccgaaatgcttaatccaaattacgaaggtgtcagttctactggaagtgatgagcagccaaagggtgaaaacgaagcggtttatagagatcgtcgtttggtgaagaggcaggtagagatcacatatccttcagaacaaatgcagcaaacagaacaggtggtgtatagatccttgggctcgcctcatttggcgcaacccataaagctgcaaatgtggctggatgtggattcagcacgctttggaccccgttcgaaccctcaatgcgtccgttggaactcctttaccaatcagtggactagattgggctgtcaaactgagattcccgacttcgatggagactttaatcctgcggcacaacaagcgatccttgtgaactgtagctgcacccatatttccagctatgctgtcattgtggatgtgattgatccagaggacatcccagaaccttcgctcttggtgcagattacctcctactctgccttcctcgtttcacttcccctgctgctgggagtgctcttggctttggccctcctacgtggtcagcagaccaactcaaacaccattcaccagaacattgtgctttgtgtcttctgcgcggagctccttttcttcgtgggaatgcaatcgcgtcggcagctcctggagagcgaatttccctgcaagctgacggccatctgtctgcactacttctggttggctgccttcgcctggacaacggtggactgcgttcatctatacagaatgctcaccgaaatgcgtgacattaaccacggccccatgggcttctacttcgccatgggctatggtgctccagccatcgtcgtcggattatctgttggagttcgtgctcatgagtacggaaatagtttattctgttggctgtctgtctacgagcccgttgtgtggtggctggtgggtcccattgcgggcatgtccgtggtgaacctgctcatccttttcgtctccgtcaaagctgcctttacacttaaggatcacgtacttggatttggaaatttgcgaacgctcctatggttgtcagtggtatcgctcccgctgatgggagtcatgtgggtcctagcggtgctggccgcttcggagcactctcagttgctgagcctgttgctctccggtgtggtgctactccacgcgcttttctgcctcattggatactgcatcattaacaagcgggtgcgggaaaatctccaacgcacctgtctgcgatgcatgggtcgcaaggttccgcttttggactcctccatggtggttagcaatagctcacacaacgtgaatgcagcggcgaggccgagtaacttcctggcaagtggatatgatacaaccaccaggcgaaacataggcatcagcgctagtagcactacgtcgagaagtacggccaaaacgagttcgagtccgtacagcgatggacaactgaggcagacctcaacgtccacctcgaactacaattcagccagcgatgctccgagtttcttgagaggattcgaatcttctacaaccggaaggagcagaggtggcgaggagaaaccatcgcggcgccagaggaaggactcagactctggctccgaaacggatggaagatccctcgaacttgccagcagtcactccagcgatgatgatgaatcccggacagctagatcttctggtacccatcgcagcaccgccgtgagttcgacgccagcctatttgcccaacatcacggagcacgtccaggccaccacaccgccggaactgaatgtggtgcagagtccgcagctcttcccgagtgtaaataagcccgtctatgctccgcgctggtccagtcagctgccagatgcgtatttgcaatcacctccgaacatcggacggtggtcccaggacactggatctgataacgaacacgttcacgggcaagccaagatgaccatctcgccgaatcccctgcccaatcccgatctcacggacaccagttacctgcagcagcaccacaacaaaatcaatatgcctccctcgatcttggaaaatatccgagatgctcgggagggctatgaggacagcttgtatgggagacgtggagagtatcctgacaagtatggctcctacaagccacccagtcactatggcagcgaaaaggactatcccggcggaggaagtggctcccagacgattggtcatatgaggagtttccacccggatgccgcgtacttgagtgacaacatatacgacaagcagcgaacgctgggcagtggctacttgggcgccaagtcggagtcgccttacctgtccaaagatcgcataacacccgatatctatggatccagggatggtcattatagcctcaagagacagcctgcctatgcaactgattccctgcactcggttcactcgctcctaaagaacgattaccaccagcagcaacagcagcagcagcaacaccatttgcaagacagattgtccgagggatcggataagaatggctaccactttccctacaccgccgaagaggatcacctgcccgccaggaagctgagccacacccaaccgccttcgcttcacggatcccagctgatgcagccacctggagtgggcctggtcaacgatgtgaacaatccgggcttgatgggaaggcacaccctaaatggaggatcccgacacagttccagagcgtcctcgccgccctccaccatggtggctcccatgcagccactgggcccactgacaagcatcacggataccgaaagtctcgaattttgtaccaaattccctggaaaatcgtatggcaccattggtaacattcggttttgggagatttctgtgacatgcctgctcctgttggcttcggcggaatattgatgatgacgagaccacagtgtgacgactgtcccagcagcaacagcaacagcagcagcaacaattgaagctgcaacaaaggcagcagcagaagcagcatccgcatcagcagcgacagcaacacatgcaacaattgcagcagcaacgcaccaagcaacagaagcagaagcaaacgcaatattttgccaccattagacgcaagccgcagtacaggattcacacggaggactgaggtccttcttgccaatcgatccgatcgtagcatacttttgggagcacctgccataggggcatgcccgtcattataattgaaactttgtacatacaagcacccacttaattttacgtaaacccagcttagtatacccccattcgggcacagatatttatacgatagcctagcatttacataatttgaggcgccagttgcatttcgttcggaattgcataactcgcatgcacacacagacacagaattactcagctttagccttgtgtatgtattataaattacactatataattatgtattaaaacaagagtcagactgattttatgcattttacgttctgctattatatataagccccacacaaacatttagccagcgagctcatgcatttaggtccaattaccataccattaccattaccaattttgaatgccccagatccgattcgggttcggaacgaggggcggcgatatcgggttctcagtgcgactttagtttgagaacgtttgtgtgcctcgagctttttatgccaaattagttgaagtcgaaggggaacttgtaaatgaaaaataatctgcgaaagtttgcaattcatttgcctagcatccgcacatgttgccatttagtttgggagttagttttaattgatagcatctactatccgtatgaacgttgcgaatgtacaataagccccccctgcaaaagaaagcaagtaaataaattcaggacagttcccgtatttatgcgaaatatagaatccacatgcgcagcattgacatatcctgcaaagtatactcgatacatatatctgtctataatatccgagtcctggccaaaggaagctcgaccaacagtttgatccccgactcagcaatagccgctcatgcccctcagaactatgtacaatttataaataattcataagccgtacttactgtactcgaactccactcaactgccactcattgtggcacctacgtaagctatggattgcgcttgaatgtggcacacaatatttgatatttatgtgaattgacttatttaattgtaaattatacaagtatatcaatatgaataaaatgtgtaaaatatatgaagaaaaatgaa

SEQ ID NO: 14577 - protein, 3606 aa, DROSOPHILA
MQTREFPQRPLGLLLVLLVVLLQSSLIKSYLIIVHEDTPPGTVIFNASVYKLGSERHYKINAHKSANFVHHLVSVNHKDGQIQLRKALKCDGIYYPNLFTFYVDSTSNRLRSIDYYSLPVRIFVSGHSCNEDRRIEQELHHHHYEEEDNTGYSKRRRRRSTQEMIQLNGNQLEEVFRQNSTEFRAGDLIFGDSFDNEMRHRILSRKRRAVGSPDPLHLQPALHRRISDAKQWISETYASYAIHTTDKWNQICLRRSQFINSLNAFLPRSVCQHCKVSFLDVNDERFAIEHQSRDLVASRDVCIAESMWKVSITFNIRCDRRDIVDSDHRLKIVYHHQEFNDTDIARRVRRELRNQSPYFEQALYVASVLEEQPAGAAVTTVRARDPEDSPVVYSMVSLLDSRSQSLFKVDSRTGVVTTSASLDRELMDVHYFRVVATDDSFPPRSGTTTLQVNVLDCNDHSPTFEAEQFEASIREGATVGSTVITLRATDQDIGKNAEIEYGIEAVTDGAGLAQDQEMPIFRIDSRSGVISTRSSLDRETSDSYHLLVTAADLASAQSERRTATASVQVKVLDDNDNYPQFSERTYTVQVPEDQWGGTEDNTVAHIRATDADQGNNAAIRYAIIGGNTQSQFSIDSMSGDVSLVKPLDYESVRSYRLVIRAQDGGSPSRSNTTQLLVNVIDANDNAPRFYTSQFQESVLENVPVGYNIIRVQAYDSDEGANAEITYSISERDDNFPLAVDPRTGWVQTIKPLDREEQGRFAFQVVAKDGGVPPKSASSSVVITVQDVNDNDPAFNPKYYEANVGEDQPPGTPVTTVTATDPDEDSRLHYEITTGNTRGRFAITSQNGRGLITIAQSLDYKQEKRFLLTVAATDSGGRSDTATVHINITDANNFAPIFENAPYSASVFEDAPVGTTVLVVSATDSDVGVNAQITYSLNEESINGLGSPDPFSINPQTGAIVTNAPLDRETTSGYLLTVTAKDGGNPSLSDTTDVEIGVTDVNDNAPAFKSPLYQASILEDALVGTSVIQVAASDPDVGLNGRIKYLLSDRDIEDGSFVIDPTSGTIRTNKGLDRESVAVFHLTAIAVDKGSPPLSSTVEVQIRLEDVNDSPPTFASDKITLYVPENSPVGSVVGEIHAHDPDEGVNAVVHYSIIGGDDSNAFSLVTRPGSERAQLLTMTELDYESTRKRFELVVRAASPPLRNDAHIEILVTDVNDNAPVLRDFQVIFNNFRDHFPSGEIGRIPAFDADVSDKLHYRILSGNNANLLRLNSSSGGLVLSPQLNTNVPKFATMEVSVSDGINEAKAIMQLSVRLITEDMLFNSVTVRLNEMTEEAFLSPLLNFFLDGLAAIIPCPKEHIFVFSIQDDTDVSSRILNVSFSARRPDVSHEEFYTPQYLQERVYLNRAILARLATVEVLPFDDNLCVREPCLNFEECLTVLKFGNASEFIHSDTVLFRPIYPVNTFACSCPEGFTGSKEHYLCDTEVDLCYSDPCQNGGTCVRREGGYTCVCPSTHTGQNCETGVGHLRPCPSETCEGGLSCLSNYPSSQPPPYTATCELRARAFGRNSFLTFESLKQRHRFNLKLRFATVQENGLLLYNGRYNELHDFIALEIHEGHVSFSFSLGDHSERISVIQEAKVSDGKWHQVEVVYLNRSVTLVLDNCDTAIALSGQLGDRWSCANRTTLKLDKRCSLLTETCHRFLDLTGPLQVGGLPRIPAHFPVTNRDFVGCISDLRIDDRFVDLNSYVADNGTLAGCPQKAPLCQSEPCFNGGTCREGWGTYSCECPEGYAGNSCQDNIPAPWRFSGDGSLSFNPLLRPIQLPWTTSFSLRTRQKEAFLLQIQIGQNSSAAVCLRQGVLYYIFDGEPMYLAGAFLSDGEWHRVEIRWQQGSEIHFSVDYGQRSGSVPMSQKVQGLYVGKIVMGSPDGSIGAVPEASPFEGCIQDVRIGAGQSVLSRPTIRENVEDGCESRAQCPDHCPNHSSCQSSWDLSTCECDSGYVGTDCAPICTVRPCASGVCRANTSLPRGYDCECNSSSRHGDYCEKELQQPCPGGWWGERVCGPCRCDLAQGYHPDCNKTTGQCYCKTNHYQPPNETACLSCDCYSIGSFSGACNPLTGQCECREGVIGRRCDSCSNPYAEVTLSGCEVVYDACPRSFAGGVWWPRTPLGGVAIEGCPPPARGKGQRSCDVQSGSWNTPDMYNCTSEPFVELRRQLSQLEKLELELNSFVAIKMAEQLRKACEAVDRRGASKDQKISGNGRPNRRYKMESSFLLSNGGNVWSHELEMDYLSDELKFTHDRLYGADLLVTEGLLQELINYELMQSGLNLSHSQDKYFIKNLVDAASVILDRKYEAEWRRATELIQRGPDDLVDAFNKYLVVLARSQHDTYTSPFEIVQPNMALGLDIVTTESLFGYEPEQLSEYHRSKYLKPNAFTTESVVLPDTSGFLQHSARQRPVISFPKYNNYILDRRKFDQHTKVLVPLEMLGITPPESDEISQSGRRGSSHDHRAIVAYAQYKDVGQLLPDLYDETITRRWGVDVELATPILSLQILVPSMEREQETQRLEIPSRKIFSSSSPSSSSSSGSTEQQFVEVFDVPKAPTSSSEQQIEDIRITAHEIPPPVSSVEQQEASSDEDGEEREPHIRLNLDDIEFHGNSGEEVISPDSPEMLNPNYEGVSSTGSDEQPKGENEAVYRDRRLVKRQVEITYPSEQMQQTEQVVYRSLGSPHLAQPIKLQMWLDVDSARFGPRSNPQCVRWNSFTNQWTRLGCQTEIPDFDGDFNPAAQQAILVNCSCTHISSYAVIVDVIDPEDIPEPSLLVQITSYSAFLVSLPLLLGVLLALALLRGQQTNSNTIHQNIVLCVFCAELLFFVGMQSRRQLLESEFPCKLTAICLHYFWLAAFAWTTVDCVHLYRMLTEMRDINHGPMGFYFAMGYGAPAIVVGLSVGVRAHEYGNSLFCWLSVYEPVVWWLVGPIAGMSVVNLLILFVSVKAAFTLKDHVLGFGNLRTLLWLSVVSLPLMGVMWVLAVLAASEHSQLLSLLLSGVVLLHALFCLIGYCIINKRVRENLQRTCLRCMGRKVPLLDSSMVVSNSSHNVNAAARPSNFLASGYDTTTRRNIGISASSTTSRSTAKTSSSPYSDGQLRQTSTSTSNYNSASDAPSFLRGFESSTTGRSRGGEEKPSRRQRKDSDSGSETDGRSLELASSHSSDDDESRTARSSGTHRSTAVSSTPAYLPNITEHVQATTPPELNVVQSPQLFPSVNKPVYAPRWSSQLPDAYLQSPPNIGRWSQDTGSDNEHVHGQAKMTISPNPLPNPDLTDTSYLQQHHNKINMPPSILENIRDAREGYEDSLYGRRGEYPDKYGSYKPPSHYGSEKDYPGGGSGSQTIGHMRSFHPDAAYLSDNIYDKQRTLGSGYLGAKSESPYLSKDRITPDIYGSRDGHYSLKRQPAYATDSLHSVHSLLKNDYHQQQQQQQQHHLQDRLSEGSDKNGYHFPYTAEEDHLPARKLSHTQPPSLHGSQLMQPPGVGLVNDVNNPGLMGRHTLNGGSRHSSRASSPPSTMVAPMQPLGPLTSITDTESLEFCTKFPGKSYGTIGNIRFWEISVTCLLLLASAEY

SEQ ID NO: 14578 - DNA, 3689 bp, DROSOPHILA
atagccagtttttggtcgtcgggacccagtccaaattcgttaaatatctgagaatcttcgattatcctcaccgatagctctttgaatggcagcagttctagcagcgtgtccctgccgatctttgaattttttggctgaaggacaagagccacaaattgtatcggagtttccccatcttgatcttggaaaatttcatagtctgttgcttttaggggacgaaagtttggctggccgggtccatagtcattttgggataccaattcggccagtgttgagctaatgaactcgggatcttggcctgggattaccgctccaagaacatcatcgttcttcctcatgtcgggaccaaagaatcgcaatgatggcgtctggcggatattgaattccctgcagagttgagcatttctctcctgggcacaatctacggcatagatccggagaattcttcgccacttgtagaggtcgcgggaaagggtcttgaagaccggtgcgaagcgatgacagtcaccgcagaagctgttgaggaactggaccagcttgctgttcttcaagtttagagctggcctcagcgattcgatgtccaacataatcacattgtctgtatcgctatagagactcgcctcgttcgccgactttctggcattaagccggcccagcacatcagcaggggagatgaggagcaggcaataaagaagcgtcttgagtagccgaatcatttccacactgtgctcacaagtcaaatgagccacttcaactgattcaatagcaagggctctttggtaattatagccacatttggattcgccctgctccggttgttaagtctcccccaccatgccccaaatctctctctcaaaacaggttttcttaatttggtgactcgctattctatccaggcacacccaaaagaattcatgaatttcatatatattttaagtgtgtgtatatatcggaaaaaatgcaagtaaaaattggttcatgcggataataataataacaattacttctgtaaatattttttctttgatttacattcatttgatcttcttgaatgtggttctgcatcgccgcttaaataacttaaattatacacgcgttttaggtatttaagcacctcatctctatcaaattcacctgaatgtgtatagcagtccgggcaatgcttccgctccggaaactggactttaggaaaccgtgggtccccagaggcgtctccagctagtttttcattcacctcgttatgggcttcccacaaccataggatctcctcgtcatgggttctaactttcgcaatattcatccgcttcgccagttttacaaagtacatggaaccatctttgcagtcgtaaaagaacttggcaagtccgtaaagtccaattgtcacggagctgggcggatataccttcatctgggccgccaagacggtgaagtaatgaaacagtgtccacaaggagcagctaaaccgtcgagtatggggtgtagaacccaagcaaccgacgtattgttgttccgcaaagatgggatccaacctggtttgcagatcatccactacgtcccggaactcctctcccgtaatttcagtaacctcaaataggtgattcactaggctgttcagcattcgcctcccgtctctgttaagaacattgaagcggcgaaacaagcgaattatatgacgaagagctttaaacttaaagccacttataaaagccgttttagggatctcaacatgcaggaattggtagatggcctgctctaagtcggcttgaaagagcacctttgttgagttcagcacatagtccacaataaaagcatcgtatccttccgaaaggatatattcgggttctgcaggtggcaatgtgggcatacttgtgtgcccattttgatgcagaagcccagcaacgctctccacgtaagcagagctacttttaccggcaggcttgattagttgggctttaccagatctatttagtagggctaccatttgtttacacggcttcagtccgaattgagcgaacatttctgcatccttgataatccgcacccccacatccggatagggaagcatgttgagaatcgtttctatgcccatatcgactggatggaccaacaaaatgtatgttaccttgttgtcgaactgttcgtagatatcattcagcttgttaccgggctctataggatcaaagatgggctttacacctttgctttcactgtagtcgttttcggacagactttcgatgagctggtcggcgatttcagatggaattgttgtttcaatatctgtgccaattccgtgacgtattctctgaaattttgaaggataatagcgaattgttggcgtaagcgttatgcgaaaatctcgacacaatttcacattttccaaacgggcacagtcaaccgcatatatccggagtacccggttccacttctgcagatcaacagccattttcctaaacgtgtgtgcgaatctcctgcagtttccgcagtagctgttcagaaactgcaccaactttcccatggctggttcagctagaatctttttcaaactggcaccgaccacaacatgaatattgtcctccttcgagtacagaggtggctcttcatcaagacatctctgcttagaatgtccttcctgtacaatcaggataaggataatgcacgttaaatacggtacccagaaatgccaaaccattttatctcaagaccgatgataatatgcactttctctcttcacatggcttaattacaaaatcaacttatctcattagcttcgctatttattatttgtgtaaataattactaatcttattatacgctggagctttcgtgaaattgtaaaatggaaattcataaaagaaaagaaaataatatgtgggtaatatggacaatctaatatattttatattttctaacaaatcataatttttaagttttaccgcgggaaatgaattaactacttgttgaatttttgaaaacttcaaacttttcttggttaattagtttaaaataacttatttaacagtacaaaagtatctaccaaagtatatacatatatagccatcatctcgaaagcatctcacttcatgtttgtaaattcccgtgtccatttaatatcctgaatagccctctaactaattatatctaagtgactctaaacgaccccaatgggttttcaattatcaaaacatattcaaatgcggaaataccagcaggatgttggccaaaaaccaccgcaaggacatgagccgaataaaacgagctcgggaatttcgcacatcgtgttaccccacatacacacccacacacatgcaacaagttggccagagcaacaagttttggtaatagttagcatcaaaagtggccaaaatatcagatgcacaatgtgccaaagtttgcggcttgtctgtctcatttacatggagaatcctgctaaccgcagttgacgtcacggattatggccatgagatgatgaaacaagacaagcgccactcaaaactttcctcgccaaacttgttcgggtgtgaaaacaagcctcaaatgcagcttaaaactttttggcaacagtttatagcgagcaaaaggggttcatttgtatcccccgcagaatccttgccactgccacaagctggccaactttcaactggctaatttaatttcgcaaagagtcctggaggctgttgtttctggcatat

SEQ ID NO: 14579 - DNA, 1689 bp, DROSOPHILA
atggtttggcatttctgggtaccgtatttaacgtgcattatccttatcctgattgtacaggaaggacattctaagcagagatgtcttgatgaagagccacctctgtactcgaaggaggacaatattcatgttgtggtcggtgccagtttgaaaaagattctagctgaaccagccatgggaaagttggtgcagtttctgaacagctactgcggaaactgcaggagattcgcacacacgtttaggaaaatggctgttgatctgcagaagtggaaccgggtactccggatatatgcggttgactgtgcccgtttggaaaatgtgaaattgtgtcgagattttcgcataacgcttacgccaacaattcgctattatccttcaaaatttcagagaatacgtcacggaattggcacagatattgaaacaacaattccatctgaaatcgccgaccagctcatcgaaagtctgtccgaaaacgactacagtgaaagcaaaggtgtaaagcccatctttgatcctatagagcccggtaacaagctgaatgatatctacgaacagttcgacaacaaggtaacatacattttgttggtccatccagtcgatatgggcatagaaacgattctcaacatgcttccctatccggatgtgggggtgcggattatcaaggatgcagaaatgttcgctcaattcggactgaagccgtgtaaacaaatggtagccctactaaatagatctggtaaagcccaactaatcaagcctgccggtaaaagtagctctgcttacgtggagagcgttgctgggcttctgcatcaaaatgggcacacaagtatgcccacattgccacctgcagaacccgaatatatcctttcggaaggatacgatgcttttattgtggactatgtgctgaactcaacaaaggtgctctttcaagccgacttagagcaggccatctaccaattcctgcatgttgagatccctaaaacggcttttataagtggctttaagtttaaagctcttcgtcatataattcgcttgtttcgccgcttcaatgttcttaacagagacgggaggcgaatgctgaacagcctagtgaatcacctatttgaggttactgaaattacgggagaggagttccgggacgtagtggatgatctgcaaaccaggttggatcccatctttgcggaacaacaatacgtcggttgcttgggttctacaccccatactcgacggtttagctgctccttgtggacactgtttcattacttcaccgtcttggcggcccagatgaaggtatatccgcccagctccgtgacaattggactttacggacttgccaagttcttttacgactgcaaagatggttccatgtactttgtaaaactggcgaagcggatgaatattgcgaaagttagaacccatgacgaggagatcctatggttgtgggaagcccataacgaggtgaatgaaaaactagctggagacgcctctggggacccacggtttcctaaagtccagtttccggagcggaagcattgcccggactgctatacacattcaggtgaatttgatagagatgaggtgcttaaatacctaaaacgcgtgtataatttaagttatttaagcggcgatgcagaaccacattcaagaagatcaaatgaatgtaaatcaaagaaaaaatatttacagaagtaa

SEQ ID NO: 14580 - protein, 562 aa, DROSOPHILA
MVWHFWVPYLTCIILILIVQEGHSKQRCLDEEPPLYSKEDNIHVVVGASLKKILAEPAMGKLVQFLNSYCGNCRRFAHTFRKMAVDLQKWNRVLRIYAVDCARLENVKLCRDFRITLTPTIRYYPSKFQRIRHGIGTDIETTIPSEIADQLIESLSENDYSESKGVKPIFDPIEPGNKLNDIYEQFDNKVTYILLVHPVDMGIETILNMLPYPDVGVRIIKDAEMFAQFGLKPCKQMVALLNRSGKAQLIKPAGKSSSAYVESVAGLLHQNGHTSMPTLPPAEPEYILSEGYDAFIVDYVLNSTKVLFQADLEQAIYQFLHVEIPKTAFISGFKFKALRHIIRLFRRFNVLNRDGRRMLNSLVNHLFEVTEITGEEFRDVVDDLQTRLDPIFAEQQYVGCLGSTPHTRRFSCSLWTLFHYFTVLAAQMKVYPPSSVTIGLYGLAKFFYDCKDGSMYFVKLAKRMNIAKVRTHDEEILWLWEAHNEVNEKLAGDASGDPRFPKVQFPERKHCPDCYTHSGEFDRDEVLKYLKRVYNLSYLSGDAEPHSRRSNECKSKKKYLQK

SEQ ID NO: 14581 - DNA, 9333 bp, DROSOPHILA
gattgcgctcgaaaagcttgtctttggtgaccagccgcacagcgtccgcctggtggaataccggatagtgggtgctatcgatttcgtcccgtcgatacacctcgcccacgaccagaaagttgtccagcccgcccgagatcaattccacctgatgggcggtggtgtgggcgcgcagcagatgctgctgattgatgtaatagcaatcggatttctgtcgactcacatgatcggcgggaattagcagattgtcaaagttctgctgcacagtaaccaccggattcatttgatcatagacggagaatagtggattgcccctttggttgcgatacgctccataaaagtagtttacgatcctctggcggatgatggaaagcgggtggtccgtctgcaggtgcttgttggcccccacgtaggagagtatcttgggcgttacgttcgtccatccgtcggtggcgtacgtgcttccactgacctccagctgcggtggcgatgacggcgacttcgcgggcgccgcactgctggccaggcagcgggtggacttcaaccagtgccgtgctccctgcactcgaagcgtcagaagcatattggagggactttattgattcgatgcaactatttattgcattttttgttataacttggaagttatgttatgttatcagatgttatgttaacatatcgataattttctacagcagtcgcaaggcttcagcagcacggactgtgctgttaggcgcacactaacagagctgttggataaccacctggcgccatctgccggaaagcgaaagtgttgaacagaaattgtatgaaattgtatgaattgaaatgtattttttaaatcaaaactaaaaattgtgaataagtaatcaaatattacaaattcaaagcaaaatacataaaatatatttttaagggatgtcttgagtgaaaagaaaccaaacttagttgactgcaaaactttgatttgccaaaataacttctctcccaattcaaaaacttcaatttttaaaattatataatttttatttatttttctacaaacatcaacagatttgttgttcacctatatcatacatgatggcagagaaacgcgaatacaatggacccattacaaaattagttcattaaatatgaggttgggctaaattattaaagttcatttttgagatgcttgcgttggtatcttttctgtttcttttctaaatcatatcatatgaatgctggggctaaactacatcagttctgctctagaccaggggatagctggaggcgctagcgatgccgcactggttctccttgttgcgcagcatcttgatgaagcccttgtcgccccaggtggtgccccacgagttcttcaccagccagtaatcctcgccggactcgtcggtgccgaagccaacgaccagcacaccgtgatccagattctgggcatcacactgcggctcgttgtagacgccctccgagtagaactggaacgactcgtgggaggcatcgatggcgacggaaacgggaccaacggtggccacagcctcggccatcttcttctcatcaccctggggaatatcggtgaatccacgatcggtggctccgactgtgcccttgttaaagtggcacgagtcatcgatggcctcgtagggataggacttctcggtatcgatgcctccattatccttaatatagcggaaggcattgtccatgagaccgccgttgcatccattgttgccgtacttggtggagcaatcgaccagattctgctcggacagcgagacgaggacaccggacttgcggaaatgctgaccctcgagggcgcctgtgctggagaaggcccagcagctgccgcagtgtccctgatccttgacggcggtcacagctcccttggtgcgccagtccacagatttgggcagcgtcacatgagccggcgagatgaaggtgactcccttgaagctttcatcggcggcactgaaagcgaatgcaaagttgaatatgtgcacattataatccttaacgatcccaacttaccgcagttgcttgtgcagagtgtagttgaagccgttcatcagctgacggaattcgtggtgcagcaaatcggcgtacttattgaccgccagtttgaagctcaccttgccctcggcgaatcgctggttgtgcttggcaatcttgtgcttgttctcattgaagatcttgaggcggaaacgctcctcggtttcatcctgatagttcttgcggtgctccagctgcataatgaaaagtattagtattagttagataatgcactcttatcaaaggtaagtgctactatcgattgactttcgtgtacttgtttcaagataagataaagccaaccaaatgaaaagttaactttttagacgcatttttgggaactctattaaaaatcaaataaaatgttttacgtaaaatggatttacgatcgctgaggcaaaagttcttaatctgcagattacaccttatcacagcgccgtcaacctggcacgagcgaaacgctctagaggaacggccacagtagcaagctctataaatctataaaacatggtcataaaattgtgtttaacgattgcccaacgacaggaacttgaaacgggtgttaatgttccaggtagtaaacaaacgagccaaactgcaggtaggaataggagaagcgaggccagcacgaggaaatgcgctccatctgcctgcagtggtcccgtggataagagacctcctctcccagctcggggttgtttgttagtccgacccgcatattgacacagccacagcacgaaaatagcacgaacgctaaacaaatgatagctataaagggaattgaaaggccagggcaagaagtcgactaggttgctatccattagattcggcaaatgccactatatgggggtagttttcgattcaaagtgaaatttgtgaataaaaattgacttcctcttgtctgaataccaaattagcggctttgcatagaatcgaaaagtttatgaaagttaagttaagtatatagaattattcaacaaaactcattattactgctcacgaatatccaaatagcaaacatgctaaactgaaatgcattttccaaaagtgtttattgctaaactggttatttttttgcgactcttcaacgcactcaaagtggcatgttttctcagtgaaatatgggtataaacccaaacctaatcgctttttaagtggctcaccacaagtcttagtagattttgcaatattccagggtacttggcacattgaactgaacagtcgagtggcgctgtcatgtgagaaacatgcatgtgtaattacttttggacatcaaagcggaccagcatcagcaattgtcgccccaaatggaccggatggggtccactggtccgtggttgactcctataattgacataattgaatcgaattcgagtcttgcagcaaaatgaaaccccgcccgttgtgatttcgagggaggaggtggtaacggcagaaaagaggcgcctcccggcacactgacctattgattttccttgcaaacgtcgttggttctcgttgccgcatgataaaattcacacatttattgtatacttttgtagaaaatttgaatttgcgatatatgcagatagagttaacaacttaaaaacaccgtaattaaatgcacgtgcgatccgatgtgatatccaggcactcgacgtatacgttttgtatctatcaatctagatatactacatatgtggcttaggaaacttcgttgcagttgagaagcttggacgatagtagttgagtatcagagagcttagctagtgcgatctccatccctacagtcgctccatctcgatggcacagctatcgtcctcctgatccgcatccgcatgccgttccgttgtcgaagtggccgcataggaggaatgtggaacaggttgttgttgttgctgcagctcctcctcctggcatttgtattcccgccgcttgcgcataatgtaggcgaaaacgaagccatttatgaccagcatggccaggacaattatcgtcggccagaccacatccaccgatacatccaaattatttgcactggtatcggtcattcttatgctgtgattgctcctccgtggtttttatgtaatttatttgctattaccgcccgtctccctgcgatttcgtagcacgttttttacgatgacgcgcgtgcttttccgtacttctactaccaccgctgggggccccgtctgacttggctccttttatttcttttctctcaaatgttctatatattgcgctctgcactgctgctgctactgcctgccgctggctgctcgagcgttccgttggcgtggagcgtcggttcgggaataacaaaaatacgacagagctggctgcttcgcttttggtggtggtggtggtgatggtggtggtccgctcgcaaacgcaaactcaatcgcatgacggcggggcgaaaaagagccgagttcacacacgcacacaacacactctacactctttcttcgtatcgccgaaatcgaaatgagagcccaatctacgtaggccaaccaatttggaggatggcaggcgggcgtactctatatatttcttgtttcttatgctttttcgtatatttccttctgttttgcagcgcgcgcattgtgggtttgctcaaaaaggcgaaccggtttcattttgatttataaggatttcaggcgagctattcaaatatgtttgctccaaccggttagcagaagtaacagatttaaaaaaaaacgaaaaaaaaaacagaaacttatgtatctttaataaaaaatgtaagaaaagagccgcatgctgcttttgcaagtcagcgaaatttttcccagcttgtttatttacggcagccgatttgtttgtgcacttgtcactcggggaattaatgctagaaatctctttcggctctcggaaatgccagcgaaaaatggcaatttgataagcaacgccgatttgtagcgcgtcatttccaaaatgctcgcggccccccgcacgacttgttcttaaatattgttgttgaatatttgccgaactatgcgaatagctgcttaaattaaaacgcattaatctggaattttagagcttatcagtgccacagttgctcaacgctgacttttgcagctgtgcatttgcaaccgacaactgtggcactttggactgcacacacattacagataatgtcgtttttattaactaactataagcagtgagagctaatggttggcatcgttatcacatttaaattgcgcgcctttcattccccaagcaagcatgggtagcactgtttgcagcagtgtgaccgagcgtttgcagtattctacatgacacctaacggtctcgaaatgtaaaatggcaaatgtaaagtaattgtgagtttattttgaaaaaaaaaagaaaactaaatctaaactaaattagatgatcaaagaaaatttagttaggtaaataatatatgagtggggaaattgcaaatgtttagttgattttctttttatttttaattaaggatgagtaactctttccataaatatgattcctattctttcagttgatcagactttgttatttataaacaataatttaatacaccactctgtgcttactctaacaaatgagtcactcaattgaatatgatatttaacagcagataaaaaaaggaagggaaataaagttatatgcatatattgcatatgcgggtgcatttgaatttgaattcgaaaagtgaatataaaaccatcaaaggcaaaatatccaaagttattaaaccaatatgcatatatagagatgtacatatatcccccttatcacatgagatctctgcacaaacagctaattattatttgtacgcccccatttggggctaatgacgcttggcacggaactattcagtaaaataatggaaaaaatcacgacccctgactgttggcgataagaattagacgacactaggggcgcattcaattaatcaatagacaatccaccattgataagcagacgaagttgcaagtgaaggctgcgagacaaaggatgattggcccaatcatcaatggaaccatggacacacatatatatgcaatagaagggggcaaaaatcgaagtcgcattaggaaacatggcttgcgaaaagtgtgatggcaaatatgcgacccgcgccttatcagtcggccggcagtggaccagtttgagtcttgcacggcttatcggcgggaaatgaaccgcgagcgtagcgaaagtgggcgacacaacgacttggattatctgcccatccagccgatgtttacggatgggctaagcaaagcagcccagcttgccgcttgcggtcatgtgagccggcatgtgactggacgacagcctagacttttggacttatctgaatcctccttccgtctctttgaggcagccgcgcagcagtgcattcacactcgcaatggctgctgactcagaagtcagaagtgcggaatcgtcacaaacggaagaatgccgcgcgtccaactatgcaaacaaagtcggacagaagacaaaggcccaaaaaaaaaattaatggattaatcatcattacacatcaagcccttgttaccggagaacacttgttatctgcctcttcggcctggcgaattaaatatgatccctagatgatccggttgaaactcaccttgaacgtatgccattcctccatgaccacgtcggcgaaggaaacggcctgagccaccgccagcagggccaaaagtggcagcaaaacagctgtgcgcattgtgatttgttctggaatctgcaagaaatcacacaattagtaagcaaactaacaatcggagtgtcggtcacgtgaagccactaaaccagattgcaaaatatcagggctggctcactaacttcgaattaaagtaaaatacatattctaagctgctcgagcgataaaggaaagttgtgaataaagtcagtttcttgcacttgttcatgattcatactattaaattgtggttaattagcataatttgtgctattaaagtattagttttatcttagcaactttgtcatgagcctaagcaatattttaataaatttctaacgatcaaaatcactgcaaaatatttaatatttattgggtaaaatatggaatttattgcaccaaattgcaatttattgcaaatttataataaaaaaaaggttattaatattatttatttatttgaggctaacttaatgtataaaactataagcaatctgagatctagcaatagaagctttgtaaatatattattttaattctttattaaattcgtaacagacatggttttgaaaaactagtttttaaatatatcattgtaagcatagaaaagagtgaaaatgaaagaataaataacggttcaaatttgagaaatttgatcctttaaagaagcttctctcgattttagcgtaaaatattctctttatagagacataaaaattatttctataaaacttgactgatttgcggggcgtttgtaaatatattgacatttgctttgtgataaacaatatagtttaatatttgtttttttttattttttcgatggcgatgcgttatcttatcggccattccactttgcctcgcagcttcgtattgctttcaaagtctgccatttttgcgcgatttgcttcacttattgtttttctatcattgtcttgctgtttttgcgcccattttgagaaacgtgagaggcatttgataaaagttgttatttaccaattgtgccctctgcgatttgtgcctagttcgagggcgaaaacgggtttcaaaaacgccaaggtgattcatctggctatcaggtgagttaaaaaccacaaagactagaaaaatgggtcagcacaaaggggaattggacaaaatctaaacaaagaagcgcaacagaatctaaagcgcaaagcaaaaggggcaataaaaacgggcatagacgaagatgccgactgttgattattgtggagtgcaattaaagtgtaaataagtcgccacacagacatgacgcaattagattcaacaagtcaatacgaagcaattaatcggcattaatgcagggcaggtatatttgcgttctcaactcgaaaataactaaaaagactacatatattgcttaccactcggaattgcgtcgcaaggaatgcagtaaattcactgatttatcactgttgttgcactctttttaattggctgaaacaacactaatgtgcaagtcaaccgattgtatttaacaagtcgctcttgatgatccagtcccaaagacctttcgttgtttaatgaaaaccagcagaaattgtttaaacaagaaatctccgacagagtgaccagtccgaatcttctggaaataccagaagttgcctgagcagacggcttatcgataacagcgtgggcagtgatgcagttcttgtgtgtaaaacggccaaattcagtcgctaaatcgaaataattggtcagcctaaatatatgcaagagctttttagtttatgtttatttaataatgagtgttaaataactaaaaactatacctctcttgttacttttgcaatcgaaagatttctaagtcactcaacgaactcaatttaaattatacaacaaatgtctaaactgaattttgttcaacagtgttttgaaatactaaatgttagaattcacccgttgatggtaacactgctgaggtaagaagaagacaaattttgctcgtcattgggaattgacgattcactgaatttttgataaactcaacaaagtaaacgcattatatatcccgtaagtagtgcagcgactactaataaccccaaaccgatcacggcaccataaaacactttcgagttatgcgccaaagaaagtcgtaattacaatacgttcttcatccaatcttcgccagctctcaagaagcacccgcatcatgtttggaagacaaagtggactgggtagttccagcaacagcagcaacctggtggagttccgcgcaggtcgcatgaacatggtgggcaagatggtgcatccggatccgcgcaagggcctggtctacatgacccagagtgacgatggcctgatgcacttctgctggaaggatcgcacctccggcaaggtggaggacgatctcatcgtcttccccgatgacttcgagtacaagcgcgtcgatcagtgcaagacgggccgtgtctatgtgcttaagttcaagtcatcgacacgccgcatgttcttctggatgcaggagcccaagacggacaaggacgacgagcagtgccgccgcatcaacgagctgctgaacaaccctccatccgcccaccagcgcggcggcggcggcagcaacgacggcgacctccagtaca

SEQ ID NO: 14582 - DNA, 1512 bp, DROSOPHILA
attcggactggtcactctgtcggagatttcttgtttaaacaatttctgctggttttcattaaacaacgaaaggtctttgggactggatcatcaagagcgacttgttaaatacaatcggttgacttgcacattagtgttgtttcagccaattaaaaagagtgcaacaacagtgataaatcagtgaatttactgcattccttgcgacgcaattccgagtgattccagaacaaatcacaatgcgcacagctgttttgctgccacttttggccctgctggcggtggctcaggccgtttccttcgccgacgtggtcatggaggaatggcatacgttcaagctggagcaccgcaagaactatcaggatgaaaccgaggagcgtttccgcctcaagatcttcaatgagaacaagcacaagattgccaagcacaaccagcgattcgccgagggcaaggtgagcttcaaactggcggtcaataagtacgccgatttgctgcaccacgaattccgtcagctgatgaacggcttcaactacactctgcacaagcaactgcgtgccgccgatgaaagcttcaagggagtcaccttcatctcgccggctcatgtgacgctgcccaaatctgtggactggcgcaccaagggagctgtgaccgccgtcaaggatcagggacactgcggcagctgctgggccttctccagcacaggcgccctcgagggtcagcatttccgcaagtccggtgtcctcgtctcgctgtccgagcagaatctggtcgattgctccaccaagtacggcaacaatggatgcaacggcggtctcatggacaatgccttccgctatattaaggataatggaggcatcgataccgagaagtcctatccctacgaggccatcgatgactcgtgccactttaacaagggcacagtcggagccaccgatcgtggattcaccgatattccccagggtgatgagaagaagatggccgaggctgtggccaccgttggtcccgtttccgtcgccatcgatgcctcccacgagtcgttccagttctactcggagggcgtctacaacgagccgcagtgtgatgcccagaatctggatcacggtgtgctggtcgttggcttcggcaccgacgagtccggcgaggattactggctggtgaagaactcgtggggcaccacctggggcgacaagggcttcatcaagatgctgcgcaacaaggagaaccagtgcggcatcgctagcgcctccagctatcccctggtctagagcagaactgatgtagtttagccccagcattcatatgatatgatttagaaaagaaacagaaaagataccaacgcaagcatctcaaaaatgaactttaataatttagcccaacctcatatttaatgaactaattttgtaatgggtccattgtattcgcgtttctctgccatcatgtatgatataggtgaacaacaaatctgttgatgtttgtagaaaaataaataaaaattatataattttaaaaattgaa

SEQ ID NO: 14583 - protein, 341 aa, DROSOPHILA
MRTAVLLPLLALLAVAQAVSFADVVMEEWHTFKLEHRKNYQDETEERFRLKIFNENKHKIAKHNQRFAEGKVSFKLAVNKYADLLHHEFRQLMNGFNYTLHKQLRAADESFKGVTFISPAHVTLPKSVDWRTKGAVTAVKDQGHCGSCWAFSSTGALEGQHFRKSGVLVSLSEQNLVDCSTKYGNNGCNGGLMDNAFRYIKDNGGIDTEKSYPYEAIDDSCHFNKGTVGATDRGFTDIPQGDEKKMAEAVATVGPVSVAIDASHESFQFYSEGVYNEPQCDAQNLDHGVLVVGFGTDESGEDYWLVKNSWGTTWGDKGFIKMLRNKENQCGIASASSYPLV

SEQ ID NO: 14584 - DNA, 4671 bp, DROSOPHILA
tctaacaaactactcgttttgttgttttgttttataactattactagatgttacactaaatatatatatatatatatatatgggtacgctttatataatttgagaggctacaatactttagggtatatgtgtgctatgttttagttttgattactaaatgctcctcttctttagtgactattcgtacctagagtcggttgagaaattcaacgatttggcaaacagtttacaactaccgcatttgaattaaaatgtttgtcggttgtctttcgtagttggccatcacttactctatgtattttggcctattgccccatgtgaactcgtatcttacagctgtcgtatcgtacacaaacagtttttcaccgtaatgctagagttatgtgtttaaaactataagtttgctaagccacaagtataattaaacgctacattcttcctgtttagtgtataaaatgcatggcacccatagggaacaaagttcgttgagcaagttaccttagaacacaacactacagtaacttagtgactatgactacagctacactttgatccaatattcttttcatttcgattccagttttccacatttcgtttcgtttttcgttcgcgtcgttcatacattttgtaaataaaaggcaactcatgaacattttttgtttttaacaacaaggggccatgagcctcacgctgatttccccccatctcactttaacaaactttgcaggtggttcagttcttaggtgttacttgtttgttggattagttatctttggaaacaaatagtgatttgtcactggaaacagggtgaagttaggtaaaactggcaaaacttttaaaaactcaacggatacattgaacgcttttcgtttccgtttttgcggaatggaatttcaaaatgtttacccttaaagctttttctgttagtttcagaaatactaaattcatgttttacttccgttaaatatctttgtaatatagcgtatgaagggaacgtgccttaaatccacaaagggcctatggtttcaactatgatgtctagcacatcctgacgtcccatctccttaagcgtcagcaggagtgccattatcgtatgtgaaactgagttggaactactaccaggactgctattcgctcggcactcccacagattcaggatctgttcggtgggcgaggctttggtggcaaagtacgcaatatatcggtcggtattcagcttcttggccagtaatcgccaatcccgctcgtccgcccgtggaggatccaaggcgccgcagatcaaacgcttcgtggcgtgcggcagctggacgaagtccatcacacagctttcgtttacatagttgccctggcggtcaattgagatggtggtgtttgtggtggatgccagttcctctgccgacccgctcatagagtgcgctggaatgttaaaggtgtagtagtcgtcctcgctgccctggccaaagtccacgcacaggctgttctgatcctgcctcctcaagctaaactcgcagtgcagaatggagttgttgctgaggatgtgctggtagggtatggcatgttcgtagggagctgctgcctcgacatccgcgcttctcacccggatgtttagatttcggctattcagggtaaacgcaaagacctggctctcgccaagaaaactgccacccagcttggcctccacattggcgcagatatccctgctattggggaagtccttgaccacgtaaatccgcaaactgcaatttgcgttgctgggtggtgtatgttgactgaaggccagcagcttcatcttgatcgagggttgttgaatcctcggctccgccaccacggtgaagtgacccagttgctcagtcataatgaacacatgcgtcgcctccagctgtacgaacatgggtgtgttgatggtttcctcgccgacagaaactgcccgcctccagttgacactcagctcgtcgtgttcgctgtccgcgtgatagatgtgaacatgccactgctccggagccaccaggcagtggggaatcttcaggatcactggtttcacgaagctgtagttccgcggggcactatgaaccacactgctgcacagaatggagctctcggtggcgcaggacacgcgactgcactcgtcgctcagcagcagcagggatacgtgcttcttgacgtgctttccaatggcgtgctccgggacaaagagcagcagctcgccgccatagaggcggagctgtcctcctgcgcttcccagcatctcatatgtgctgctctttgaggcattgagtatggacagcttgccgttcatatcgaaggttgagttcgctgttggatgacaggaatatttaaaccgattcaaatcaagttaaacttggtttcttacatgtatcagctgtggaggattccccggtctctgacaaatagtccacgcttagatgatctattggattagtgtagctgaaagtaaaaccaacccacaatgatcagaatcgtttattattggaaaatgggctttaaaaatatgaacttaaagttgagggtgttggaatgtaagagaatgttaagagtttatatctacacattgttaaaacactggaagggaagttatggaggaagtaattctctgtgagcaccacattttcgtgccaagaataataaaaagcgcataactattctcgttcttcggcgaattttaatgtcgtatgagtcatattaaaatgtaaactcctgtcatgaacaagtcttagaatttatgaaaccagacgcactccaaatatataatgtatagagtccataacatgaagtaatatagcatatgagcgctcatcagataattaataaaattgaatatgttcactttaatgtcaaagtgatattaaatgcaaagattcatattcatatatattttaattaaatagtgaacccaaaagatgaaagggcaatggaaaagtatttacgaaatttagtcgaactcattggaatttaatattttttttttgtatcttcgaaatatacgtactaaggactcaggaactccaatggcatcaaatggcattaaagataatccctcgatattaaaatgtttcatggcttattggcaagctgtaaagtttatggctatagtatttataccatattgcaaccaaatcaagactcaagagtacccaaaggataaagggacatataaaagggcgaactaataacattgatggcttatttgtacacttacttggcggacagattgggcacgtcgtaatggtgctcggtgacgcctccacaaccgatgcccatgcccatgatgtgctcgccgggcaaataacgatgtccgggattgacgtaatcgtatcccatgttgctggcctcgatgtgcatgcgcatctccttcttctccacaacgccgggcatataatccgcgtccattactgcaaacggagtcgaaataaacacggtcaattgctggcgaccaacgcaacgttgtacggacgcaggacgaccgacgcaggacactggagtcctttgaactcacctgaacgggccatgttgtaatggggattggtgcggatgccacggcgagcgcagcagatcagtgcggtcccgaaggcgaagcacaccgccgttatgaaggccaatcccagatagagggtccaatcgaaatctgcaatggtgaagcgatgcgcactcatattaaactgctgaatcggctgattgtaccccgtaattttacttaagggaaagtttattggcacctaggtcgttagctttttttatagtctcacagaaaacttttgtaatgaagtaatgaaatggcggaattacattttcaaaatctttaaaaacttcataaataattgaaaatatatatggatcttttattctaaagagcggaaagtacagagtatttccgaattcaatctccaaagtggagtcttaaaatcagttcaccttctagggaactgaactggcaatatagccagcctgcgaaccaagatgccaccaccccatccccttccaattgccaatctttgtgtgcttgggcattaaaaaaaaaggaaaccaagagatttctgcgtaaatccgccaccctcatgcttttcaggatgcctgccaagcaaaatccacacattcatggacgttgagtcaacccgaaaccgaaaccaaaccgaactgaaccgaactgagctgaactgaacttttccataaccaaacaggcatcctctcacccattgtcatcaatcccgagcagccatgcgtatccgtatctggcggagcggagcagtgtatgtctgtatttaatgttttatgtttgtatgctcatccccagtccagcttcgtctatttcgcattataattcgccggcggccccccgtcgccagcagtcagttgcccgacatcccagattccgcaacccaaaccccatctatggtgcccatctccatctccatgcccagctccattcccatatccacacccactgccacccatccattggacgcccattgttgcgctgcctgtttccgttgctgtgattgttgtcgtcattgttgccggcgctggcggtgactggttgttggccaaaaaggaatcgctgcagcgcaaggaattactctgtatatattatgattattatgccgtatatagtacagtcagtggtgtgctagcagggctagaagtgggtgggcggac

SEQ ID NO: 14585 - DNA, 1737 bp, DROSOPHILA
atgagtgcgcatcgcttcaccattgcagatttcgattggaccctctatctgggattggccttcataacggcggtgtgcttcgccttcgggaccgcactgatctgctgcgctcgccgtggcatccgcaccaatccccattacaacatggcccgttcagtaatggacgcggattatatgcccggcgttgtggagaagaaggagatgcgcatgcacatcgaggccagcaacatgggatacgattacgtcaatcccggacatcgttatttgcccggcgagcacatcatgggcatgggcatcggttgtggaggcgtcaccgagcaccattacgacgtgcccaatctgtccgccaactacactaatccaatagatcatctaagcgtggactatttgtcagagaccggggaatcctccacagctgatacatcgaactcaaccttcgatatgaacggcaagctgtccatactcaatgcctcaaagagcagcacatatgagatgctgggaagcgcaggaggacagctccgcctctatggcggcgagctgctgctctttgtcccggagcacgccattggaaagcacgtcaagaagcacgtatccctgctgctgctgagcgacgagtgcagtcgcgtgtcctgcgccaccgagagctccattctgtgcagcagtgtggttcatagtgccccgcggaactacagcttcgtgaaaccagtgatcctgaagattccccactgcctggtggctccggagcagtggcatgttcacatctatcacgcggacagcgaacacgacgagctgagtgtcaactggaggcgggcagtttctgtcggcgaggaaaccatcaacacacccatgttcgtacagctggaggcgacgcatgtgttcattatgactgagcaactgggtcacttcaccgtggtggcggagccgaggattcaacaaccctcgatcaagatgaagctgctggccttcagtcaacatacaccacccagcaacgcaaattgcagtttgcggatttacgtggtcaaggacttccccaatagcagggatatctgcgccaatgtggaggccaagctgggtggcagttttcttggcgagagccaggtctttgcgtttaccctgaatagccgaaatctaaacatccgggtgagaagcgcggatgtcgaggcagcagctccctacgaacatgccataccctaccagcacatcctcagcaacaactccattctgcactgcgagtttagcttgaggaggcaggatcagaacagcctgtgcgtggactttggccagggcagcgaggacgactactacacctttaacattccagcgcactctatgagcgggtcggcagaggaactggcatccaccacaaacaccaccatctcaattgaccgccagggcaactatgtaaacgaaagctgtgtgatggacttcgtccagctgccgcacgccacgaagcgtttgatctgcggcgccttggatcctccacgggcggacgagcgggattggcgattactggccaagaagctgaataccgaccgatatattgcgtactttgccaccaaagcctcgcccaccgaacagatcctgaatctgtgggagtgccgagcgaatagcagtcctggtagtagttccaactcagtttcacatacgataatggcactcctgctgacgcttaaggagatgggacgtcaggatgtgctagacatcatagttgaaaccataggccctttgtggatttaa

SEQ ID NO: 14586 - protein, 578 aa, DROSOPHILA
MSAHRFTIADFDWTLYLGLAFITAVCFAFGTALICCARRGIRTNPHYNMARSVMDADYMPGVVEKKEMRMHIEASNMGYDYVNPGHRYLPGEHIMGMGIGCGGVTEHHYDVPNLSANYTNPIDHLSVDYLSETGESSTADTSNSTFDMNGKLSILNASKSSTYEMLGSAGGQLRLYGGELLLFVPEHAIGKHVKKHVSLLLLSDECSRVSCATESSILCSSVVHSAPRNYSFVKPVILKIPHCLVAPEQWHVHIYHADSEHDELSVNWRRAVSVGEETINTPMFVQLEATHVFIMTEQLGHFTVVAEPRIQQPSIKMKLLAFSQHTPPSNANCSLRIYVVKDFPNSRDICANVEAKLGGSFLGESQVFAFTLNSRNLNIRVRSADVEAAAPYEHAIPYQHILSNNSILHCEFSLRRQDQNSLCVDFGQGSEDDYYTFNIPAHSMSGSAEELASTTNTTISIDRQGNYVNESCVMDFVQLPHATKRLICGALDPPRADERDWRLLAKKLNTDRYIAYFATKASPTEQILNLWECRANSSPGSSSNSVSHTIMALLLTLKEMGRQDVLDIIVETIGPLWI

SEQ ID NO: 14587 - DNA, 4561 bp, DROSOPHILA
aaagtcaacaaatgggaattaaactgattaagtttcgtgtgcattactgctaatagcgattttatctgattacgatttgtgccaaaaccgtaaccaaactgtataaatatacaatttaacacttaatttgcaggtcttgttcagtttattttggctatttatatttgtttgggctgttttgctatatttaccttaatagttttaatctctagtaacaaaacatggtataagtgataagcgcagctttattgttttcaatttaagagaaatagcagaaggtttccatgaaaagcgaagagaaatagccgaaggtttctatgaaaactattgtatttggccatgttctcgatttcacttccgcacaattgtagcagcctgcacattcgaaccaactaatttaccaggttatcaaatgacttaatcgctgaagaatttgtttatttattcggtatatttgaaggtgtcacaatacgtagacatgcaactttatagcgcacccaaaaaccgctgccagcccgaaagttcaaatatttacttagctccacaagtctcatttccatgatctcagctgggtgtcagctttggatctcggaactcagatctcagatctccgatctcgaattccgaatctcggatcttgaaccgcagccacattttggcgccgagcacttacaacaccgcgtcagatggcccaaagtcattaagttgtggaaggggttaaatgtgtgatgctggggagcttggccaaaatgtttgtcgtagccgattgcgtcggcccaaagcgctccatgttcactgctcgccgctcggcaacttttcagccagccagccagccagccagccacatacaccagccagccagctggctcgaaaaaaaatcaacagacagacgaaaaacagtttgccaactgagagcgcacgttgaacacgtctctcgctagccgctttttattttggcccacaacgatccgagcacctgtgcgagttttctagcccgaaaatgaggaaatcagcgggaggatttcattccacatccaatgaagatgggcagcatggcgatggctcctccgtgcgactactgagaattcccagagccgcacctgcgatggagaactacggatttcagctgacccgcagcaaatgggatccctatccctgggtaataaaagtggccatcgtttggagatcccgtcccctcctaattaccatatacccattacaccgacaggtttgcgaagtggcagccggcacacctgccgctctctgcggcctgaaacccggcgattgcgttctggaggtgagtagaagttagtgccacaggttggtgccaccgttgtcagttctttcagctctcagccagcaatggactggcggattatgcacagcgcagaccaactgcattggtaactaaactgcattggtaactcaatctgcgcctgaactccagttacaaaattaagaatgcaatagatcgacgcggggatttactttgtaaacctattaagagcttattgagactgctactcaggttcccaactatgtgcattccacttaggatagaagaaaacagagtttgaggaacccattaaaattataatatatttataatcagaaaaaagttccttttgttagctaacagctagaaaaataatgtagtttttgttgtaaagctaattatgtatacttgcgagttttcaagtcaataagttctacaaatttgtgtgaatcgtaagttaagataaaaagtactattcaggaaagcattccaatatgatgatttgcacttctagaaacaaattcaaatcgctatggtcttttaaattacgaatagcttgagctatggaagttggaccgtacatatatccaagtctggactttgcagccgctattgtagccgcatttgttgttcttcgtggatattgtttacttaaaatagcaatgcagtaaaacttaattgctcggcatcgactttatttagaaactttattggatgtggagtggggaactagaaacagctggtgaatgcacagcccgccctaaaactaatgacacaactcgaacgtagtaaaacaactagttgatgacaaagattaattagcacgaagtaaatattcaaagcaaatatcagttatcagataacagataacagccaattgagttaacagtgctagctaaggttaacatccgcaagcagtgcgtgcgatacagccgcaagcagtgctttcgaatttgtaattgtgttggccatattttgtggtattcatttgttttctttggtagctcgtggaaatccaaatatttagatacttggtacttgctttctgtatggcacttatttcctaaaataaataaacaacatttccagacattttctataaaattctataatattttatttccaggtaaatggcaacgatgttttaggcttgagagtgtctgaaatcgccaaaatggtgaagagtcaaaaggactgcgtcacaattctctgttggaacagtgaatgtgataaggactgtgatactaatgtgagtattttcattgcagtcctgaaatccttctttaaaccatcaaacacactcagttatccgttccccattaaaatcgcgctaacacaatatttttttcaaaaatccatagagcatctgctgcgcccccatgcccaccagtttgcgccgcctgtccctcgtcctggagagcatcctgcgcctcgtcgagtgtcctgtctgcggggtgaccatctcaccgccggcgatgcagtgccaaaacggacacctgctctgcgtggactgtcgcatccgctcggagcgatgtcctgtctgccgggacttctacactccccgccgagcgctgttggcggagcaaattttcctgaccattgccaacgccttcgagatgtgccgctcggagaacaagctgcggcagaagctctttgccgggataacacggccagtcgtgggccgacaggacaggataaccggacaggacacctggcgaaagcgcaggccagtgctgccaacgaacaagttcctaaccaagttgcttgagggctgcgcctactcgacggataacctcagtccctcgaatgccgctactctgctgcggactaataccacggacgtcgctggcgactccagtgaaatcccggccagaacatcgccagtgacagccacgccccccgaaaggacaacaatgcatgccacgcttgacgcgaatgcggcgcatccttcactctcgacgaatgatttacagcaggaaggagttaagccgaatgccgagggcgttgacgaggaatccggaacgaacagcagccacatctctgccacatccttgcatggccctccgctaccagcctccgttagcccgggcatcaatgaatcttccggattgcaacccgttcgcatacctcctgtcactccaagccaagatttgccccagcaggttgtccaaactaagccggcctcgctgttgtaccgctgtccctgcaagctgcaggatccacaggatcctgcaaaggacctccaccagaactgctgctacaaatccgctttccgtctgctttgagctcgggcatctcaatcaacagcatcctcttatcaggcgcgtccccaattcgccccccgcccctcttgctgttttcctttctaattaaattaaatgccagttgcttggccaaagttgcttatcgcgcaaagaaacgaacccggccaaaggaattgtatgggtgtcaggccgggacaaaggcccacgctggagatgcaaagaagttggtccagctaactgcagcgaagagttcaacttggccaagttgagttctaattgaatcactcctgaacgctccaatgactttgtgtcatttggcgtccgagttggtcagctcgataatgaagtccggatggactgcattcagggagcgtcgcaagaggaataaaaatattttaagtcaattggactttgtgcaaatgatcaatagaatatgcaacattatttgagtacttgttcattctaaaatccttttcccactgcatactcaagggcacaaagtacaaacatttctcgcagtgcagtgcaacttatgactgctgacggcgacgccacgcgcagatgcaggtcaatcagtggcaaagtgaaggatgccggacaagcgcgtaatgagctttatttgtcatcgggagcaggcatggaacctgtccagtccctggtttcttggtcctggtggttcctgatggccccataatgacagccgcagttggacagccattatgccggccgtttaccatttaatattgatgccggacgaaccgcatcaatggaggagcgagcaacgccagcaacaggcttcagttactccaaaccgcattcttcctatcgctgcagaatggcctcccgctgcttcttcgccggagcgaggctgccatgaaaatgtcatcaaaacaggaagtggcagtttaatttaagcgcgttaattgaattttattttctgctttgttgatgtgccgaacaaaagccagggcgccgaccaagtccaagccggagaccatagacggtagtccagatccgcgtc

SEQ ID NO: 14588 - DNA, 1275 bp, DROSOPHILA
atgaggaaatcagcgggaggatttcattccacatccaatgaagatgggcagcatggcgatggctcctccgtgcgactactgagaattcccagagccgcacctgcgatggagaactacggatttcagctgacccgcagcaaatgggatccctatccctgggtttgcgaagtggcagccggcacacctgccgctctctgcggcctgaaacccggcgattgcgttctggaggtaaatggcaacgatgttttaggcttgagagtgtctgaaatcgccaaaatggtgaagagtcaaaaggactgcgtcacaattctctgttggaacagtgaatgtgataaggactgtgatactaatagcatctgctgcgcccccatgcccaccagtttgcgccgcctgtccctcgtcctggagagcatcctgcgcctcgtcgagtgtcctgtctgcggggtgaccatctcaccgccggcgatgcagtgccaaaacggacacctgctctgcgtggactgtcgcatccgctcggagcgatgtcctgtctgccgggacttctacactccccgccgagcgctgttggcggagcaaattttcctgaccattgccaacgccttcgagatgtgccgctcggagaacaagctgcggcagaagctctttgccgggataacacggccagtcgtgggccgacaggacaggataaccggacaggacacctggcgaaagcgcaggccagtgctgccaacgaacaagttcctaaccaagttgcttgagggctgcgcctactcgacggataacctcagtccctcgaatgccgctactctgctgcggactaataccacggacgtcgctggcgactccagtgaaatcccggccagaacatcgccagtgacagccacgccccccgaaaggacaacaatgcatgccacgcttgacgcgaatgcggcgcatccttcactctcgacgaatgatttacagcaggaaggagttaagccgaatgccgagggcgttgacgaggaatccggaacgaacagcagccacatctctgccacatccttgcatggccctccgctaccagcctccgttagcccgggcatcaatgaatcttccggattgcaacccgttcgcatacctcctgtcactccaagccaagatttgccccagcaggttgtccaaactaagccggcctcgctgttgtaccgctgtccctgcaagctgcaggatccacaggatcctgcaaaggacctccaccagaactgctgctacaaatccgctttccgtctgctttga

SEQ ID NO: 14589 - protein, 424 aa, DROSOPHILA
MRKSAGGFHSTSNEDGQHGDGSSVRLLRIPRAAPAMENYGFQLTRSKWDPYPWVCEVAAGTPAALCGLKPGDCVLEVNGNDVLGLRVSEIAKMVKSQKDCVTILCWNSECDKDCDTNSICCAPMPTSLRRLSLVLESILRLVECPVCGVTISPPAMQCQNGHLLCVDCRIRSERCPVCRDFYTPRRALLAEQIFLTIANAFEMCRSENKLRQKLFAGITRPVVGRQDRITGQDTWRKRRPVLPTNKFLTKLLEGCAYSTDNLSPSNAATLLRTNTTDVAGDSSEIPARTSPVTATPPERTTMHATLDANAAHPSLSTNDLQQEGVKPNAEGVDEESGTNSSHISATSLHGPPLPASVSPGINESSGLQPVRIPPVTPSQDLPQQVVQTKPASLLYRCPCKLQDPQDPAKDLHQNCCYKSAFRLL

SEQ ID NO: 14590 - DNA, 4662 bp, DROSOPHILA
gcctgctgctgtccaatggttgtggacagtagcttgcccttgtaaagctgttttatcatctggtggacttgtgttcgctgctccttatccagagtggtcacatcaatctccaccttttgctcgatcgcgggatcgtttttggccttagccagattggctatatcctgccaaacttccgggccgattactgcctccagttctttccgccagttgtccagttcgttttcggccacagctgttatagtatgagatgcatgagcataagcaagtatgcaggataattggtgaatacagacccacaatagccactttaggcacactgagatcgttcagttccagaacctttccattgctatcaatctcgttcacgtgaaaatcagagaagcgagacttaagtattcccgtgaagccaggtgcctccgggttagtgaactccgtaatgcccacttgggtctccagcagcgtggatttctgttgtggagcacttttgtccaacgaaaaacgccggttaacaacgatattatttatgggatttaatttgtacctgttgcgctgaccgccaccattgttttgggggcgatccttcttctgaccacgccagttgctcttgttgtatggcccggaatggttattcctacgtcctctgccccgatccttgcccatcttggttcaaaattcgcgtttgaaaatttgtcggcaaatgaaatccacgttttgcacaacatatgatgtgcccattcacaataagctttttaggtttattagggtggccgcatgtgccatttattcgggaaatagatttcttaaatggttgttagcataagttcatccgcaaatattcctctttttttatattgtatgataaatataatttaaaaacatgcttaatattaacatatcataaaacttttgttagtatattttcctcatttatacttcagtattttttggtatttttctggtcccagatcaagttcacactgcgtacgtaatgtaaagaaaatgtgcaatacaaagaagcattggaaagaagtgtaaaaattgagaaataaccaaaaattggaacggattaattcattaggttaagccaaggaagcaacgaaatgttgccgcatataagtgccgacgaggcacagccgtctatgtcgcgaaaggtgtacatcaatccgaattttcagctgcaaggtcaaacggcgcatcagctgccgttccaagtgcccttccaggcgttccaggcgccactgcagcctcagcccgcgatccatatcaatccgcactttctgaatcgccagcgggccatgtacgaccaataccagcgggagcagcaggagcagcttatgatgcaacaagtttccgcctcgcactatcgactggatccaacgatacacctactggcgactccacctcctccgcccgccaagatcatcagcaaagtgagcacgtgtctcgtgcgcaagccatcagtggtggcaagtggtccggcggtgaagctcgctgcttcagtacctgtgcccactgtttccagcctggtgcagcctccattggtaagcatttccaagcggaaaattgtgaggcaaggagcattgaaagcagcgccagcggttgctgccctccatcctcctccacctgctaaacgcactaggtacaaattagtgcgttccatatcacttacctgcacaccgctggtcaaaaagcgtcgtcctctacgcgagtttgtgggccagtacgccctgagacgcaccaatgaagcgcagcccaacagaaaactgaggtaatgaaaatcggatacgagcagttgaaaatagtcaagcaacaggcgactctgttagacaaggtaatgtacatcaactaacttaacttttattacagctccaagccgcaggcgctgaagctgggcgttaacaaatccctgagcatggtcagcatacacggtgtgatgtacaagaagatatcgaagaacaaaataaccaagctggatgccagttcctccgctagggtagccaaatcggagagtcccaggaccttgcagcgtaccttgtccggcagaacgctcttcgtcagcggcaataagttcattttagatccttccggctgccgcctgaccagagtttcaacctcatcaactggtgctacccagagtagcgtaaatcgtagcatcctgaggcgcatcgatatcggcggccttacctacgttgcttcgccaaaggcactgaatgtctttgtacgcaccagtaatcacgtgtcgcgagcccatttaatcaccgccaaacagagaagcctgacgttgctcaacaaatcgttggtgaagaccaatgtgccttgtgccatcttccagaagctgggcaagtgcgttgcccatagtcgtggcaagtgccgcaagctgcacgacaagcggcaggttgccatctgtgtcaggtttgtccttggccaagcgaagagtgctaaaccttcgatggcgtccaatgttcgaaattcgcaatgcggttatctttttgaaatcatttacttgcagctttctgcgcggggagtgcaccaaacccaaatgcctgctgtcccataatgtcacgctggagaagatgcccgtctgtcggtactatttgcgcggcgtttgcgttcgcgaggattgcccgtacctacacaagaagctgagcagcaagaccgagatttgtattgactttgtgcgcggctactgtccgttggctgccgaggtaaataggtctgccacttattttcattgaaaacctattaactccaaaacattttaagtgcaacaaacgtcacgagttttcctgtcccgagttggagcgcaagggcaagtgcgaattacccaggtgcgtgttctgtaagaagtcgccatcaaagcgattggccaaagtcaagtcgcgtcccaaactgggcagtaaacctgtcgccttcacggataccgcgaaagaatcgtctacagcggatgagttgcccaccagttcacgctactttgggtcccacaaggaaccagcggaagcaatattgactagagatgatgtggaacagaagaaacctgaagcggaggatgaggatcagaaggaagcgggtgccccttgccctcgacgacgtcctcaactgggaactctaccctcttttattcccttaggtggcgaagaaaagctataaggctatgcgaaggctatggacccaacgtttcaggtacaaattaattcggttaagtattgttttaacgtttagtctaagatttatctttagtagcttattttcaagttttaataaaatattcaaaaagacaaatttatttgcgtaaaataaataaaagatacattttattggttgggtatatatttgctacgctcgaggaaaatgtaaacatttgcattagtcgttttatgttgtttatgtatataaattattaaactaagattattaccaaaataaatcacagttttttcgcggtgtattcaaccatctggcaacatgccgatcgtgcagtgtgaccaggtggcaccacttgttgttggattttgtggcgccacatagttgtgtacctgtttttaagccgctctctcgattcgagtctcgattttctcgccacagttgaattttgcatgcggctcgtacaacacctgaacaacaaacgcggattccgtttcgagcaacaacaaaaacagtgagtgtgtgttagtgctcgtgcgtgtgtagcggtggctcttgcaaatttattgctcaccaggccaaaaagaaaagcgaaaaggctgtgaagttaccaaaaataaaatgcggaccacaaacatgggagatttgcggcaaatggcctttgaactcgtccactggctttgacatctgttcgcgatcgggaattttcgaaactctctttcacacaacgtctctcattcgcttcgtcttggtccagaaaaccaggccaaaaccattttccaaccgaatttttgttcaattgtgcacttgtggctgttggtacattttttccgatacgttctcgctttggtgcattcctaactaaatgctactaataacaagaggagaaaaaagagaaaaaaggaaggcaatccgaagattggccaaagaggtgaaaaaagttgcttgacttgtttgacccgcgtttgtgttccagtgtgtgtggctgtgttgtgtgtgtgtgtgtgtgtgagtgcgacttctccttctgctttttcctcttcttcggattcttgttgttggcccagccgtattctacataaattactgaccaaaatgacaccaaagagccataaaaatgtattaataatttatgcaacctccgcttagctgcataaatatgtaaaattacataatgtgcagccaaaagttgcgataaataagcaaataacggttgcatatattcgccattaatcattttgagtgtaacaatttttcgaaaaccgttcgttactcattaatattgacctattaccagcttaattgtaggaaaatcgccatcaagtttgctctaatttcgtataattactattttatgagccacattttcacccattacattaattcaaaataattctgcggcagcctgtgataaaacaaagcgagaaacaataaaaaaaggggaaaagagagtggagaacaaagcatagatttccagtctccagccacattccatggtgagcatgaatccccataaat

SEQ ID NO: 14591 - DNA, 1810 bp, DROSOPHILA
aaatgtgcaatacaaagaagcattggaaagaagtgtaaaaattgagaaataaccaaaaattggaacggattaattcattaggttaagccaaggaagcaacgaaatgttgccgcatataagtgccgacgaggcacagccgtctatgtcgcgaaaggtgtacatcaatccgaattttcagctgcaaggtcaaacggcgcatcagctgccgttccaagtgcccttccaggcgttccaggcgccactgcagcctcagcccgcgatccatatcaatccgcactttctgaatcgccagcgggccatgtacgaccaataccagcgggagcagcaggagcagcttatgatgcaacaagtttccgcctcgcactatcgactggatccaacgatacacctactggcgactccacctcctccgcccgccaagatcatcagcaaagtgagcacgtgtctcgtgcgcaagccatcagtggtggcaagtggtccggcggtgaagctcgctgcttcagtacctgtgcccactgtttccagcctggtgcagcctccattggtaagcatttccaagcggaaaattgtgaggcaaggagcattgaaagcagcgccagcggttgctgccctccatcctcctccacctgctaaacgcactaggtacaaattagtgcgttccatatcacttacctgcacaccgctggtcaaaaagcgtcgtcctctacgcgagtttgtgggccagtacgccctgagacgcaccaatgaagcgcagcccaacagaaaactgagctccaagccgcaggcgctgaagctgggcgttaacaaatccctgagcatggtcagcatacacggtgtgatgtacaagaagatatcgaagaacaaaataaccaagctggatgccagttcctccgctagggtagccaaatcggagagtcccaggaccttgcagcgtaccttgtccggcagaacgctcttcgtcagcggcaataagttcattttagatccttccggctgccgcctgaccagagtttcaacctcatcaactggtgctacccagagtagcgtaaatcgtagcatcctgaggcgcatcgatatcggcggccttacctacgttgcttcgccaaaggcactgaatgtctttagaagcctgacgttgctcaacaaatcgttggtgaagaccaatgtgccttgtgccatcttccagaagctgggcaagtgcgttgcccatagtcgtggcaagtgccgcaagctgcacgacaagcggcaggttgccatctgtgtcagctttctgcgcggggagtgcaccaaacccaaatgcctgctgtcccataatgtcacgctggagaagatgcccgtctgtcggtactatttgcgcggcgtttgcgttcgcgaggattgcccgtacctacacaagaagctgagcagcaagaccgagatttgtattgactttgtgcgcggctactgtccgttggctgccgagttggagcgcaagggcaagtgcgaattacccaggtgcgtgttctgtaagaagtcgccatcaaagcgattggccaaagtcaagtcgcgtcccaaactgggcagtaaacctgtcgccttcacggataccgcgaaagaatcgtctacagcggatgagttgcccaccagttcacgctactttgggtcccacaaggaaccagcggaagcaatattgactagagatgatgtggaacagaagaaacctgaagcggaggatgaggatcagaaggaagcggttgaattttgcatgcggctcgtacaacacctgaacaacaaacgcggattccgtttcgagcaacaacaaaaacagtga

SEQ ID NO: 14592 - protein, 568 aa, DROSOPHILA
MLPHISADEAQPSMSRKVYINPNFQLQGQTAHQLPFQVPFQAFQAPLQPQPAIHINPHFLNRQRAMYDQYQREQQEQLMMQQVSASHYRLDPTIHLLATPPPPPAKIISKVSTCLVRKPSVVASGPAVKLAASVPVPTVSSLVQPPLVSISKRKIVRQGALKAAPAVAALHPPPPAKRTRYKLVRSISLTCTPLVKKRRPLREFVGQYALRRTNEAQPNRKLSSKPQALKLGVNKSLSMVSIHGVMYKKISKNKITKLDASSSARVAKSESPRTLQRTLSGRTLFVSGNKFILDPSGCRLTRVSTSSTGATQSSVNRSILRRIDIGGLTYVASPKALNVFRSLTLLNKSLVKTNVPCAIFQKLGKCVAHSRGKCRKLHDKRQVAICVSFLRGECTKPKCLLSHNVTLEKMPVCRYYLRGVCVREDCPYLHKKLSSKTEICIDFVRGYCPLAAELERKGKCELPRCVFCKKSPSKRLAKVKSRPKLGSKPVAFTDTAKESSTADELPTSSRYFGSHKEPAEAILTRDDVEQKKPEAEDEDQKEAVEFCMRLVQHLNNKRGFRFEQQQKQ

SEQ ID NO: 14593 - DNA, 5379 bp, DROSOPHILA
ccatactccaaaacgttgagtttgaacttccgataattttgcatgcaggctggatctcgttgcagttgtagttcgtggtggtggtggatttgatggttgtatatatatacaggtatacaatagagagacagaacattagtataatccttttcaataatttaaataagacaacaatcattaagcctaagcttaaaactagtttaaaaatgaagtgatcatacggtgtataaatgagtaaaataacgacaaaaaaacaaaaatgctttctctgcccaaagcctacgggcttttcgggttccgtgatcgcttctgattttgtttatctgcatgtgttagttttgataaagttcatatttagtaaggttgttattcaagagggtcgcaaccctatttggaattgattcacttaattcttgacctgaataatatattcattgaaaggtcacgcacttaaggtttcaggttgctgttgaattcagacgagttttgatttgcggatcttgctcgattttggtggtatacaaaaaaagtatacaaagatggttgagtttttaaagaggtaatgaagaccaacgctgtcacaaattttcagcacaccgcgccaaatgataaggtccaatgttaaaattatttcagacggcatacatttttccacctttgttaatcctggaaaaaggtattcgtcgctgaatccatgttgaatttaatccatatgaatccttccatgtaatgtcatttccagagtatggcatcatcgataataatgtacgccttctaaaatccaaggctactccagagcaaatcttcaacattgttttcaatgtttcctgtgatgcattctatatcatttttcgttgaattattttccatctaaaaactttaaaccctacgaagaacagttggtcctaaataagcgaagacttcagcctaagaatgggagtaattcaagtcctaactttgtaacgaaagggaatcgcgatctagagaaatatatacacaaatttttaaacagggccaagagagttgcatccgcagtccgaaaaaggacactaacatccgaaaagctcggaaatcaggtacaaaatcgaatagggcttcatgccagctagtctgctctatatgaagtgtgattcaaatagcaatagcagctgcatttttgcaatcaacttgcgcaccatcggcggcatatggcaaactgaaagtgtcgagccattccttgcacttttctgagctatcgaaagccagaattttggtaatatagtcaacgctaatgttaggacgataactgaaaagaaacaaatgattattattactaataattaaaatttagtggatataatatacttacgacttaataatgactcgcaatgcagctttgcgctctctctccaggaaccattcaatcatgtggccggacataagaggcgccgtcctgtacagggaaaacaatttgcagtagttgcccagcgaccacgcagatcggaactgaagagcgtgcgcaatgacaggattttcacgttgatcagccgtaatcgaacgcatgacagtggtgatgtctggaaaccataagctgtgttaattttaatcgaaaatatatgaaacaaagtcaaccatacccagagtattctttgtgaaaatgtagtagagtatgcgataggcggtgaactcgagggcattggcgtttttaccaccgatctccatgtacagcatcttaagttgcgtctggcactgattgaactcctcgtggtcacccttctccatggcaatgcgtgcgtgtgtctcgtacacctcaaccgtaaactgatcacgaataccctggacctgtgagtacatttgtgttaacactatttcatatctttactcggcgcatacttacagtcaaatcctgccttatggacttaagctgatcacacgcgtagtgataatcctgattggcacgccattttcctttcacattaacaagcgaatgggtgagcacctcgacaggtcgcacctctgacggagacggcgcctttgtaagacgcaaaaatgacttttctagatccctacaagttcctacaatgtgtaaatcgagaagatctataccgctagccgcctctgtgtcttcgtagaaagctgaccgttggtgctgctggtgttgctgcaccattttcttcttgttcttggccgtggtgagaccaaacggtgagcttgcaatggcgacgaccgattttttggccgagctggagccctgctgtgagaatcgtgccgcacgctgttgcaagcgcgctgtgtcatcatcaacggcaccgccaacagacgactgattggagtaaaagtgaggtgtgtccttttttttcatctgtgctgaggccatagcagctgcgcgcttgcccttcttcatcagcattttttgctgcttgcgggataaattcgcggtgagtggtatgaaattcagagattcgttcgagcccgatttgcgaataatcttacgcgccggtggactgctggcatcgctactgcgggaacacgatcgggagcggggggatcgcgaacgggaacgcgaacgagagcgcgaacgcgagtaccgcttcttgctcgagtactttaacgagtttgaagatgacggcgacctgcgaacgatataaacatcctggtttatgacacagtttcaattcgatcaatagagatcataaaactcaccgcgaccgactcctggagtacttggacgacgaagagtgatgagaaccgtagctggacgaggccttgttgaactgattgcccttctgcttgaactgattcactatacccgtggaacctttggcaggtgacttatccgcttcgcggtctctctctcgctccctctcctgttcttgcttcttctgaaagtagttgcttcgctgctgctgcggcggtggcacattgcttagcaccacatcaatgccgtctctctcgctgtacaccgtcggcatgggctcgttatcccaatcgcgtgtccacagctcgttgcgattggccgccgctataatcttgcctttcagacatatgtcgatctgatccttatccagatcagtgttgcactttgaatagcaacgagcaacatattggttgagggaattcggccaggagtcgcttgaagccatttgaaaactgtttggccgcttaaaatttgatgtttgggatgtagcctctcccgctctttgtgctgccatgtgctcctgctgctgctgcttctggtgttggggattctctgtgggtgccacaatggccaggggtaatggaggtggtggtttgctcaagtccggattaattggtacacctacatcgctggcgctaatgatgggcggcggtggagcttggggtgtggctggggtttgattggcaaacggattgctgtatgttgattgctcaaagttcttgtttttgttattccgcttgcgcttctttttgttgctgttgttgttattgtacaattgcatgacctgttgctgttgttgatgttgttgttgttgatgctgctgctgttgttgttgctgcaggggattaggagcaccggccaaacgcttttggtttaaattcaaattaaaacgtattcccccgaaatttttttgctgctgctgctgctgttgttgttgttgctgctgttgttgttgtaattgttgttgctgttgttgttgttgttgttgtttgttttggccaggtggctgacctatttgcggcggaggcggagggggcggccctgagggcagaggcggcggtgcagccaacgcattgctgaagcccggcggcgcatttgacgtactgaccgtcgaggttacctgctgttgctgctgctgctggtagcgtacgtagtactggtagtactgctgatactgctgctggtaagcagcattttggttggcataccaggcgtaattgctccactgctgggcgagctgggcgggattagcgctctgctgctgctgttgctgcatctcctgcagctgcggaataaggggcggcggagcactcatggcatctgacatggtactcccacaatctgcctctcttggttctttgctaatttcttttttacctgaacttacctttgggtttttgcgatttcggcccctgatttcatgacaaagggtaccaaaaatgggaaaaatgtgcgcattagtctgtgtgtatgggtgtgtgtgtgaatgttggcatgtgacgccatttttatttcttacctacttcttggtcaccgagaactggcactttttgcttcgatttgctcgtttgaaacgccgttttctccaaaataacttattaaaaaggtggcgcagtgcaaaaatatatctgcatacgcacgaaaacactcggaatacgctattttttgccttattttctcacgatatataaacacgtccgaacagttgaactattttttcgtataaagaaaaggagacagaataatcgatgactagatatgtcgcagtgctagtgtggccgtagcttgctgagccgaaaatccattcctataatttaaaagatgcgcgccataatagcggaggaattgtggaatatggaacatgtgaacgttttctatttatttatttcttcgttttttggacgtggatttaaaaaaataaaaaatctaagtatctatgtacgatttaaggatttacgatgtaattaaaaatggaattgtcgttaatttcaaatcgatttttaatattaagactgttgtagaacaataaaacattaaaatataaggtacaatacgctgcagtattcagattccattaattaaaaataagttttacttagtttacttacggaaaccaccaaaatcatgatcagataagttagaaaaacactttgtatacaaattatttatttatattaatcatgtatagtaaaatcatagtacatagtaaaccattcttttcaacagtgaaaaccccaggaaacgccaatcctatgggctccaccaatgggatctactccatcgaaggccaagtgatagccaacatcgatgttctccccaatctttgattggtagacgaaccccattctggagtcctcccgcagcttggccttcaccatggtgccattctggaagtcgtactgaaccccaatggcaaactgtttcacattttccgaactgtagagattcgtcttgatggcaaaggcccaggcttcgccgatcctttggaagatcgagcctcgaagatcctcgaaattctcgctacaagtaaaatataatgggatgttggctatattaaataagctattggacaacctacagttttagacccacttcggtcctcccattattgtagcccaggcacagggcgtgcttatcgaatcccttttcgtcaaagttgtactccgttcgatatcccagcacccaattctctacaggcgcca

SEQ ID NO: 14594 - DNA, 3024 bp, DROSOPHILA
ttcggacgtgtttatatatcgtgagaaaataaggcaaaaaatagcgtattccgagtgttttcgtgcgtatgcagatatatttttgcactgcgccacctttttaataagttattttggagaaaacggcgtttcaaacgagcaaatcgaagcaaaaagtgccagttctcggtgaccaagaagtaggggccgaaatcgcaaaaacccaaaggtaagttcaggtaaaaaagaaattagcaaagaaccaagagaggcagattgtgggagtaccatgtcagatgccatgagtgctccgccgccccttattccgcagctgcaggagatgcagcaacagcagcagcagagcgctaatcccgcccagctcgcccagcagtggagcaattacgcctggtatgccaaccaaaatgctgcttaccagcagcagtatcagcagtactaccagtactacgtacgctaccagcagcagcagcaacagcaggtaacctcgacggtcagtacgtcaaatgcgccgccgggcttcagcaatgcgttggctgcaccgccgcctctgccctcagggccgccccctccgcctccgccgcaaataggtcagccacctggccaaaacaaacaacaacaacaacaacaacagcaacaacaattacaacaacaacagcagcaacaacaacaacagcagcagcagcagcaaaaaaatttcgggggaatacgttttaatttgaatttaaaccaaaagcgtttggccggtgctcctaatcccctgcagcaacaacaacagcagcagcatcaacaacaacaacatcaacaacagcaacaggtcatgcaattgtacaataacaacaacagcaacaaaaagaagcgcaagcggaataacaaaaacaagaactttgagcaatcaacatacagcaatccgtttgccaatcaaaccccagccacaccccaagctccaccgccgcccatcattagcgccagcgatgtaggtgtaccaattaatccggacttgagcaaaccaccacctccattacccctggccattgtggcacccacagagaatccccaacaccagaagcagcagcagcaggagcacatggcagcacaaagagcgggagaggctacatcccaaacatcaaattttaagcggccaaacagttttcaaatggcttcaagcgactcctggccgaattccctcaaccaatatgttgctcgttgctattcaaagtgcaacactgatctggataaggatcagatcgacatatgtctgaaaggcaagattatagcggcggccaatcgcaacgagctgtggacacgcgattgggataacgagcccatgccgacggtgtacagcgagagagacggcattgatgtggtgctaagcaatgtgccaccgccgcagcagcagcgaagcaactactttcagaagaagcaagaacaggagagggagcgagagagagaccgcgaagcggataagtcacctgccaaaggttccacgggtatagtgaatcagttcaagcagaagggcaatcagttcaacaaggcctcgtccagctacggttctcatcactcttcgtcgtccaagtactccaggagtcggtcgcggtcgccgtcatcttcaaactcgttaaagtactcgagcaagaagcggtactcgcgttcgcgctctcgttcgcgttcccgttcgcgatccccccgctcccgatcgtgttcccgcagtagcgatgccagcagtccaccggcgcgtaagattattcgcaaatcgggctcgaacgaatctctgaatttcataccactcaccgcgaatttatcccgcaagcagcaaaaaatgctgatgaagaagggcaagcgcgcagctgctatggcctcagcacagatgaaaaaaaaggacacacctcacttttactccaatcagtcgtctgttggcggtgccgttgatgatgacacagcgcgcttgcaacagcgtgcggcacgattctcacagcagggctccagctcggccaaaaaatcggtcgtcgccattgcaagctcaccgtttggtctcaccacggccaagaacaagaagaaaatggtgcagcaacaccagcagcaccaacggtcagctttctacgaagacacagaggcggctagcggtatagatcttctcgatttacacattgtaggaacttgtagggatctagaaaagtcatttttgcgtcttacaaaggcgccgtctccgtcagaggtgcgacctgtcgaggtgctcacccattcgcttgttaatgtgaaaggaaaatggcgtgccaatcaggattatcactacgcgtgtgatcagcttaagtccataaggcaggatttgactgtccagggtattcgtgatcagtttacggttgaggtgtacgagacacacgcacgcattgccatggagaagggtgaccacgaggagttcaatcagtgccagacgcaacttaagatgctgtacatggagatcggtggtaaaaacgccaatgccctcgagttcaccgcctatcgcatactctactacattttcacaaagaatactctggacatcaccactgtcatgcgttcgattacggctgatcaacgtgaaaatcctgtcattgcgcacgctcttcagttccgatctgcgtggtcgctgggcaactactgcaaattgttttccctgtacaggacggcgcctcttatgtccggccacatgattgaatggttcctggagagagagcgcaaagctgcattgcgagtcattattaagtcttatcgtcctaacattagcgttgactatattaccaaaattctggctttcgatagctcagaaaagtgcaaggaatggctcgacactttcagtttgccatatgccgccgatggtgcgcaagttgattgcaaaaatgcagctgctattgctatttgaatcacacttcatatagagcagactagctggcatgaagccctattcgattttgtacctgatttccgagcttttcggatgttagtgtcctttttcggactgcggatgcaactctcttggccctgtttaaaaat

SEQ ID NO: 14595 - protein, 874 aa, DROSOPHILA
MSDAMSAPPPLIPQLQEMQQQQQQSANPAQLAQQWSNYAWYANQNAAYQQQYQQYYQYYVRYQQQQQQQVTSTVSTSNAPPGFSNALAAPPPLPSGPPPPPPPQIGQPPGQNKQQQQQQQQQQLQQQQQQQQQQQQQQQKNFGGIRFNLNLNQKRLAGAPNPLQQQQQQQHQQQQHQQQQQVMQLYNNNNSNKKKRKRNNKNKNFEQSTYSNPFANQTPATPQAPPPPIISASDVGVPINPDLSKPPPPLPLAIVAPTENPQHQKQQQQEHMAAQRAGEATSQTSNFKRPNSFQMASSDSWPNSLNQYVARCYSKCNTDLDKDQIDICLKGKIIAAANRNELWTRDWDNEPMPTVYSERDGIDVVLSNVPPPQQQRSNYFQKKQEQERERERDREADKSPAKGSTGIVNQFKQKGNQFNKASSSYGSHHSSSSKYSRSRSRSPSSSNSLKYSSKKRYSRSRSRSRSRSRSPRSRSCSRSSDASSPPARKIIRKSGSNESLNFIPLTANLSRKQQKMLMKKGKRAAAMASAQMKKKDTPHFYSNQSSVGGAVDDDTARLQQRAARFSQQGSSSAKKSVVAIASSPFGLTTAKNKKKMVQQHQQHQRSAFYEDTEAASGIDLLDLHIVGTCRDLEKSFLRLTKAPSPSEVRPVEVLTHSLVNVKGKWRANQDYHYACDQLKSIRQDLTVQGIRDQFTVEVYETHARIAMEKGDHEEFNQCQTQLKMLYMEIGGKNANALEFTAYRILYYIFTKNTLDITTVMRSITADQRENPVIAHALQFRSAWSLGNYCKLFSLYRTAPLMSGHMIEWFLERERKAALRVIIKSYRPNISVDYITKILAFDSSEKCKEWLDTFSLPYAADGAQVDCKNAAAIAI

SEQ ID NO: 14596 - DNA, 4148 bp, DROSOPHILA
tacttcgccaggcggcggaggagaatgaatctcggcgaggctccagcggccatggagcaacttcgcgtccagcaggcagctgctccggatccgctgggcattgacgagctgatgtcggccagtgacatcaaaatagaacccatccagttgcaaatggaagaggacccacaagcgccgtatcccgaaaatcagcttgaacaagctcttagctatggcaatgcaccgggtgaggacatcctaccccttcccgaggactatggagaggcacagactgaagtggcgaccactaccaacgagccagcacagcgaagaagcaagaacacggccaaaataaagtccaagaagcacacaatgcgcgtgggccgaaagctgatccatgtaaaagtcatcgatgataagcagccaaagcgtattgtggaccgcaatggacccagcgccaagccctgcatctgcgagcactgcggccggcaattcaaagacaccagcaatctccatgtccatctgctgcggcacacgggcaccaagccgttcgagtgcgaccagtgccaccagaagtgctacacgctccacctgctgcggcgccaccagctgaagcacacggagggtccctacgcctgcaccttctgcggcctggagtacagcacgaacagctcgcgcgtgagacatgaaaggtgcgtcctacgcagcagttaaagctacgaattataaatgattataatcattttacagggaggcctgcaagaagggacgagcgccgcaatccaagtgggagatcatcaagaagggcgagcgcactttccagtgagttgctcttagtaatttcgcattattctatctaatttccccgtacttctcagctgcgaggtgtgcgatctctggttcctgcgcgccggcaactttactcagcacatcaactcttccagtcacatcgaaaacgaacgaagaaagaaaagaaaatcaaatccaaccgccattaattcataaatccaactaagtgaaaattgaaaaagaagcacgcatttcattcggttgcaacaatttgtactacgcccaatttgcgagcattatcctgatgcattttactgttcgcatggcttttcatgttgtacttgtagcgaaagttaacattgcaaacctcgcacctgtaatgattaacaagcacaattatattaattaggaaactaatgatctaaaagctcgagaacacccaccaatatggacgttcgccggtgtgaatgagctcgtgctcccgcagccgcgtccgctgatagaatcccttcaagcagacgtcgcactggagcggcctcttctcgtgcgtcatctcgtggcgcttgagcttgttgggatccgagtagctcttgctgcaccgctggcacttgtaggcgttcgcatcggtgtgcgatttgatatgccagcccagggcgtacttggaggcgtagtgcttttggcacagcttgcactgatatcgcacactttctcgaggcttgggcatgggcttgggattgatgcgcttcacaatgagacgaggcgccgcattgtggacctcgctgaaatggatggccataagtacaaaagaaagttgatgcatgcatgttagttgtgtacatttaccactcacctctcgtgcttttggcgagctccgggataggcgaatgtttcgctgcagaagccgcaggcgaagggagtttctccccgatgacggatgcgtatgtgcatgttgcgcatgtaggcgtcgtagaatgtctttggacattcggtgcactggtagttcttggtgcgagtgtgccgcagcatgtggatgcgcaaattgtgtgacatgcggaacgcctggccgcactgatcgcacacaaagttcggcggcttggcgcgtagctgggcgcgccgtataagattcctctcttctttggtctttgggttggcactgcgcttcggtttctgttcaccagctgccttttccttagctttgggcttactcgcgattggtgctcccttcctgagtcttgctttttccttccctgtatattgatctaatagctccttaaagatcttggcccccagagccacactgagtggatcctgggcggcgggcgattcagcgacttcgtcgactgcctcttgacttgtttggtcatctgatgtcgcttcatcttcaacatgatctccacctgcatcttcaatctcttccacattagtgttctccgtatcagatatcaaatcgtgatccgatgatattggattctcattctcagcctcgatctgcacttcatcagttgagggcttggcttggctgagcttgagctcggtgctgatgcacatctcccggaaatcgatggcctgatccagggccgatttacacgcagggcacatgaggcgcggctcgtctggtttgtgactgatctaaaagatttttgacgcaatacatgttattttgctctataaaatgtacgaataaccaacccagacaccacttatgacttcgatgtgaaagagcaggacactgttggccgggtcaaagagatccttggccctgaagtcagcggtgaagtcattgtagcatgtgcggcacttttgcagctcttccaacttttcctcgcccgaaagtggatccaattccatggttacagtttccgataaatacacactatcctgctcaaatgaagtagcctccgggtggattagcttggcctcctcctccgccaatagctcagccactagctcctggtttctgcggcgctgtgacctctccttacgggctctatccgatccactttcctggcttttgttcacgcagggaactgcacctggtcgcaaagtgcgcttttttgccaatcctgagcgaaagacaaggactcagttggacatttttagcggctcacacatggaactcacccatttcgaatttcagggatccctcgatgtcctcatccttgaaatgttcgatgcaaatgcagggattcttcaatttcaaggactcctccgtgtagccgcagaatgctagccaagccttaaacgtatccgggcacttggggaagcggaagaagcccaagcgttgctgctgagccgcattccttttggagcggcagtcagagaaatttcggcaattgggcacggcacatcgcatatttttagaataaagtgcgcaatgtttatattaaataatccggcagtgtgaccaaatgttgcgctgccacgatgccaacaattcgaggtggttacatcgatgacgtcacaaaatgcaacagttatttgaaattgcaaaattcagaaaactacgtttatttgatgttcttacaaaaactctgctttatttaacccacaaacacacacacacacactgtatttcattagtaattgaaaaaaatgtaatttttttatatcagaatagcagcatttcgcagtgataacgttgtattcttttatttgatttgattttcttgcgaaccaaggaaaacttttgggtaataatggtagcgcatttctatgtccacttagtattaatctagcgaaaaatacaagtatacgtacatggataaatacatatgagtaactaagcctaaactacacgataaatatatattaaggagcgcacgatgagcagtggaggacggcactagtttttgcccttctccacacggcccgccttgactccattgagcttcggtttggtctcctgcttggcggcgggcttcttggacttctttttcttcttctcgaaggcgctgaagtcaacagtgtcggagtcgtcctcgttgccgtacttctccatcaggcggtccattagggagccaaagtttgactcgcgctgattgcgacgtgccaggatcatttgctgcaaatcgccaccgttgtcggctaaatcctggtcgtccttctccttctggcggcgcttcaaacgctccttgatcaccttggcctccttgaattcgcgcgcgtacttctggtggcgcttcttgcgcttggctgccggctcctcggtaaagatcttgtactcgggcacctcgccgctggcaatcatatcctgaacgatcttctgaatgcgcggctcgtcctccaccttcatgaagggcacatggttcatcagatagttgatgcaacccttgccgcccagatacgcctttttcagatcggtgcgctccagctccgattcc

SEQ ID NO: 14597 - DNA, 1890 bp, DROSOPHILA
aaacattgcgcactttattctaaaaatatgcgatgtgccgtgcccaattgccgaaatttctctgactgccgctccaaaaggaatgcggctcagcagcaacgcttgggcttcttccgcttccccaagtgcccggatacgtttaaggcttggctagcattctgcggctacacggaggagtccttgaaattgaagaatccctgcatttgcatcgaacatttcaaggatgaggacatcgagggatccctgaaattcgaaatgggattggcaaaaaagcgcactttgcgaccaggtgcagttccctgcgtgaacaaaagccaggaaagtggatcggatagagcccgtaaggagaggtcacagcgccgcagaaaccaggagctagtggctgagctattggcggaggaggaggccaagctaatccacccggaggctacttcatttgagcaggatagtgtgtatttatcggaaactgtaaccatggaattggatccactttcgggcgaggaaaagttggaagagctgcaaaagtgccgcacatgctacaatgacttcaccgctgacttcagggccaaggatctctttgacccggccaacagtgtcctgctctttcacatcgaagtcataagtggtgtctggatcagtcacaaaccagacgagccgcgcctcatgtgccctgcgtgtaaatcggccctggatcaggccatcgatttccgggagatgtgcatcagcaccgagctcaagctcagccaagccaagccctcaactgatgaagtgcagatcgaggctgagaatgagaatccaatatcatcggatcacgatttgatatctgatacggagaacactaatgtggaagagattgaagatgcaggtggagatcatgttgaagatgaagcgacatcagatgaccaaacaagtcaagaggcagtcgacgaagtcgctgaatcgcccgccgcccaggatccactcagtgtggctctgggggccaagatctttaaggagctattagatcaatatacagggaaggaaaaagcaagactcaggaagggagcaccaatcgcgagtaagcccaaagctaaggaaaaggcagctggtgaacagaaaccgaagcgcagtgccaacccaaagaccaaagaagagaggaatcttatacggcgcgcccagctacgcgccaagccgccgaactttgtgtgcgatcagtgcggccaggcgttccgcatgtcacacaatttgcgcatccacatgctgcggcacactcgcaccaagaactaccagtgcaccgaatgtccaaagacattctacgacgcctacatgcgcaacatgcacatacgcatccgtcatcggggagaaactcccttcgcctgcggcttctgcagcgaaacattcgcctatcccggagctcgccaaaagcacgagagcgaggtccacaatgcggcgcctcgtctcattgtgaagcgcatcaatcccaagcccatgcccaagcctcgagaaagtgtgcgatatcagtgcaagctgtgccaaaagcactacgcctccaagtacgccctgggctggcatatcaaatcgcacaccgatgcgaacgcctacaagtgccagcggtgcagcaagagctactcggatcccaacaagctcaagcgccacgagatgacgcacgagaagaggccgctccagtgcgacgtctgcttgaagggattctatcagcggacgcggctgcgggagcacgagctcattcacaccggcgaacgtccatattggtgcgaggtttgcaatgttaactttcgctacaagtacaacatgaaaagccatgcgaacagtaaaatgcatcaggataatgctcgcaaattgggcgtagtacaaattgttgcaaccgaatgaaatgcgtgcttctttttcaat

SEQ ID NO: 14598 - protein, 613 aa, DROSOPHILA
MRCAVPNCRNFSDCRSKRNAAQQQRLGFFRFPKCPDTFKAWLAFCGYTEESLKLKNPCICIEHFKDEDIEGSLKFEMGLAKKRTLRPGAVPCVNKSQESGSDRARKERSQRRRNQELVAELLAEEEAKLIHPEATSFEQDSVYLSETVTMELDPLSGEEKLEELQKCRTCYNDFTADFRAKDLFDPANSVLLFHIEVISGVWISHKPDEPRLMCPACKSALDQAIDFREMCISTELKLSQAKPSTDEVQIEAENENPISSDHDLISDTENTNVEEIEDAGGDHVEDEATSDDQTSQEAVDEVAESPAAQDPLSVALGAKIFKELLDQYTGKEKARLRKGAPIASKPKAKEKAAGEQKPKRSANPKTKEERNLIRRAQLRAKPPNFVCDQCGQAFRMSHNLRIHMLRHTRTKNYQCTECPKTFYDAYMRNMHIRIRHRGETPFACGFCSETFAYPGARQKHESEVHNAAPRLIVKRINPKPMPKPRESVRYQCKLCQKHYASKYALGWHIKSHTDANAYKCQRCSKSYSDPNKLKRHEMTHEKRPLQCDVCLKGFYQRTRLREHELIHTGERPYWCEVCNVNFRYKYNMKSHANSKMHQDNARKLGVVQIVATE

SEQ ID NO: 14599 - DNA, 4359 bp, DROSOPHILA
gaggatgcgaagctcctccagctctagctcacgctcccggcaagccaggcgaaccttggtcagctccgcattgagctgggccttttcagcgatgatcacctggatggcctgcaagctagaggcatctgccagtccaccattgtgttccgactcgttttgggcaaaataagaagcggctgtgggcagggcagactgctccggcggctgcgtcccacctgctcctccaccgttcacatttatctcgctgtctgaccgttccgacagattgctggatatgctcacagtggacgagtgcgattgcgtggtggcagccaccggctcctctgctcccggctgcccattgttgttgctggcgcgctgctggtactccttcagctgtgtccacagaagcgtgttaaacaaaatcaatattagtcggccaatatgtgtccacgtcacaagagcaaaacaattgtgtgtggcactggttgtcgcacctttttccttgccgcggccaacttctgcgccttggcatcctgcgtgtcatcgggcatgtccttcggggtcagcagcggtacctttgccacacctggagtaagctcggttcggaaggcgagccaacaaatgtaaattaagctaggcaaaagtggaaatttctgaatgttgataacaggtctgaagttcagtatgaccgtacgcgtttagagccaaaatgccgcgcgaacgggtacactaggcggcagggaaagcacagttatatattggcgcgcatttttagcttttttttcatttttaaaatcgaacacgtatatatgcgtatccgttttcaataaacagagattatgtacaattaagaaatttcactctacttgcataaacgttcatgcgaggaggttttgagaaatactcttcaaattaaaaaaaaaaaacagtattatttatcgaaacaaccattagttcatcgtttcttatcacttcacttaagtcggcttcctaattcagtcgtagttaagccgctgtgaggagtagaagtccaggtcgatacgatgtacaaccttatcaagggctccttggcaacatactgctgcctgtgcctgctactgatattgattgacccagcggaatcgggacaactgtcaacgagattcaacgtgagcttcgcccagctggattcctgcgaaacctactccgttccgaatacgggctatggctaccggaggttctacatgctgcgcgagctgagcaacaacaacaggaaggccggagagcggctgcacttgaaattctacgtcctgaccgccatggatgcgcacatcctgctctcggtgacgaatcacccgcgcccaaatgatcgcgtttacgagatcggtgggtgaaatcaataatattcagttttaattccagcatttcaatgagctctttctagtggaaccctacctaaatattcaattgatatctttattccgcttgcagtgataggagccggcggaaatacgttttccgcaatccggaatgctatgggaatgaggcgggtggccacgaatcaagagccgaacttggtatcgctgtacgacccgacgccaattgagattgtccaaaaccagagtgagttcccccatcttatcgggtattccctgcccctccaacgcacagtatatttccagatggcgagctgtttgtttacatacccggcttcaagaaggagcccctgctgcagttcatcgatgaagcaccgctggtcatcaactatctgagtttcagctcctttggttccaatacggcgcggtggttttacgactgtggcttcgatggttatggtaaggatgatatatagtaagctataagtctatatctgtaagtatgttctaaaactgacccatttcagggtcggaaattgcaccgatagtgaaggaggaaacgaagacggaaaaactgctaagccatctgaatatccaggcggaaaatgcaagcatgccggctaatctcagctccatatcgttccacttccaaacgcgctccctcgcctacgagcaaaccagttccttgcttcagacccgcatgcacatgatgatggtaatgaaagataagctcgaaatgcaaatatttagtgtgaaacagtaaagatacattcgcctatccatgcagcactggagggatagtcgtcttgtctggaaacccgaggacttcggctcgctggaatctttcgaacatcctgaccttcgtatatggaagccgcatatgaacgtcctcaacggcgccctgcaatccatgggtcaggtcctccaatcctatgagctgatggtctacgccaacggaagcatcaccctgtacgctcaaaacctccagctggccagttggtgtgtggacagtgcccgaaactggccaagcgagcgagtgacttgcgacatcgagctgggtctcaatggccaggaggggcaggagaatgtggcgctaatctacgatgatcagcgcaagccgattgcgcccaatgagcacgtgaacacgccatccggctggtcgttcacgcaaatgtccgtggtgctggtggagaacgattcgcaaaggcgatacaaccccaagggaatgatgcagaaaatgaccggcgatgtggcaattgagttcacgctgcaaaggaatcggagcttctacatgaccgtcttctatttgccgttgattggtaatatgaaaatgtgtttgatttcttgttatggaataacatataactacaatatattctttcagcctgccagatgttcctgattttgtcctttgtactgcgttctactcgtaggagttccctcattctcatcgccttgctgattgccgcctggggtttaatgtacatgacgcgctacgcctctccgcattatgtgccgcccatgagtaagttttaaatcaattaactaaaactcactgtgtataattttcaaattcaaattttcacttttcctacagtgactgcatataaagtcatcatgatgaccaccacctattgctacattctgcacatctgcattatatggctggatctatatccacccagatcgaaggctcctggctggctggttagggtgattaactccaatgttctgcgatgcattctgggattgagattttcggatgtgagtagttaagcccctattgaacacatatacgtattgcaattcactatattcctacagtctaccgactattgcgacattcaggagaatccctggcaccatatggccaagatcctgaacaacctgagttcaatcttggtcattataacctttgccatcgtagatattacgagtgggttttgaaaaacagaatttttctttattgtgcatttgagagaatattaatggttcttaaataaataagaagtaaacagagaagattgtgaagattttgcgactacaagttgaaaaagtgggagagcgtgctgggctgttgcgactcctcgcagttaattgctgccattgttccaactccgatccgggatcgatttggatttggagtgttttggtatcggagcttagtggtaaccgtatccacccagggacagggcaggtgcagcgtatgacttaaccagggcaggagctgcgtagctgatggctggagccgcatatgacttgaccaccgtgggagcagcgtagctgatggctggagcggcatgggcgtaactgatggctggagcggcataggacttgatcaccggagctggagcagcataggcgatggcaggcgcagcgtacgacttaacaatgggcgtggcatgggaaacaacctgtgcatgcaaagtagattgtaagattaaatgggaaaatatcagagtatatccagatcttaccgagctgaagtgcgagtagctggtggctggagctgccaccttgaccgccacaggagcagcataggacttgaccaccgtgggagcggcgtagctgatggcaggagcggcatgggcgtagctgatggctggagcggcataggacttgatcaccggagctggagccgcataggtgatggctggggcagcgtaggacttgatgactggagctgcagctgcatatgttatggcaggagcggcatgggcgtagctgtagtccggagccgagtgtccataatcaaggagtccaggagcagcagtggccacagccagcagagaggtaaggatctggcgaggtaaatggaaaaccaaactttgatgttaatctttttgatctagtgaatataagatcgaggtaatccttgtatgaagatatcctttgcagtcagtattattggcttaaagtgataatactgatcctaggccgcatcctttccaaccctttccactcaccagaagtttcatgctagcgctggataacgaatcacttggcttggagggagaattgc

SEQ ID NO: 14600 - DNA, 1858 bp, DROSOPHILA
aggagtagaagtccaggtcgatacgatgtacaaccttatcaagggctccttggcaacatactgctgcctgtgcctgctactgatattgattgacccagcggaatcgggacaactgtcaacgagattcaacgtgagcttcgcccagctggattcctgcgaaacctactccgttccgaatacgggctatggctaccggaggttctacatgctgcgcgagctgagcaacaacaacaggaaggccggagagcggctgcacttgaaattctacgtcctgaccgccatggatgcgcacatcctgctctcggtgacgaatcacccgcgcccaaatgatcgcgtttacgagatcgtgataggagccggcggaaatacgttttccgcaatccggaatgctatgggaatgaggcgggtggccacgaatcaagagccgaacttggtatcgctgtacgacccgacgccaattgagattgtccaaaaccagaatggcgagctgtttgtttacatacccggcttcaagaaggagcccctgctgcagttcatcgatgaagcaccgctggtcatcaactatctgagtttcagctcctttggttccaatacggcgcggtggttttacgactgtggcttcgatggttatgggtcggaaattgcaccgatagtgaaggaggaaacgaagacggaaaaactgctaagccatctgaatatccaggcggaaaatgcaagcatgccggctaatctcagctccatatcgttccacttccaaacgcgctccctcgcctacgagcaaaccagttccttgcttcagacccgcatgcacatgatgatgcactggagggatagtcgtcttgtctggaaacccgaggacttcggctcgctggaatctttcgaacatcctgaccttcgtatatggaagccgcatatgaacgtcctcaacggcgccctgcaatccatgggtcaggtcctccaatcctatgagctgatggtctacgccaacggaagcatcaccctgtacgctcaaaacctccagctggccagttggtgtgtggacagtgcccgaaactggccaagcgagcgagtgacttgcgacatcgagctgggtctcaatggccaggaggggcaggagaatgtggcgctaatctacgatgatcagcgcaagccgattgcgcccaatgagcacgtgaacacgccatccggctggtcgttcacgcaaatgtccgtggtgctggtggagaacgattcgcaaaggcgatacaaccccaagggaatgatgcagaaaatgaccggcgatgtggcaattgagttcacgctgcaaaggaatcggagcttctacatgaccgtcttctatttgccgttgattgcctgccagatgttcctgattttgtcctttgtactgcgttctactcgtaggagttccctcattctcatcgccttgctgattgccgcctggggtttaatgtacatgacgcgctacgcctctccgcattatgtgccgcccatgatgactgcatataaagtcatcatgatgaccaccacctattgctacattctgcacatctgcattatatggctggatctatatccacccagatcgaaggctcctggctggctggttagggtgattaactccaatgttctgcgatgcattctgggattgagattttcggattctaccgactattgcgacattcaggagaatccctggcaccatatggccaagatcctgaacaacctgagttcaatcttggtcattataacctttgccatcgtagatattacgagtgggttttgaaaaacagaatttttctttattgtgcatttgagagaatattaatggttcttaaataaataagaagtaaacagagaa

SEQ ID NO: 14601 - protein, 585 aa, DROSOPHILA
MYNLIKGSLATYCCLCLLLILIDPAESGQLSTRFNVSFAQLDSCETYSVPNTGYGYRRFYMLRELSNNNRKAGERLHLKFYVLTAMDAHILLSVTNHPRPNDRVYEIVIGAGGNTFSAIRNAMGMRRVATNQEPNLVSLYDPTPIEIVQNQNGELFVYIPGFKKEPLLQFIDEAPLVINYLSFSSFGSNTARWFYDCGFDGYGSEIAPIVKEETKTEKLLSHLNIQAENASMPANLSSISFHFQTRSLAYEQTSSLLQTRMHMMMHWRDSRLVWKPEDFGSLESFEHPDLRIWKPHMNVLNGALQSMGQVLQSYELMVYANGSITLYAQNLQLASWCVDSARNWPSERVTCDIELGLNGQEGQENVALIYDDQRKPIAPNEHVNTPSGWSFTQMSVVLVENDSQRRYNPKGMMQKMTGDVAIEFTLQRNRSFYMTVFYLPLIACQMFLILSFVLRSTRRSSLILIALLIAAWGLMYMTRYASPHYVPPMMTAYKVIMMTTTYCYILHICIIWLDLYPPRSKAPGWLVRVINSNVLRCILGLRFSDSTDYCDIQENPWHHMAKILNNLSSILVIITFAIVDITSGF

SEQ ID NO: 14602 - DNA, 3371 bp, DROSOPHILA
cggctcgtctggtttgtgactgatctaaaagatttttgacgcaatacatgttattttgctctataaaatgtacgaataaccaacccagacaccacttatgacttcgatgtgaaagagcaggacactgttggccgggtcaaagagatccttggccctgaagtcagcggtgaagtcattgtagcatgtgcggcacttttgcagctcttccaacttttcctcgcccgaaagtggatccaattccatggttacagtttccgataaatacacactatcctgctcaaatgaagtagcctccgggtggattagcttggcctcctcctccgccaatagctcagccactagctcctggtttctgcggcgctgtgacctctccttacgggctctatccgatccactttcctggcttttgttcacgcagggaactgcacctggtcgcaaagtgcgcttttttgccaatcctgagcgaaagacaaggactcagttggacatttttagcggctcacacatggaactcacccatttcgaatttcagggatccctcgatgtcctcatccttgaaatgttcgatgcaaatgcagggattcttcaatttcaaggactcctccgtgtagccgcagaatgctagccaagccttaaacgtatccgggcacttggggaagcggaagaagcccaagcgttgctgctgagccgcattccttttggagcggcagtcagagaaatttcggcaattgggcacggcacatcgcatatttttagaataaagtgcgcaatgtttatattaaataatccggcagtgtgaccaaatgttgcgctgccacgatgccaacaattcgaggtggttacatcgatgacgtcacaaaatgcaacagttatttgaaattgcaaaattcagaaaactacgtttatttgatgttcttacaaaaactctgctttatttaacccacaaacacacacacacacactgtatttcattagtaattgaaaaaaatgtaatttttttatatcagaatagcagcatttcgcagtgataacgttgtattcttttatttgatttgattttcttgcgaaccaaggaaaacttttgggtaataatggtagcgcatttctatgtccacttagtattaatctagcgaaaaatacaagtatacgtacatggataaatacatatgagtaactaagcctaaactacacgataaatatatattaaggagcgcacgatgagcagtggaggacggcactagtttttgcccttctccacacggcccgccttgactccattgagcttcggtttggtctcctgcttggcggcgggcttcttggacttctttttcttcttctcgaaggcgctgaagtcaacagtgtcggagtcgtcctcgttgccgtacttctccatcaggcggtccattagggagccaaagtttgactcgcgctgattgcgacgtgccaggatcatttgctgcaaatcgccaccgttgtcggctaaatcctggtcgtccttctccttctggcggcgcttcaaacgctccttgatcaccttggcctccttgaattcgcgcgcgtacttctggtggcgcttcttgcgcttggctgccggctcctcggtaaagatcttgtactcgggcacctcgccgctggcaatcatatcctgaacgatcttctgaatgcgcggctcgtcctccaccttcatgaagggcacatggttcatcagatagttgatgcaacccttgccgcccagatacgcctttttcagatcggtgcgctccagctccgattccacatactccttttcatagttgttgatatcctcctcggtgatgggcttgaagattttgctccacaactccagccacgacgacagcttggactcgctctcatcgtcgtcgtcgatcacgccctgctcgtcgtacagcgcccgcttctgcgtgtcggtaagcacctggtagagcttcgatagcaccttgaacttctcggtggactccgccttctgctcctccggcactcgatcgggatgaacgagcagcgagagcttgtggtatgccttcttcacctccttctcgccggcgccccgggccagctccattagcttgtacacatcgcgcgtcccaaaatacttttcgcacagctccagcgtcgacattgctaatttcgtattttgtatttttatttttcgcaccaacactaccaaacgcaaaatgcgccaaaacgccgcgccagtgtggcggtgcgtggggcagacaaaaattcctttgtttaatggtgcgaaaaaatctttgattttcctgtttacagcaatttggttattatttaacaagtaaaatggtattctatgaattttgttttaactattgataatttttgagagcctgcgtgataagtaacaaaaataaattggagaattgaacatttcagtgctgcacaacattgcatggttggtgtcccaactaaaaagtaacccgtgttaagaacgtatgagggtggcatccctcaaaatccatggcgagcagtgttaccgtactgcgaaaagtgaccttaaacccatctcaaaaaatataccaaacgtgtatttctcagcaaagttaccactgggcacactacacactatataacgagacggaagtcggaatcgtttcttttccgttttacacgtctgaagagaacagacatggtgagcatctcgatcggataaaataaattatattactatgtgatgtgtcaaaaagatggatgattgcaagttaaataattgattagtttggaaacagtagcgttataatcactctaaatgtaactaatacaaacaaagcgtaattttaatgcataatttgcacttgcaacatccacgtgttcacctaacctcaaagtgcagaaacgcattgtgctaatggattttctccattcattttgcagtctcatcgtaagttctcggcaccccgccatggctccatggccttctaccccaagaagcgctcagctcgccatcgcggtaaggttaaggccttccccaaggatgacgccagcaagccagtccatctgacctgcttcatcggctacaaggccggcatgacccacattgtgcgcgaggccgatcgtcctggctccagtaagtaccagcatccacctctatcaactaacaactactttccatgatgagtatactagaagatttatggttagaacacatatgattaaccgtgattatctcaactagggcggactgaccaagcccactctgtagatgatttctcttagggaataccattactcggtattaatggcttttctttctcttgcagagatcaacaagaaggaggtggtcgaggccgtcaccgttctggagaccccgcccatgattgtggtcggtgctgtcggct

SEQ ID NO: 14603 - DNA, 1371 bp, DROSOPHILA
tcacgcaggctctcaaaaattatcaatagttaaaacaaaattcatagaataccattttacttgttaaataataaccaaattgctgtaaacaggaaaatcaaagattttttcgcaccattaaacaaaggaatttttgtctgccccacgcaccgccacactggcgcggcgttttggcgcattttgcgtttggtagtgttggtgcgaaaaataaaaatacaaaatacgaaattagcaatgtcgacgctggagctgtgcgaaaagtattttgggacgcgcgatgtgtacaagctaatggagctggcccggggcgccggcgagaaggaggtgaagaaggcataccacaagctctcgctgctcgttcatcccgatcgagtgccggaggagcagaaggcggagtccaccgagaagttcaaggtgctatcgaagctctaccaggtgcttaccgacacgcagaagcgggcgctgtacgacgagcagggcgtgatcgacgacgacgatgagagcgagtccaagctgtcgtcgtggctggagttgtggagcaaaatcttcaagcccatcaccgaggaggatatcaacaactatgaaaaggagtatgtggaatcggagctggagcgcaccgatctgaaaaaggcgtatctgggcggcaagggttgcatcaactatctgatgaaccatgtgcccttcatgaaggtggaggacgagccgcgcattcagaagatcgttcaggatatgattgccagcggcgaggtgcccgagtacaagatctttaccgaggagccggcagccaagcgcaagaagcgccaccagaagtacgcgcgcgaattcaaggaggccaaggtgatcaaggagcgtttgaagcgccgccagaaggagaaggacgaccaggatttagccgacaacggtggcgatttgcagcaaatgatcctggcacgtcgcaatcagcgcgagtcaaactttggctccctaatggaccgcctgatggagaagtacggcaacgaggacgactccgacactgttgacttcagcgccttcgagaagaagaaaaagaagtccaagaagcccgccgccaagcaggagaccaaaccgaagctcaatggagtcaaggcgggccgtgtggagaagggcaaaaactagtgccgtcctccactgctcatcgtgcgctccttaatatatatttatcgtgtagtttaggcttagttactcatatgtatttatccatgtacgtatacttgtatttttcgctagattaatactaagtggacatagaaatgcgctaccattattacccaaaagttttccttggttcgcaagaaaatcaaatcaaataaaagaatacaacgttatcactgcgaaatgctgctattctgatat

SEQ ID NO: 14604 - protein, 299 aa, DROSOPHILA
MSTLELCEKYFGTRDVYKLMELARGAGEKEVKKAYHKLSLLVHPDRVPEEQKAESTEKFKVLSKLYQVLTDTQKRALYDEQGVIDDDDESESKLSSWLELWSKIFKPITEEDINNYEKEYVESELERTDLKKAYLGGKGCINYLMNHVPFMKVEDEPRIQKIVQDMIASGEVPEYKIFTEEPAAKRKKRHQKYAREFKEAKVIKERLKRRQKEKDDQDLADNGGDLQQMILARRNQRESNFGSLMDRLMEKYGNEDDSDTVDFSAFEKKKKKSKKPAAKQETKPKLNGVKAGRVEKGKN

SEQ ID NO: 14605 - DNA, 5998 bp, DROSOPHILA
taaagtaggtcctttgtacatagaatttgagttctgttccttctgtgtttttacttgccgtggcctcccaggcacggcggactcttctccggctcctgctccggttcccactgcttgggtgtcttggcctcaatggacagggcgtgcataaactcgaagcctgcttccttcagcgcattttttaccgtgtcattaaccaatcgatgacgctaagggaaaataaacctcttaataaatagaacggaaatccacggatttaacataccttgatgagcgtcagatcgttgaacttctccgagacgacgaacacacggaagtgggactccgaccgcttggggacattgtgctggggcgattcgttaatgacctccagatataccggcttcagctccgtgtttagtgcttttcgcatggcagactcgatgggcggatactgtcccgcctcctgcgacatagtggctctggggaggatctgtcctaagctgctgattgtgggtgtcagttgattcaggtttcgtatggaaactccagtgagtcggcgaagagtgaaatttaacatgattccagtatgcttctcgcacagctgtttacaattacataaacaactggcagccagagttgccaagtgcgggatgaaaatcaacttatcgataacgccaacgataaccacttttcaaaagaatgtttgcaacggtgaaaacaaaatataatattaaaattagtttaatttgctgcagttaagcacaaaaaagggtaacatatcttttaaaaatcttatcaagtagggcataaaaaaatgttaaataaaaataaattaaatgtacaaaaaagttgtaacttcaatactatgcgctataaatattttattgggggcagaatcaacagtgagcgcaaaacacgctccagaaataaatcgtacatctatgtataaacaatcgagcgaatatcaaatgtataatcaagtgaatagaaaaacgtcttcttcacaacggttttgggatcaatagtcaaccagtttcttgagctttggcggggcggagatgacgacgcgtcctcgattcgaagaaccactgccgccatggccgtaatccgcctcccggtcgcgatcacgaccacgcaaccgttcgttctgctgctgatgctgttgcctgtactgttcccgctcgcgattccgctcaatgctgcggtcccgctgcctccgccgcctggactgactcctccggctgcgggaacggcgccgatcacggctgccactgcgccgtcgactgtgggaacgtcgcttccgctccacgcgacttccgcttcgggagcgcgaacgctgcctacgattgtactttggactgggcgtccttgtgcgtctcctcctttccgttcggctgctgctccgtctgctgtgctgtgtttccggcggtggcgaccgcctacgactctccgatctgctgcgactgcgacgcgtcgacgactttgccagctggctttccgatgccacagattcggcatcgctgtccgagagctttccactcgagggcgttccatatttgtgacgcagctcacggcgcctgtgaatatgtaaatgtgagaggaccgccagagccaaccacatccagatacccaccttctgcgcagcttgagggccagttcgcgcatctcatcctcgcgttcctgctgttgcagtcgttcacgctcggtcttttcgatttccgcacgcttatcggctttatctgcaagatatttccgttttagttacctaattcaagggatttcagaaggcgcttggtgaacatcacactacactccagttggcttacattgccggttcaaaaggttctgcatctttctcttaagccgctcgcgcagattgggccgtccgccaccgccagaactcggatgtccggagccctgtaaaagcacatacttatttagcaagtctcaggatgttgttgcggtattaagggagcagtgggtggccggcgaaagtgtggtaggcagtggggattggtctgtgcgtccatgatgggctgtcagattagggcatctactcactaacattaggaaaaagctagcttcgaaagccgaagcttaaaaatgccagtgcaggattatcatttgcatcatcctttcaagcgaaatagtatttaaaactggattatgattaaaaatctgtatataacaactatgtgtctttaagctgaccacgccaaaatagcattcgtgccatttttatttgacgagaattcatgggaaagaatcaaggaacttcaatgcatagcaacagattgaagaaaaagcagacaaaccggacagaagttgcaatggttttataaatacaatggggtggcgaatacatccttgattgcatcgcaatcaacattgcatttcaatgcaacgaagtgctgcagcggcattaagaggggggcacaaaacaatgtatcaacaattggacatgcagggatggttgctagtcaggtttggaacgagaacacggtgctgcctgcttgggtccgaatgttgctcattggattggatgtcggatagcgggaggctgagacgtgaattttgtggtgtactccagttgggtggggcatgacacacttggctttgcttactgactttggtttcggtagcggaactatatttgcctgtttgattacccgtgctgctcgaagacgacatggtcggctggagggcgtgtgaacgctccgacctgaaagagagataccataattagatggataattacaattacaaggatacaggccctaatccttggctgttctactttaccactctctccagcacacaaacttacgcagtgtccaattccatatcatcggagtcctcagctcgctttcccaactgtggctgttgctgctcctcgttgtcgctgccttcgctgttctccgctcccgacgaagatgaggacgaggtatcgttgcctctttttcgtccatagtagcgtttcagtggcggtggtggtggctctaccacttgtggttgcacagcaacgggtgcggtagctgtgagtgcttggtttacattgagcattcgcgcaggtattggatagctgatcatgggcggcgttgctttggccggcggctgctgctgctgctgttggaacatctttaccgccgttacagtggatgtagttgtagtcgtggtggtgttcaggcaataaccacccacggtcgccactggcggaggtgtggtcttctttttgacgcgactccttcggtttgagggggatcgggagcgacttcttcgcctgtatgagctgccactggagctgcgagaggaataggagtagcgcttcctagagcgcttgtagcttggactgcgcgccttgtagcgtttccaggaaccggatcgcgatcgactgcgggatctggatctggatcttgacagcgaacgggatcttgatctcgacctggatcttgatctagagtagtaccttcgtcggcgacgtgaacgcgtcctgctccttctgtgatagcttctactgcggcgacttctacgacgactgccactccgacgactaccactccgactccttgagactgtggcactcctagaacgagagcgggagtgcgagcgggatcgacgtctgttgcgcttggacgactcattcatcactttcaacttgtccagattatctttcaccttttgagcataggaaaccgaagatgctgcggcggcggcaatcgccgctccgctactggcattgatgcacgattcacccagggtcagaccaggcttcgtcaggctgatggtgatcttggagtgcggctgcatttcgtcctcgcccccaaacgaggtaatgtaggttatcttctcgggacctgcttccgcgggcgacggcgaacgcgattcgctgtcctcctccttttctttctcaccgcccttaccaccaccttttttgtccttatcctccttggcagcatagcttggcggactgaatggtctattggcgatccttctctccttttgcgcccgacgctcgcgtcttgacttgcgcccgctcagcagcatcttctcctgctcctcctcgcgcgcaatgcgcagggcatccgcctcgtcagcatccttagtgaggtgtgagaagaagtcgttgcttttcatgccgtagttgcgcccgcaggcgttaagctcatgggcttgcgaggtgtccagcttgccgatgtctatcgacacatccatatcgatgtcagaatccgattcttcactgccatcccccttttcacccttcgcaacagctgccgctccaccaatgacagttgaactggcggctccaaaaggctgaggtccaatagtcgctccatcgccggtatcttcgtaggagtagccaattgtggctcctcccgtcttctgcttctttttggccagattccgttccgcctccagttgggcattggccccaaactgttcctccaggtagagttggtgcagaaacttatcctcgctgacgttgaggaagtcattttgcgccaggatgcgatagcgctcgtagtttagctgacgctcctcgagggtcagttcggagtcaccatccgccccctcggcgttggtcttgttcacgggaggaatgtgatccaaatgggcgcgtacatcgaagcggtcgatgaggttgtcctgctgaccctgccaaggcacactgcaaaaagtatccattacttagcaaaacaaaaacatcgccacgcaactagaaagtagagggttttatgctctaaatgaatatcacttgcatgattgcggctccatcgccggcggcggccaccgcgggatccaagtagatcttgcttcgccggccatgcagttgcagaaactgggtgggatctgcctgaattttgtcgtagaagtactgccgccgctccgccctcttgcggtaatcgacgatcaggccacggatcttgcgctcctgtttcctcgcctcgtgccacatcccgtacttgtgttgcctgcgatcgccggctggcaaatgacttggcttcacccgaaaaaggacatcagcacgcccggcaaaaatatgaccctacaccagctaaaaccgacgatatacagtatgaccgtatggttaaaactcgacctagtggtgggagatgcagcgacgtaacaacgatacaatatacactaaaacatcgatacattgatggatgacagacaggcagcaattttgcgggatatttgaaaaattactagtatttaaaccgattatcgctgtggagtatttccttatgcccaatcataaccttaagatttgtaatttacaaagttttgattaaaataagagttcaatagagttattgtccctttaaaagctaagctcaaaaagaataccctctatgatcgattttctgaaccactttgaaccagcgaacgttatttctggtcgacactggcaacgccgtggagcctgcgcccttttgtcgaaacaacaaaaggacaataaataacaagctaaactggaatgggccacaacacaacaattgacgctcgccgccttttgcggcatcgattttgaaggggaacacatccacaggcacagctacataaatcgaaaggacacccacggggatttgcgagtgcaaggatcaaggagcagggaagggaaagcgaaggcagaacgagtccagctcgtttttctggagcagttttgatgtcctcagacagacgctactatttcggagcggatttggaggacaatgagggtgccatctgcaaggccaacgacaacaacaacgaacaggaagcggataaggacgatccggatgaatcggagttcctgcaggatgtgccctactcctctagcagcattgaccgcagctcggtgggctccattccgtgggcggacgatgccatcaagaagaacctgctggactgggagcgggtggagcggctgatgagcggcgaggatcccttgacggagcttcaggagcccgagttgcgcaacgagatcgccgactggcaccgaaagttccctagcctgctgggccgccggactcga

SEQ ID NO: 14606 - DNA, 2936 bp, DROSOPHILA
tcctttttcgggtgaagccaagtcatttgccagccggcgatcgcaggcaacacaagtacgggatgtggcacgaggcgaggaaacaggagcgcaagatccgtggcctgatcgtcgattaccgcaagagggcggagcggcggcagtacttctacgacaaaattcaggcagatcccacccagtttctgcaactgcatggccggcgaagcaagatctacttggatcccgcggtggccgccgccggcgatggagccgcaatcatgcaaggtcagcaggacaacctcatcgaccgcttcgatgtacgcgcccatttggatcacattcctcccgtgaacaagaccaacgccgagggggcggatggtgactccgaactgaccctcgaggagcgtcagctaaactacgagcgctatcgcatcctggcgcaaaatgacttcctcaacgtcagcgaggataagtttctgcaccaactctacctggaggaacagtttggggccaatgcccaactggaggcggaacggaatctggccaaaaagaagcagaagacgggaggagccacaattggctactcctacgaagataccggcgatggagcgactattggacctcagccttttggagccgccagttcaactgtcattggtggagcggcagctgttgcgaagggtgaaaagggggatggcagtgaagaatcggattctgacatcgatatggatgtgtcgatagacatcggcaagctggacacctcgcaagcccatgagcttaacgcctgcgggcgcaactacggcatgaaaagcaacgacttcttctcacacctcactaaggatgctgacgaggcggatgccctgcgcattgcgcgcgaggaggagcaggagaagatgctgctgagcgggcgcaagtcaagacgcgagcgtcgggcgcaaaaggagagaaggatcgccaatagaccattcagtccgccaagctatgctgccaaggaggataaggacaaaaaaggtggtggtaagggcggtgagaaagaaaaggaggaggacagcgaatcgcgttcgccgtcgcccgcggaagcaggtcccgagaagataacctacattacctcgtttgggggcgaggacgaaatgcagccgcactccaagatcaccatcagcctgacgaagcctggtctgaccctgggtgaatcgtgcatcaatgccagtagcggagcggcgattgccgccgccgcagcatcttcggtttcctatgctcaaaaggtgaaagataatctggacaagttgaaagtgatgaatgagtcgtccaagcgcaacagacgtcgatcccgctcgcactcccgctctcgttctaggagtgccacagtctcaaggagtcggagtggtagtcgtcggagtggcagtcgtcgtagaagtcgccgcagtagaagctatcacagaaggagcaggacgcgttcacgtcgccgacgaaggtactactctagatcaagatccaggtcgagatcaagatcccgttcgctgtcaagatccagatccagatcccgcagtcgatcgcgatccggttcctggaaacgctacaaggcgcgcagtccaagctacaagcgctctaggaagcgctactcctattcctctcgcagctccagtggcagctcatacaggcgaagaagtcgctcccgatccccctcaaaccgaaggagtcgcgtcaaaaagaagaccacacctccgccagtggcgaccgtgggtggttattgcctgaacaccaccacgactacaactacatccactgtaacggcggtaaagatgttccaacagcagcagcagcagccgccggccaaagcaacgccgcccatgatcagctatccaatacctgcgcgaatgctcaatgtaaaccaagcactcacagctaccgcacccgttgctgtgcaaccacaagtggtagagccaccaccaccgccactgaaacgctactatggacgaaaaagaggcaacgatacctcgtcctcatcttcgtcgggagcggagaacagcgaaggcagcgacaacgaggagcagcaacagccacagttgggaaagcgagctgaggactccgatgatatggaattggacactgcgtcggagcgttcacacgccctccagccgaccatgtcgtcttcgagcagcacgggtaatcaaacaggcaaatatagttccgctaccgaaaccggctccggacatccgagttctggcggtggcggacggcccaatctgcgcgagcggcttaagagaaagatgcagaaccttttgaaccggcaatataaagccgataagcgtgcggaaatcgaaaagaccgagcgtgaacgactgcaacagcaggaacgcgaggatgagatgcgcgaactggccctcaagctgcgcagaaggcgccgtgagctgcgtcacaaatatggaacgccctcgagtggaaagctctcggacagcgatgccgaatctgtggcatcggaaagccagctggcaaagtcgtcgacgcgtcgcagtcgcagcagatcggagagtcgtaggcggtcgccaccgccggaaacacagcacagcagacggagcagcagccgaacggaaaggaggagacgcacaaggacgcccagtccaaagtacaatcgtaggcagcgttcgcgctcccgaagcggaagtcgcgtggagcggaagcgacgttcccacagtcgacggcgcagtggcagccgtgatcggcgccgttcccgcagccggaggagtcagtccaggcggcggaggcagcgggaccgcagcattgagcggaatcgcgagcgggaacagtacaggcaacagcatcagcagcagaacgaacggttgcgtggtcgtgatcgcgaccgggaggcggattacggccatggcggcagtggttcttcgaatcgaggacgcgtcgtcatctccgccccgccaaagctcaagaaactggttgactattga

SEQ ID NO: 14607 - protein, 957 aa, DROSOPHILA
MWHEARKQERKIRGLIVDYRKRAERRQYFYDKIQADPTQFLQLHGRRSKIYLDPAVAAAGDGAAIMQGQQDNLIDRFDVRAHLDHIPPVNKTNAEGADGDSELTLEERQLNYERYRILAQNDFLNVSEDKFLHQLYLEEQFGANAQLEAERNLAKKKQKTGGATIGYSYEDTGDGATIGPQPFGAASSTVIGGAAAVAKGEKGDGSEESDSDIDMDVSIDIGKLDTSQAHELNACGRNYGMKSNDFFSHLTKDADEADALRIAREEEQEKMLLSGRKSRRERRAQKERRIANRPFSPPSYAAKEDKDKKGGGKGGEKEKEEDSESRSPSPAEAGPEKITYITSFGGEDEMQPHSKITISLTKPGLTLGESCINASSGAAIAAAAASSVSYAQKVKDNLDKLKVMNESSKRNRRRSRSHSRSRSRSATVSRSRSGSRRSGSRRRSRRSRSYHRRSRTRSRRRRRYYSRSRSRSRSRSRSLSRSRSRSRSRSRSGSWKRYKARSPSYKRSRKRYSYSSRSSSGSSYRRRSRSRSPSNRRSRVKKKTTPPPVATVGGYCLNTTTTTTTSTVTAVKMFQQQQQQPPAKATPPMISYPIPARMLNVNQALTATAPVAVQPQVVEPPPPPLKRYYGRKRGNDTSSSSSSGAENSEGSDNEEQQQPQLGKRAEDSDDMELDTASERSHALQPTMSSSSSTGNQTGKYSSATETGSGHPSSGGGGRPNLRERLKRKMQNLLNRQYKADKRAEIEKTERERLQQQEREDEMRELALKLRRRRRELRHKYGTPSSGKLSDSDAESVASESQLAKSSTRRSRSRSESRRRSPPPETQHSRRSSSRTERRRRTRTPSPKYNRRQRSRSRSGSRVERKRRSHSRRRSGSRDRRRSRSRRSQSRRRRQRDRSIERNREREQYRQQHQQQNERLRGRDRDREADYGHGGSGSSNRGRVVISAPPKLKKLVDY

SEQ ID NO: 14608 - DNA, 3239 bp, DROSOPHILA
cgggcgagtgtggccgctggggcagttgcaacatgttggcataggaggcgcttagcaggccctgatctgcatcgtagctgtcaccacccagatggggatgatgctgccgctgggtggtggagtagctgcgctggaatcctccggctcccggcgccggcgatgatgtggtctgcagcagtggcgacgactgctgacggcgcatccgctcgatctgctcgaaattaacgtagttgctgctgttctgactcaactgattgctgctggcgcggaactggtggggcggcaggggaggatgactacgcacatgcggatgggaggggtggggcagagaagtgaggatgcgagtgggagtgctgctgcaggggcatctggctctgtgctcgtcgagcatggtagtagtccggctgcgagtccgtgcaggagtaggtgttccgactggtgctcgagctgcgcggatggaactcgcagctgggcgaggtgctcgcacagcgctgcagcgatttcttcttggcccgctgatcgctccacacattgatcaccgaaatatccggtggggtgtccttcttcatgtacttccccaccacgccctccttgtgctgggacttctccttgttccggcgcgagagcatcgtcggttttcggttgcacagcaggatcgttagatagttcatgcagactatgtttccgctcggattccggatcgctgtctttgtttagtccattttcgagctaaatttatgctgtacgatcggtttttgtgttttcagctggtgaccagtgtggccaatgaactggcgaaacaatcgcctattggcaacttggggacattcctcatgtctttgcatgactttctttaattgctaaatatataattttaaaaaatttaaaatattttttaataatctctgaaaaatataatcaaaaaatcattatttttattgcaagccgattgcaatcgataacgccgggcgttgcaatcgatagtatctatcgacttctgacaactcgactgtttatatggtcttctaataaattagttaatatctttaaggtacactattgcaaaccacttgctggattctatccaacaaacatacattaccatatatggtgtgataaattaatagcggaatagaaaccagctaagatggaggtcaaagaagtggtagtgattgtaaaatggagtggtaaggagtacccggtggacctcaccgaccaggacaccgtggaagtgctgcgtcacgagatattccgcaagacacaggtgcgtccggaacgtcaaaagctgctcaacctgaagtacaaaggtgcgtgacactcctaggcttcgggatatttcagttttaagatccaatgacttgcaggaaagacagcagccgacaatgtgaagatcagcgctttggagctgaagcccaactttaagcttatgatggtgggctccacagaggccgatatcgaggatgcgtgcagcctgcccgataatattggcgaagtggtcgacgacttcgatgacgccgatgaacgcgaagagtccgtggagcactccgccgtctatttggccaaggtgcagcgtcgtgtgcgagactacaagatcaaggagttagcgccgccgcgtgagggcaagaagctgcttgtcctggacatagactataccctattcgatcaccgatcgcctgctgaaacaggcacggagctaatgcgtccgtatctgcacgagtttctgacttccgcctacgaggactacgacattgtcatctggtccgccaccagcatgcgctggatcgaggaaaagatgcgcctgctgggcgtggccagtaacgataactacaaggtgatgttctatctggactccaccgccatgatatcagttcatgtgccggagcgcggtgtggtggacgtaaagccgcttggtgtaatctgggccctgtacaagcaatacaactcgagcaacactatcatgtttgatgacatccgtcgcaacttccttatgaacccaaagtccggcctaaagatccgcccattccgtcaggctcatctcaaccgtggcacggacaccgagctgctcaagttgtccgactatttgcgcaaaatcgctcaccactgcccggatttcaattcgctaaaccatcgcaagtgggagcactaccatcccaagaagaactcctgaacttatcctcggttgcaaacatttgttagatttatgttagatttatgtttattaaattaagatgcattttatacgcattgcgttccagccgtcaattagagtgtgtatccgccttgatccgcccagtggactctcctcgcctccaggtactcctcgtgcagcctgcgtcgctcatcctcgagcttggccagccggcggtagcgctgcagcaccattccacagccgaagagcagggcaacttgacagatcagccagaagatgaacagtgcaatcagcaggctctggttgatgcaaacgttatccaggtgcagcgggtcgtctatgccagcaatgagcagcactccccgctcgccgtacagataactattggtgttgctctggtccggaccgtgcacccggatattgtagttgaggggcaattcctcctgcgatctggtaaagttgtctggttgcggagccacatccaccaccgtggagatgtacacggggttctgaactcgtaggtcttccggtctacgatctggttggtcagcctgtcgccttctccgttgccaggatgaactaatacaattgctgggcgagcagcgctccacgcagaagcgaatctttacatcgaagcttacgttggccgttcctgagaacttgaaggcatggaagcgagcgcgcaacatgctcctgctggctgtgtgtaccctttccaaagcgggaaacacactggcatctgtgggacatcctcgctcgtcgatcagcagcacaaagttctcattgtccgctgtcttggccaccagcgaggtagcacgaaagtcgggtagtggtgccagctgcaactccatgtgctctgccaactgctgtgggctgtactccgccacaatctgtagttccaggttctgtccaatctgcacgtcgttggtctcgtgctggtgggatagatccaaaatctgaagcgagatgctgggatgcggatggggcccagtgctgctgttgtagtgaaccacaccctcgtgtgggaacatgctgcaggtatcgattgtgatagaattaagcattttgagggattctattaagaatacac

SEQ ID NO: 14609 - DNA, 1182 bp, DROSOPHILA
acaactcgactgtttatatggtcttctaataaattagttaatatctttaaggtacactattgcaaaccacttgctggattctatccaacaaacatacattaccatatatggtgtgataaattaatagcggaatagaaaccagctaagatggaggtcaaagaagtggtagtgattgtaaaatggagtggtaaggagtacccggtggacctcaccgaccaggacaccgtggaagtgctgcgtcacgagatattccgcaagacacaggtgcgtccggaacgtcaaaagctgctcaacctgaagtacaaaggaaagacagcagccgacaatgtgaagatcagcgctttggagctgaagcccaactttaagcttatgatggtgggctccacagaggccgatatcgaggatgcgtgcagcctgcccgataatattggcgaagtggtcgacgacttcgatgacgccgatgaacgcgaagagtccgtggagcactccgccgtctatttggccaaggtgcagcgtcgtgtgcgagactacaagatcaaggagttagcgccgccgcgtgagggcaagaagctgcttgtcctggacatagactataccctattcgatcaccgatcgcctgctgaaacaggcacggagctaatgcgtccgtatctgcacgagtttctgacttccgcctacgaggactacgacattgtcatctggtccgccaccagcatgcgctggatcgaggaaaagatgcgcctgctgggcgtggccagtaacgataactacaaggtgatgttctatctggactccaccgccatgatatcagttcatgtgccggagcgcggtgtggtggacgtaaagccgcttggtgtaatctgggccctgtacaagcaatacaactcgagcaacactatcatgtttgatgacatccgtcgcaacttccttatgaacccaaagtccggcctaaagatccgcccattccgtcaggctcatctcaaccgtggcacggacaccgagctgctcaagttgtccgactatttgcgcaaaatcgctcaccactgcccggatttcaattcgctaaaccatcgcaagtgggagcactaccatcccaagaagaactcctgaacttatcctcggttgcaaacatttgttagatttatgttagatttatgtttattaaattaagatgcattttat

SEQ ID NO: 14610 - protein, 320 aa, DROSOPHILA
MEVKEVVVIVKWSGKEYPVDLTDQDTVEVLRHEIFRKTQVRPERQKLLNLKYKGKTAADNVKISALELKPNFKLMMVGSTEADIEDACSLPDNIGEVVDDFDDADEREESVEHSAVYLAKVQRRVRDYKIKELAPPREGKKLLVLDIDYTLFDHRSPAETGTELMRPYLHEFLTSAYEDYDIVIWSATSMRWIEEKMRLLGVASNDNYKVMFYLDSTAMISVHVPERGVVDVKPLGVIWALYKQYNSSNTIMFDDIRRNFLMNPKSGLKIRPFRQAHLNRGTDTELLKLSDYLRKIAHHCPDFNSLNHRKWEHYHPKKNS

SEQ ID NO: 14611 - DNA, 4328 bp, DROSOPHILA
cttgtggagctcggtccgggtcgcggcacactggccagggacgtgctgaaggtgctcaccaagttcaagcaggacgccgaattctcaatgcacatggtggaggtcagtccgtttctgagcaaggcacaggcacagcgcttctgctactcccaccaaaccctgccggaggacgcacagttgccccattaccaggagggcacaacggccagtggaacgaaggcattctggcaccgtcggctagaggatgtgccccagggattctccctagttctcgcccacgagttcttcgacgccctgcctgtgcacaagctccaactcgtagatggcaagtggcaggaggtgctcatcgatgtggcatcctctgatggcgcacaagaagctagcttccgatatgtgctctcacgtagccaaacacccgtttcgagtctttatcgaccgctgcccggcgagacacgatcctgtttggagcactccctggagacggaacgacaggtgggactgctcgccgagcgcatcgaacgggatggcggcatcgctctaatcatggattatggccattttggcgagaaaaccgacactttccgggccttcaagcagcacaagctgcacgatccgctggtggagccgggcagtgctgatctcacggccgatgtggacttcaagctagtgcggcacattgccgagacacgcggaaatgtccactgctgcggtcccgtggagcagggactgttcctgcagcgaatgcagggtgaggctcgactggagcaactgttggcacatgcgctgcccgaaaaccaggagatcattcgctccggctacgagatgctcacggatccagcccagatgggcactcgctttaagttcctggccatgtttcccggcgtgctagctgcccacctagacaaatacccagtcgtcggatttagttagttatctatttaggatctgtttgtagggttttaaatatgttgcacatgattgttgaacaaaagtacgaatgttatttcttctggaatgatgcattgatcgcctgcatctctgcggcggtgaactggagcaccgccgagatggcgttcagcatgtgacgcttgccgtccgcgtcccgggtaacaatgtagctgataataacgttcttcaggtactccagattggcaccctcgcgcgtcttgcaacgttcgagtctagaatgggagtagagatcgtggcatgactttctaagacaacaacgataacaacgacaacgacgcacctgtccacctgctccttgaggcactcgatcttctcgtgcatttcctgctgagatgtcaccttgtcctggatcgcctttcgcagcgtcgactcggcggcgtatttggctttccgcagtgtcgtgatttcgatgtccttgcgcgccaactcgttggcatagtgcagcatgtggcagttctcgcccatcgacattttcttggagcgcacctttagctttctttcccgctgctccccctccacgctgtcggtgtcggaggaatagtgaaaggaatcggcagctgcttcaagtgtgggtgtggccagtgtgctgcccacaccgctggccgagtgaaagacctcgaaggaggtctgcagtgtcttaatctcctgctccttctcatccagcagctgcagtgacctctggcgctgcttctgcagtagctgttccagctcgttcagtttgcagcgcgtctcgttctccagttcagccttggcttcctgccacttggttcgttcgttcttcaatgccaggcgcagcttttcgccctgctgctttagttcgacttccgcctcgtcgatgttgcgattgagcacctgcaccttctcctgcagcgtttggatgtgcgagtgctgcagctgcaccttctgttcgagtagctgtcgctgctgcttggatgcctcgagcatttgctgcacaccctgaagctgttgctcgcagtgggcgtgactctcgactcgggtagctgtttggccgctaaatgataggatctccccgagatccagtggattggcagaacgggcattggctgtggtaagcagtttcttcaagcgcaccatctcgtcaaccagcgtggctacgtccacatcttcgtttagcgcccttgaattggatgttggacgcacatgtgcctgctctagatcctgcagctgctgcttcaaatcatggatgctgtcctgatcttgctgacgcaggcggtcgtagctgccgacagtggtgctgagctccgccaggcgtgcctctagactggccacgcgatcctcgtgcagcgccgcctgcctgcgactctgttcctcggcacgcagcacgcgacgctgttcctgacgaatggccactgcatgctgctccttcagttgctgcatctcaaggcgcacttgctgaaggagagcggcgctgtccgcactcgctgacgctgctgcagagtgctcggtcttggcctggaactgtttcagctgggagcgagcctcctttagctgggattgcaattcccgtagccggctattctctgcctcgttgctggcgaactgggtcttgaagttgtttaactgcatctcaatgttgtcctttagatgccgctcgtccgcatagagtttctgcagttcgcggatcatgagcatttggttgttggtctctttctcgcgctcctgtcgctccacgatccacttggccttgatctcgtccacgtcgcttttggcccgagcagcctgctccttggcccgggtattaagctcctgaatggtctgctccttttgggcgatttggctgcgcagttgctttttatccgcctgaaaggaggcctccatgcgggatttctcagcggaaagagtggccagcgagttcatcagggtgataatttgggtctgcagttgaccctcggccgggggagcaggcggacccggtgcagcgccctcggttgctccatccgcagagtcggtgctggtttttttggactccaactccctggccggcgatccggactcgcccaccgccgtggcctccgcatgcgccgccagactcgtctccaatgcctccttctccttaagcagacccttgtaggcagtgaccacgtctacaaattgggctcattaatccatttgcattgcgaattcatctatgtctcaccttttagacgcttttcatagcgccccagttgctccttttgggtggacaccagcgcctccagctccctctgtcgcttctccatttcgccttgaaagggaattagttcatttactttcagttcgcttagtagttcaatttatttatctcccgtgtcatttttgcatttcttttaattaacaaatttcagcagctggcacgcgggcctgccaacttgtcatgtttgctcaggcactaaaaattgccatcattctgatttaaacttttttttatttttgcggtttttcaaaaaataattaataaccaaatttacataaattaaaaactattttaaatgtaaatgtattataaatcagctgcatagttgctaaattgagatattttcaaacattaatattagtccaattaaagtaaattaaatgttgagcctaactaaatcttatttcattcgccctcctcgtccttcatcatctgctcaatgagtctcttacgttcctcagcttggcgcagctttcgcatgaccaggtcctcgtagtcggtggatgacgcactgcacccagtggtggccgatttggttgtctgcttgtctgccgccggcggcgttacccactcgaagtgcagcggcttggcgggatcgcctttttcgtaggccaagaccatgtcgcaggcttcgcgcgtggccagctccaccatggcgcgtccgcgtcgcttgctgttgaccaccagggccaccacgtcgccgtacttcttcagatacttgagcagctcttgctgtgtgtaatcctggccaggttcggccttccacttcatcttgatgcgatgctgggcggaatcaaactggaccggctgttgctgcagtttctgttgctccgcgtgattccgccggaactgctcctgcatggctcgctgctcctcctccagcagacgggagccctcgcgtcgcaaccgctcgatctgctcatgcagcacctcctcgtcgcttttggccaccgtgctgtagggttggctcttcgccagtttgtgcagtgccgcccgttcacgttcctccagttccagcttcagcttctgccgcttcccgtccagttggcgactcctcagctccgccgccttcttggccttcagcactttgtcataagctgcgcgcgcggattcatccgtgaggatctccagagccttggacaactcatggaagcgctcgactgcc

SEQ ID NO: 14612 - DNA, 2207 bp, DROSOPHILA
ccgcgtgccagctgctgaaatttgttaattaaaagaaatgcaaaaatgacacgggagataaataaattgaactactaagcgaactgaaagtaaatgaactaattccctttcaaggcgaaatggagaagcgacagagggagctggaggcgctggtgtccacccaaaaggagcaactggggcgctatgaaaagcgtctaaaagacgtggtcactgcctacaagggtctgcttaaggagaaggaggcattggagacgagtctggcggcgcatgcggaggccacggcggtgggcgagtccggatcgccggccagggagttggagtccaaaaaaaccagcaccgactctgcggatggagcaaccgagggcgctgcaccgggtccgcctgctcccccggccgagggtcaactgcagacccaaattatcaccctgatgaactcgctggccactctttccgctgagaaatcccgcatggaggcctcctttcaggcggataaaaagcaactgcgcagccaaatcgcccaaaaggagcagaccattcaggagcttaatacccgggccaaggagcaggctgctcgggccaaaagcgacgtggacgagatcaaggccaagtggatcgtggagcgacaggagcgcgagaaagagaccaacaaccaaatgctcatgatccgcgaactgcagaaactctatgcggacgagcggcatctaaaggacaacattgagatgcagttaaacaacttcaagacccagttcgccagcaacgaggcagagaatagccggctacgggaattgcaatcccagctaaaggaggctcgctcccagctgaaacagttccaggccaagaccgagcactctgcagcagcgtcagcgagtgcggacagcgccgctctccttcagcaagtgcgccttgagatgcagcaactgaaggagcagcatgcagtggccattcgtcaggaacagcgtcgcgtgctgcgtgccgaggaacagagtcgcaggcaggcggcgctgcacgaggatcgcgtggccagtctagaggcacgcctggcggagctcagcaccactgtcggcagctacgaccgcctgcgtcagcaagatcaggacagcatccatgatttgaagcagcagctgcaggatctagagcaggcacatgtgcgtccaacatccaattcaagggcgctaaacgaagatgtggacgtagccacgctggttgacgagatggtgcgcttgaagaaactgcttaccacagccaatgcccgttctgccaatccactggatctcggggagatcctatcatttagcggccaaacagctacccgagtcgagagtcacgcccactgcgagcaacagcttcagggtgtgcagcaaatgctcgaggcatccaagcagcagcgacagctactcgaacagaaggtgcagctgcagcactcgcacatccaaacgctgcaggagaaggtgcaggtgctcaatcgcaacatcgacgaggcggaagtcgaactaaagcagcagggcgaaaagctgcgcctggcattgaagaacgaacgaaccaagtggcaggaagccaaggctgaactggagaacgagacgcgctgcaaactgaacgagctggaacagctactgcagaagcagcgccagaggtcactgcagctgctggatgagaaggagcaggagattaagacactgcagacctccttcgaggtctttcactcggccagcggtgtgggcagcacactggccacacccacacttgaagcagctgccgattcctttcactattcctccgacaccgacagcgtggagggggagcagcgggaaagaaagctaaaggtgcgctccaagaaaatgtcgatgggcgagaactgccacatgctgcactatgccaacgagttggcgcgcaaggacatcgaaatcacgacactgcggaaagccaaatacgccgccgagtcgacgctgcgaaaggcgatccaggacaaggtgacatctcagcaggaaatgcacgagaagatcgagtgcctcaaggagcaggtggacagactcgaacgttgcaagacgcgcgagggtgccaatctggagtacctgaagaacgttattatcagctacattgttacccgggacgcggacggcaagcgtcacatgctgaacgccatctcggcggtgctccagttcaccgccgcagagatgcaggcgatcaatgcatcattccagaagaaataa

SEQ ID NO: 14613 - protein, 695 aa, DROSOPHILA
MEKRQRELEALVSTQKEQLGRYEKRLKDVVTAYKGLLKEKEALETSLAAHAEATAVGESGSPARELESKKTSTDSADGATEGAAPGPPAPPAEGQLQTQIITLMNSLATLSAEKSRMEASFQADKKQLRSQIAQKEQTIQELNTRAKEQAARAKSDVDEIKAKWIVERQEREKETNNQMLMIRELQKLYADERHLKDNIEMQLNNFKTQFASNEAENSRLRELQSQLKEARSQLKQFQAKTEHSAAASASADSAALLQQVRLEMQQLKEQHAVAIRQEQRRVLRAEEQSRRQAALHEDRVASLEARLAELSTTVGSYDRLRQQDQDSIHDLKQQLQDLEQAHVRPTSNSRALNEDVDVATLVDEMVRLKKLLTTANARSANPLDLGEILSFSGQTATRVESHAHCEQQLQGVQQMLEASKQQRQLLEQKVQLQHSHIQTLQEKVQVLNRNIDEAEVELKQQGEKLRLALKNERTKWQEAKAELENETRCKLNELEQLLQKQRQRSLQLLDEKEQEIKTLQTSFEVFHSASGVGSTLATPTLEAAADSFHYSSDTDSVEGEQRERKLKVRSKKMSMGENCHMLHYANELARKDIEITTLRKAKYAAESTLRKAIQDKVTSQQEMHEKIECLKEQVDRLERCKTREGANLEYLKNVIISYIVTRDADGKRHMLNAISAVLQFTAAEMQAINASFQKK

SEQ ID NO: 14614 - DNA, 7407 bp, DROSOPHILA
ctcatacacataggaaaaaacacaatataaaggttagaaataataagcaaaaaaggtgctagatatatcaaaaaaataaatatatatattttttaaataacaaactaaattgacagttacatacacgtatgtaagtattgcggcagcgagtgcttccttttgcgttgtttacgaaattctcgccactggaagaaagctaaagaactccgtaatgaatttccagttccagcgaactgatcaccgctattcagaaggctctctgctgcagacgcaaacacacacacaagcaggcaaacacacagggacatcgttaaaatctaaagatggagagactctatttccaatttaatgttgaattagttttcgttgaagccattttttaacccaacaacttttttaagaaatccccgtctgggtaacccgtgcatataaaacccaacgctcgcgcatcactctcttcatttgttacctgaacgttacgccgtgcatttcgatcgtcagctgaatagtacatactatatcatatataatatttcaacgtgtgtgtgtgtctgcgtctttgcgttttgttcgcgtcaaataagtaacttaattgcgattattcgcaacaacaattatcgatcctaccctttttgtttgagtgagtgtattacaataacaaaaacatagaaaaaaacaacaggaaaaaatcagtacaaaataaagaacatcaagccaaaatgacaaaaaataaaaagaacataatcaacaataacaatggcaacgcaaccccgccggacttcccaacaccgccaccgacgccaccgatcaatgccggtatcaaaccgcccggcacctacgccaatggaatgcctcgcaagccgacggttccgtggggtaagctatatactatgtatatactatatatgatccataacatcggatcacttttcacgggcacagagcgcgagttgatgggctcgtttttgctggagatggccagactccaggtgataagcgcccaaacggagtggtacgtggacaaggccaaaatgcgaaaactattcgaggtgcacttgaacgccctgcccaacagtagcgagattcgtcagaagctcagcagtcagggagctacgaatgtaagttgaatcacattgataatgccttattgctatcctatttcctgtacagtgagcactgccaaatgagcttcggtcggggttgccttagaaaactaataaattgcattttgttggtccgatatgtacatgtgtaggtcattctttaaaatatgaaatataatatattaggataagtataatcggatacaaaatgtaaacatgccttaagttgctcaatattctcgacattgcattgcagaccactcgatttcgctagtcaaagcgcgataagactgatttcgtactgtatgtatctatatatgtatgtatgtggctttcctttgtctcgctccagtccaaacattttccccgtattatcagagcaactttacaactatttgcacatacatacgatcgacgtcgtgtgcgatcgcgatttgctcgcttgagtctatgagtcatctgggttctgggttttgggtttcccctgccggattattctttcttttacactcagatgcgcggaatctttgctggtacagcagcaatctgatctaaacaaacgtaatcatttgtttataaattataaacattaacaaatgtacatgcatattttgtatatgactttaagtggatttcaactcaactcaatgctgagagttcagtttaaaaacagaaatattatattgtgtcaagatcgtatatctatagctctattgttgtgacataccgcacttatagcgcattgtaattatttatgccgttaaaatgaagtacatagtaacaagtttacatctcctgcatatgggttttccatttcaaagggatcgcaactcgtttgggaaaacagctttaggaaaagaacacaaaaattagaaaaggaaaatctgtcattgtgtatttctctttggtggtcgtatggtgaaattcgatatgtggagtcaagtgattccccgttttcattggtatttcaatgcccatacatgcatatgtgcatacatacagtgcctattgcgccagtgcaattttctgaccgttgagatataacaatccttttcggcgattgatataaactataacattcgaaattaaatgcaacattttcattagattggctccctgctgcataggacgaactttctaatcaacacgcctcgtggaaaccccaactatcgcatcaaaaacttctccttgatggactttcgcaaggagaagttcaatttgctggacgaacagcaccgattgcggggaatcgcctccacgaccgatgtgcccggaggagcacctgctgagggcaacaaaccgataatcgaaggtagtctatccataattaagaaaaaaaatattctcattatgcgtgagagtttttttgttggcagaatacaaacttgacacagacgtaaagcctacgcttctaaaatttcaaaagaggctgctgctgcagtcagataaagatttcgaactccaatccctgggctgctatatctgccaggagaacttcgagaaaattgagaagtatgaggagcatgtggagtaccatggcgacgagtctgattttcagtccctcaaaaagatgaagaaatagtaagtaaattgaattatatctctacatatgtgaaaaaggttaatgtacaatgagtgcctcctttccgcagtccaacgcccattgtgtccctgtcctatcagacctgcgtggacagccactactttggattcaccttaaagaccttccgcaaggatctggtggtggacaagttcatcatagtgcagttacgacagttttactacgtgtatggtgcacaaatgcctctgccggtgaatgggagcggtgaacttgtgttcttcgtggactctcacgtcttcatgatccttcgggagcagcccatcgttatcgggttcaccattcagggagagaaatatgtggagcagcatcacttcatgcgcacggaggcattgcccaaggctagcttcaacatcaatccctaccggctgtctagcaaggagaccttcaagagcaagggtcttccgccagccaatccacccattcaggtgttgagtgctctaaagcacgaggatgcccagatgtgtttggctagctttgataatcaatatcagaactactgcgagcggggcagagagattacccaggaaaatctgaccgggacactgcgcacattgctccaggtggaggacatcgaacgattgcagcattatctctcgctcaaacaatcagaaatggagctgcatcagttcgggcgggagctttccgtgaaaatgcaaatgggtaccaccagtatgagcgtggaggatatcttatcgcctggcgacgatgtgctaatcataaacgagaagggcaacccgaaatcggctgtacgcaagatgttggaaaacaacaacaacgtgctcgagttggcactcaaggattttgactccatcttgcggtgggctcgcaatgttgacggaatggtcggatctctggacaagcagccacgagtctacttcgcccgcatccttggcgtctcaacgcagcgggttaacattacttgtgaacgccagttaccggacaacaccacctacaccctgatcttccgtccattgcgagcagtgatgcgttatcagtaccgagcacttcagcagctgtcgttcaccaggcacagtgatgttcagcggatcctgtttcccggtgaaattcccaatacacctttggccagtggagtacttcagctaaacaacaagttaatttcgaccaatccggagcaaatgcaagcggttcgacagatagcgttgagcccacgtctaaaagctccctacatcgtgttcggaccaccgggaacgggtaagacctcgaccatcgtcgaggccatctaccaattgtacataaatcgacccgaaacgcacatcctagtgctggctggctcaaatacggcttgtgacgaggtggcactgcgacttttaagggcaatcgccaaagcaccacagagccagccacgaccgctaacccgtatctttagcgccaattgcgatcggcgcattgacaatatcgacgatttgcttctggagtactcgaacatgtacactgtgcacttttatccggccgtgcaagcggtgcaccaatatcggatcgtgatttgcacactcagtttagctggaaagctgtctaccggtggcttcgccgcgaacaatgtgtatacgcatgtgtttgtggacgaagcagccgcttccacggaggcggaggttttgatgggcatcacctgcaccctatcgccgacgttgaatttgattctatccggcgaccacaaacaactgggaccagtgctccaatcgcagagggcgaacgaatggggtcttggactgaccctcttcgagcgactgctgcagaggaagtgctaccaagtggaagaggatggcagctataacgcatcggtgcagacgcgactcatccgcaattttcgttcacatccggagatagtatcgctctacaacaatatgtactacgagggacatcttcggactgaggcacccatgggtgagcgcttgtagttaccatataggatccaaaaattataattcgtattcgtatttcagaaattgtttgtcgcttccacaactggttttacctgcccaatgcgacttttcccatcatgtttcattccgtttttggcacaacgatgaacacgaagagctctgtgaggtctgtgcataaaatggtgtacaaaaccaaatctgatattaatacatgggatttcaattttgcagcctgtgcaataataaagagattgatgttgtcatggattacgtgaaggatctgatgtatttcggcctcaatggcgagaagttattgcagactgatatcggtatcatatcgccgtacaagaaccagtaccaacgtatccaagagcagctaaacatgcgaaactggtctcaaatagattgcggttctgtcgaattattccagggcaaggagaagcatgtgataatcgtttcatttgtgcgctcctttactcccaaacttggattcttgaacaatgaacgggtatgtatttgtttataaaataatagaactattcatgaaaaaaaaaaaacattattccattaaattaattatattgcacacccgtttagcggttgaacgttctgctttcgcggccgatttcgctgcttattctcatcggaaatccacgaactctaagccaaaacagtgacttccaacatattatcgaaatgtgccgcaatcgtaagaccttggttggggagcaataccttaacgaagattttattacgaataaaaagactggggcaaacaacgtcaataaaggaggagcagctggggatcagcctgcatccgggctaaggcaaccgctcaagcgaagtaagtaacgccagcaatttaagtgtcgccagacaaaacaagccgattacaatcccatgtcgtggatgtcggctctttttgcatgataatagcttttaatttgccgattgcttgtttctctggcgtgatcatccttaaattatattatctaacctctaacccgcaccttatcccaaacagagaaccatgcaaagaatccagtccaggacgccaagatcttctacagcaagaatgagctgcttaacctcgggaatgagtgtcagcggaaaaaatctgagctcgaaaccatattcgacgagttgccgaaggttccaaggtctgtggaccacgatttggatgaagttcgttcgatagaggcccaactgaaagattttcaattggaaaccaaacaggacgccgcaggaacatcgattttagttactaatgctccagttactaatgctgctgcgccatcagtaataccaagagcaggattgatgaagcaggagacgcccgctttgcattcttcgtctgtatctagaccagcaatacgaaagccaactgtttcagcagcaactccagtggcaaaatcacgatctccaatgccggaaatcccttcatcttccaagcacccgatttcgatgtcctcaaatccgctctccactaacacggagcgctgtgttaacggagtgctctgtggcatcgaagccgtcccgccttcggagaataagacaaccaggtcttcggcttacaatcacattcccagtggcaattttcgtttcgagaacgtgcgtcccacgcccgaagaggttcgacgcttcaatggtgccaatgatcaacgtcgtgctcgaccatttcgcgagccccacggaaactggtcgaatttcggttggtcaccgccaccacgcgatccaacgcctccacgaaggaacaaaaaattcaactgtatcatttcataattgtggcttctttgggagctcatcacaatctatagggacaacgtgattgcttggccgaacaagtgatctcgctgtcctctttttgactttgctattggcatttgtgcgatctgcgatcatccatgcgccaagtagcaaaaaaaaatcccccaaatagactcgcaactgatgtgcgtccatccgaagaacaaggccaaaagcttgaggctttccatcttcgatggaacgcatcctttgcgagtgtaattgattcgagcaaagacatggagcgctcaaagtgaacacttttcggttgcaaaagcccgacgctttcgagttataccacgaacccattaaccgtagtataagtcgaaagcattgtgtgcacttcagtcttcaggtttgaccttgagtgttataatgaaaatagtattttactgaatagggggaatggggagcaggttaaaacctatctatatttccccacaaaaaaataaacatgtaatccgcacagaatattatcttttgtaacaatttcatatttaagtaaaaacttgctgactccttgtgtcatcggttctgaagacttgaaacaatttgacaatgtagaaaacaatatgtatatgcccgacaaactattttatacttaaaaaaattatctaaataataaattctaaattatcggattacaattcaactgtttatatttttttttgtcttgtgatttggattggatttggcttaggttttatttgggtaggttttgggttttgaatgcatttcgagtaagggtttagataagtatgattccataccaagtaggcctttataacgacttcagtgtcgggccttaagctctatggcttagtacattcgtttttcgttaccgatttcaaacaattgaacttgtaaaaataaaagtattaaagctaactaaaaattttaagtatatacaactgccgcagtaacgcaggataccaataacccattgacgtaatgcattcagccggtaggagcagtg

SEQ ID NO: 14615 - DNA, 3787 bp, DROSOPHILA
ccaaacggagtggtacgtggacaaggccaaaatgcgaaaactattcgaggtgcacttgaacgccctgcccaacagtagcgagattcgtcagaagctcagcagtcagggagctacgaatattggctccctgctgcataggacgaactttctaatcaacacgcctcgtggaaaccccaactatcgcatcaaaaacttctccttgatggactttcgcaaggagaagttcaatttgctggacgaacagcaccgattgcggggaatcgcctccacgaccgatgtgcccggaggagcacctgctgagggcaacaaaccgataatcgaagaatacaaacttgacacagacgtaaagcctacgcttctaaaatttcaaaagaggctgctgctgcagtcagataaagatttcgaactccaatccctgggctgctatatctgccaggagaacttcgagaaaattgagaagtatgaggagcatgtggagtaccatggcgacgagtctgattttcagtccctcaaaaagatgaagaaatatccaacgcccattgtgtccctgtcctatcagacctgcgtggacagccactactttggattcaccttaaagaccttccgcaaggatctggtggtggacaagttcatcatagtgcagttacgacagttttactacgtgtatggtgcacaaatgcctctgccggtgaatgggagcggtgaacttgtgttcttcgtggactctcacgtcttcatgatccttcgggagcagcccatcgttatcgggttcaccattcagggagagaaatatgtggagcagcatcacttcatgcgcacggaggcattgcccaaggctagcttcaacatcaatccctaccggctgtctagcaaggagaccttcaagagcaagggtcttccgccagccaatccacccattcaggtgttgagtgctctaaagcacgaggatgcccagatgtgtttggctagctttgataatcaatatcagaactactgcgagcggggcagagagattacccaggaaaatctgaccgggacactgcgcacattgctccaggtggaggacatcgaacgattgcagcattatctctcgctcaaacaatcagaaatggagctgcatcagttcgggcgggagctttccgtgaaaatgcaaatgggtaccaccagtatgagcgtggaggatatcttatcgcctggcgacgatgtgctaatcataaacgagaagggcaacccgaaatcggctgtacgcaagatgttggaaaacaacaacaacgtgctcgagttggcactcaaggattttgactccatcttgcggtgggctcgcaatgttgacggaatggtcggatctctggacaagcagccacgagtctacttcgcccgcatccttggcgtctcaacgcagcgggttaacattacttgtgaacgccagttaccggacaacaccacctacaccctgatcttccgtccattgcgagcagtgatgcgttatcagtaccgagcacttcagcagctgtcgttcaccaggcacagtgatgttcagcggatcctgtttcccggtgaaattcccaatacacctttggccagtggagtacttcagctaaacaacaagttaatttcgaccaatccggagcaaatgcaagcggttcgacagatagcgttgagcccacgtctaaaagctccctacatcgtgttcggaccaccgggaacgggtaagacctcgaccatcgtcgaggccatctaccaattgtacataaatcgacccgaaacgcacatcctagtgctggctggctcaaatacggcttgtgacgaggtggcactgcgacttttaagggcaatcgccaaagcaccacagagccagccacgaccgctaacccgtatctttagcgccaattgcgatcggcgcattgacaatatcgacgatttgcttctggagtactcgaacatgtacactgtgcacttttatccggccgtgcaagcggtgcaccaatatcggatcgtgatttgcacactcagtttagctggaaagctgtctaccggtggcttcgccgcgaacaatgtgtatacgcatgtgtttgtggacgaagcagccgcttccacggaggcggaggttttgatgggcatcacctgcaccctatcgccgacgttgaatttgattctatccggcgaccacaaacaactgggaccagtgctccaatcgcagagggcgaacgaatggggtcttggactgaccctcttcgagcgactgctgcagaggaagtgctaccaagtggaagaggatggcagctataacgcatcggtgcagacgcgactcatccgcaattttcgttcacatccggagatagtatcgctctacaacaatatgtactacgagggacatcttcggactgaggcacccatggaaattgtttgtcgcttccacaactggttttacctgcccaatgcgacttttcccatcatgtttcattccgtttttggcacaacgatgaacacgaagagctctgtgagcctgtgcaataataaagagattgatgttgtcatggattacgtgaaggatctgatgtatttcggcctcaatggcgagaagttattgcagactgatatcggtatcatatcgccgtacaagaaccagtaccaacgtatccaagagcagctaaacatgcgaaactggtctcaaatagattgcggttctgtcgaattattccagggcaaggagaagcatgtgataatcgtttcatttgtgcgctcctttactcccaaacttggattcttgaacaatgaacggcggttgaacgttctgctttcgcggccgatttcgctgcttattctcatcggaaatccacgaactctaagccaaaacagtgacttccaacatattatcgaaatgtgccgcaatcgtaagaccttggttggggagcaataccttaacgaagattttattacgaataaaaagactggggcaaacaacgtcaataaaggaggagcagctggggatcagcctgcatccgggctaaggcaaccgctcaagcgaaagaaccatgcaaagaatccagtccaggacgccaagatcttctacagcaagaatgagctgcttaacctcgggaatgagtgtcagcggaaaaaatctgagctcgaaaccatattcgacgagttgccgaaggttccaaggtctgtggaccacgatttggatgaagttcgttcgatagaggcccaactgaaagattttcaattggaaaccaaacaggacgccgcaggaacatcgattttagttactaatgctccagttactaatgctgctgcgccatcagtaataccaagagcaggattgatgaagcaggagacgcccgctttgcattcttcgtctgtatctagaccagcaatacgaaagccaactgtttcagcagcaactccagtggcaaaatcacgatctccaatgccggaaatcccttcatcttccaagcacccgatttcgatgtcctcaaatccgctctccactaacacggagcgctgtgttaacggagtgctctgtggcatcgaagccgtcccgccttcggagaataagacaaccaggtcttcggcttacaatcacattcccagtggcaattttcgtttcgagaacgtgcgtcccacgcccgaagaggttcgacgcttcaatggtgccaatgatcaacgtcgtgctcgaccatttcgcgagccccacggaaactggtcgaatttcggttggtcaccgccaccacgcgatccaacgcctccacgaaggaacaaaaaattcaactgtatcatttcataa

SEQ ID NO: 14616 - protein, 1194 aa, DROSOPHILA
MDFRKEKFNLLDEQHRLRGIASTTDVPGGAPAEGNKPIIEEYKLDTDVKPTLLKFQKRLLLQSDKDFELQSLGCYICQENFEKIEKYEEHVEYHGDESDFQSLKKMKKYPTPIVSLSYQTCVDSHYFGFTLKTFRKDLVVDKFIIVQLRQFYYVYGAQMPLPVNGSGELVFFVDSHVFMILREQPIVIGFTIQGEKYVEQHHFMRTEALPKASFNINPYRLSSKETFKSKGLPPANPPIQVLSALKHEDAQMCLASFDNQYQNYCERGREITQENLTGTLRTLLQVEDIERLQHYLSLKQSEMELHQFGRELSVKMQMGTTSMSVEDILSPGDDVLIINEKGNPKSAVRKMLENNNNVLELALKDFDSILRWARNVDGMVGSLDKQPRVYFARILGVSTQRVNITCERQLPDNTTYTLIFRPLRAVMRYQYRALQQLSFTRHSDVQRILFPGEIPNTPLASGVLQLNNKLISTNPEQMQAVRQIALSPRLKAPYIVFGPPGTGKTSTIVEAIYQLYINRPETHILVLAGSNTACDEVALRLLRAIAKAPQSQPRPLTRIFSANCDRRIDNIDDLLLEYSNMYTVHFYPAVQAVHQYRIVICTLSLAGKLSTGGFAANNVYTHVFVDEAAASTEAEVLMGITCTLSPTLNLILSGDHKQLGPVLQSQRANEWGLGLTLFERLLQRKCYQVEEDGSYNASVQTRLIRNFRSHPEIVSLYNNMYYEGHLRTEAPMEIVCRFHNWFYLPNATFPIMFHSVFGTTMNTKSSVSLCNNKEIDVVMDYVKDLMYFGLNGEKLLQTDIGIISPYKNQYQRIQEQLNMRNWSQIDCGSVELFQGKEKHVIIVSFVRSFTPKLGFLNNERRLNVLLSRPISLLILIGNPRTLSQNSDFQHIIEMCRNRKTLVGEQYLNEDFITNKKTGANNVNKGGAAGDQPASGLRQPLKRKNHAKNPVQDAKIFYSKNELLNLGNECQRKKSELETIFDELPKVPRSVDHDLDEVRSIEAQLKDFQLETKQDAAGTSILVTNAPVTNAAAPSVIPRAGLMKQETPALHSSSVSRPAIRKPTVSAATPVAKSRSPMPEIPSSSKHPISMSSNPLSTNTERCVNGVLCGIEAVPPSENKTTRSSAYNHIPSGNFRFENVRPTPEEVRRFNGANDQRRARPFREPHGNWSNFGWSPPPRDPTPPRRNKKFNCIIS

SEQ ID NO: 14617 - DNA, 8278 bp, DROSOPHILA
cgaaaatttgaagctgctgcttgcttgggtggttactgggccagtgggtttacgattaattcaattcaattcaattcaatgcaaagcgacttaggatcttattcgattcgattcggttttgggtctccttgttgagttctcgtttttggctgtgggttaaaaggaagcgctccgctatattattcttattgaacttgactgattttcaatgtatccaacctgagtttgagttgttcgaaaaatatatatatgtgttgtgtatacatattttctgaatttcctactttcattttgtttttgtcatatatatttatacgtttatctgcctgttttgcgttgacctgcaatctcctcatcctttcgctaattattttaattcgtaattgcagttagtatgtgtgttttgtgctcactctatgttttttccatttgtttactttgcttttgcttgaattaaacgcggctgcaattattattatgtattttttgttttattatgttttattgcattttttttgtggcttactcatttctcatggaattcaattaaacgtcaacaatttggtattttggttttatatgttttttttttctttttcctccgtgtgtaagtgttgtgatctgaattaattttattttttgtttttctgttaccttcctttttattgcatttaaaacgtgcactttgcgtcaccactgtcttcagttgattttccatatgttattaattagttcttacttggcttgaaacacttgaaattgctcacatcgtaatttgtttattttttctgttcttcgtgttctttttgctgttgtgtctccttgtgtctatgtttaattatatttaattacgtagtttttctataatttactaactcgttcgacgccctacctgcacacaagactcttaccggaaataatcattaggtaaaaacaatttggagtgcttcagtttcgatttgtctaactccatttaacttagacactaacaagtgcaagatttacataagcgtttaatgctgttttgactaaatgctgaataaaacaaatacaacaaaacaataatcgtaaaatataacacattgagcatggaatggcaaatacaatcgattaaaattaatacaaaataaacatactgttaaaacagaaaacaaataagaggcaaatacaaatggttgtttgtcgtttaacacacacttttgtcattgcgttgcgaccgcagttcccataatacccatttattcttaaattatatagctcggcgccaggcgccttctatcctccagtcctgactgtcatctctcgtagtggttgctgtgttgcttcttcagttgctgttgcttgtgccttggtaatactttaatggtgtgtgtggtgtggtgatgtggcgtgtatctgcatcgtcgtgcgcatctgcatctgtgcctcagtatagggctacgttggaggcctgtgtgtaggcttcccactcgcattcacagccctcgaggcagtcggggcattccagttcgctgtcttgtcagtacagccaggatacgggcacccactgcggggtggtatgcacccggtcgatggccgtctccagcgtggcaatcgtctcgctaatatcgttgttcacaatcgtcagatcgaagaagtgaccgtatagctggcgcagcatctccgactccttggccagtcgctccaggctgccgtcgtactgccgcgggtcaaaggaaagcaattagatggcttcgactttggtctatctataaggatctactcacatctgctatgttctgcagtgagggcgccgctataaacacgacatagggcgtgaactcggcggtgcggagtatttttagtgcctgcggctccacatccaatatggccatcttgccctcggtgtgaatccgtcggatggtgtccaacttggtgccgtacatggcatcctcgtgggtgcctgcaaggatttaaacggatatttatgtgattttcatggggatgtggcatgtgactgagttcgttaccgtattccaagtactcattcgcaccgatgtccgccatcatttcatcgtgcgagacaaagtaatagctgcgtccgttctcctcctcgggtttggcaggtctcgttgtatctaaaataaattgtaagggttatagttataatacttggactgaacgcatctcccactctgtgactgccgaaactattaccttttgcatttggcaagcaacattttcaataatttaaaaactatttcggtataaactacaaattactagtgaagtgcaaataaatttatattattatcaacccattaactacattacatttgcataaacatctttatgttttaaaatcggagtgagcagaaaataacaccacctaaatgtatgttggaaaaacaaggttttatccaaagctagaaatttatggtgattctattttatggcacagaatggagatgaatacatcgatttctgctccattaagtcgaccaattgagccgtatcatatttgcgtggaaaatggcctgataaatcttgataatattagtaagccaaatttgtgtttaagagagcctgttgaatgtgaatttttttccacctagaataagaaactagaatgtagaaacttacgtggtatgggataggcgtacttgtcggggtacttcgatatcaaggtgttcttaatgtgccgcctgcccaccccatgagcacccaagagcaccaacgttttgcgctgaaagttcgggtcgccaactgaaagcacaggaaggacatggataaacaaaagttcacctgtggccgggagcaggaagctcaatgaaacccacctggcaccttgacaacctcctcgtacgtgaccacatcgagcgtgtcgaagatggcattgtgcttggccagatatttgtcccggcattgcttcttcttgcgcccgaagatggagcagttaactgttggttataatggagaatcaaatgttattgaattgtttcattagatggacgatagagctgggtaagttgagagcagcatgcttatagagcaggcataaaacatgctgtacatcaggcattggataagttcgagcatgaagcaagcacgattttgcttagttatgatagatgagatcatgatatcattttggatgatatactaattttatattaattccatcccttggtcctttttacccttcctgaactagaacttcttcaaattggatatgcggtgttctttcagccagcctaacgtgcagtgttgtgaacatgtgttaatgtattttaggatcattaaagttttttggtggggtattactttttgaggattgtaagcgggtagttcaatactatgggtttataaacaacgatgactgaggtgcatctactgtttcagatggcgatcgtgagcatgaggggcgcttctacgcgattccttggatctggaactgggtgggtcggtggtgccgtctacataagctacaattttcgggcagtcgggtggttgggtggttgactggtaacgggcgtgggtgtgggggtaattcttaatacaaaatggctatcgatagatattctgttgttgtatagaacgagtagtagtttgtttgtgttgtctggtttttgtggcataacaaaacgattttgggcagctctccattcggagattcgtttgatttttgtggtgtggtggtgtgtggtggtttttggttatatggtaactacctgctgatccatcacacccatctgcgtgagcggaacatccagcacccggttctcctgcattatattatcatacatacatagtttatagaaattctttggcttggttcgagatgcgagattcatggttagcaaactaggtattagagttttgtacaggtgtgcatatgtcggtgtctttgggacttaggatttttgggtctgagttttcaagtagaaatttggcagcgggaggggctttccccatttcggttggtaaatttgaaaaggttttccttcgactactttttggggcatgcaactctctgtaagtgttagtgtacagatgtggctgtcttctgtgggtggcgcgtatgtgtttctgggtgggtacatgtgtgtgatagagagatacataaagagagagcgctttcccttttcggttaactacgagttcgtcatacacttccaatataagtacaattattcatatagcattcgattgtttgattatatcgagcatccaattacacatagagaacacggatagtttgatttcgagacgcctgccgctggccaggatcgtcgcggtcactcaccctgctcctgcttggtcttgtcgaccgtctggcaggcgatccgccactcctgcagctccggcgacggtatcagtccggccgatccgcccaccgtgtccagtcgcgcctgccaccagtgatgatcgtccttgctaataatctgcaacaagatcgcagtaattacgcgattattatcggaaaatactttaaagtagtgagtgccatccttcctacctgcagtatatcgcccacttggaacgatatgcccgcctgggcgcagggtataagctcatcatccagcggattataatcgaattgggcgcgcacgaatatctgcgaatgcaaaaggagatagaaaatgtaccagatgagcacgaggcgagtttaaatttgcaaatagttgcttgcaggtcgatgattcggttttccattaccatttctgctcactgttttctgccatttcagctacttttactcagcaactgcaactgtgttgcggctgcctcagcgaaatggctttggcattcggtttgcgaattacatgcaaaactcatttgcatgtcaaaagcagccgagcagcagccacagcaacaaaatcggtagcaacaaagacacaaacaacaatctggcaagcagatgtctcacaatgttagatgcccttacgaattgaaaattataatgccaaactctatacatataagaaggctcgggcagattatgttgatggcatataaactggctttatagttggataagtttggttcatttagaatgttgcaatttaaatagttgcacacaaatttcaaactatttgattgtacgaaacagtttatgaaataatggtctgcgaaaatatttgaaatgaaatcaagtgccaacatgtaactttttgcaaattaaaatgccgtcaagtggcaactgtttagaacaaaacttcggttcataatcacagcacatacatatccccaaacagggcatccaaaacccgcttgccgtatcgttgttgttgactaagtgatgaacataaattagacaaatttacggctcttgtgtgagttgtgccttttgacttgtctgtgggttaatgaatatgcacatctaccgggatgcctcggttatggggggggggggggtatcaatgggtgttttcgactaaaagtaatctcgagtgggtgtgtggggccctgtgcgtggcccgtgctttgtgttttgtgggtggtgtgtggggtgtgtgtggtgtgtgcgtgatttcgtgtctattgtggggagcgtgatacttacaagcaccggagcgggtctgatcctgaaaagctgcatggtggcatgagtgggaaatagagaatgggggagggggaagttggagaaaggtcggtggaaaggagcagattgagagatagagaagtgtggagttgtgttaatgcactgcgaaataattgcataatggattatagctacaactacaaatgcaccgcgaacggttcgtttactcaggctaactcatacataatgtattgtatatggctcatccgtacgatttacaatactacctctttacattataatgtgcataatgcactcgaccgaattggttgtgtttctggggccgcgttgctttatttttggggagagaagcggggcgcccattgcaattctctctaattaatcccttttgatattttgatttctccaaattgacaaacaatacgtgcattccgcttcatcgcatctcagaactaaatgcccaagccgaaggagcttttcataaaggatttaattatgcgaagttaatacgcaacctacacctatagcctttcttattcgatgggaaaagtgtaagcctttcgaacaatgcaattcattttaagcggctaaatcgctactttgcttaaaatttaaataactctttattgttttaagatattttctgtagtctaaatagtaacaaagtacaaatgacgaacggaacacataactgaaacgcaatgagaaggtattgccatgactagtttacagtttcttgtatgattagtacgatgaattcttaaattacactaattatgtatatacactaagagtgggcagtattccaactagatgacttacctcgcaggggggcggagcgctgcggtacgaaggaactatcttgaaggtaacagaaccgcgtgcctcgcgctgcaatagaaggattaaaatgggacacattcaattagcgcgtgaacaaagacagaacaggatttgggcgtaatgggatgaggaagagcaagtgaaagtggaaagtggacgattgattggcgggctcaccagcattcgttgcaattggccaaccgactggtgctgcaccggctggccgttgatctcccgtatctcgtcgcccacgtgcagcgtggcctggcgatgaatcatcccgccgtgcataatcctggccacaatgcaccgcccgtcctcggtcatcttcagcgtgatgccctgcaaagggattagattcgtttagtcccatggccagcgcaactccccgtaggcacattcagcttaccatgggctcgtccgtgttcttctgaaactgcaccagtcgcacccgggtcacatgctgcagttcgccgccctcgacgttgtccagctcgtcgccattgaggtagggcaccatcgggggcggggtgacgcgcagcgcctcctccccgtagacatcccgggccaccacatcgtggctatggagcagagcctgcaaaaaggaaacacaggtaaccaggttatatgggacttcatagtttgggttagtgcagttgcacaactagacggaaaattattctcttttcctcttaatgcagacgggattaaaatgccttttaataagctttaaaaacgaacccattttccatttaaacgaatagttttatattatgctctgtttagataatgtggtgacggaaagtagctatttcttattgccattatttatggcataataaaactattaaggatgagaaaattcaaacgtttttgcatggatattgcattatggcatgagttcatccttttttggacccggaacccggtaaatgggttgaaagggaaataattttgatttaaacacatgctagacatatgaaacccgctcatcgtggtgcaagcttcggtttagggttagcctaaattatggcaggcaattaagctggccgttatgagcttcgtcctggccatgtggaagggctcgtttggctgggaaattaaatttccgatttgccacgcctgccacatacatcataacgcccaaatgggggactcccgaccgcacggcacaacttgtttacaacattaactgtgcgacatttgttgctcagccgcacagttttggggggaaagagcacggagaacaacacaaacgagctggataaaaaacccatggcatctagaggatgaaacacccatttccgaaaagccgttaaaagcggcgacagccacaaacgagggcacgcacatgaccccgtgaccccatggataaccagggataaccgggcaacgacaaaaatctcaacaatttatggcaagctcctccgccgcaaccatcgtacaactcgacttggcccgacttgatacaatttcggttttaataaattatgtttaataacgctttgaatatgttgcgaaattaatttttcttgcccttgccctctatcctgccccacatcctggcggaggaatgtcagaaaaaggagcagaccagatcctgaagctgaagctggcgatgctgctgttgctgaagctgaatcagaatctgaggcattgggctaggccataaaaaaggattttactgcgatgccatgccgtgacacttgtgccactcgcacgcacacagacgcacagcagggacgcacgcacagcgaaaagaacgatgtgctcggtactcaaatttacactgatcaaaacagcatccagcagcgaaggaaatatttgaatattatgtgagcagtaaaagttggaaaccagatctcaattacagattggcttaatatttta

SEQ ID NO: 14618 - DNA, 1905 bp, DROSOPHILA
atgcaatatccatgcaaaaacgctctgctccatagccacgatgtggtggcccgggatgtctacggggaggaggcgctgcgcgtcaccccgcccccgatggtgccctacctcaatggcgacgagctggacaacgtcgagggcggcgaactgcagcatgtgacccgggtgcgactggtgcagtttcagaagaacacggacgagcccatgggcatcacgctgaagatgaccgaggacgggcggtgcattgtggccaggattatgcacggcgggatgattcatcgccaggccacgctgcacgtgggcgacgagatacgggagatcaacggccagccggtgcagcaccagtcggttggccaattgcaacgaatgctgcgcgaggcacgcggttctgttaccttcaagatagttccttcgtaccgcagcgctccgcccccctgcgagatattcgtgcgcgcccaattcgattataatccgctggatgatgagcttataccctgcgcccaggcgggcatatcgttccaagtgggcgatatactgcagattattagcaaggacgatcatcactggtggcaggcgcgactggacacggtgggcggatcggccggactgataccgtcgccggagctgcaggagtggcggatcgcctgccagacggtcgacaagaccaagcaggagcaggttaactgctccatcttcgggcgcaagaagaagcaatgccgggacaaatatctggccaagcacaatgccatcttcgacacgctcgatgtggtcacgtacgaggaggttgtcaaggtgccagttggcgacccgaactttcagcgcaaaacgttggtgctcttgggtgctcatggggtgggcaggcggcacattaagaacaccttgatatcgaagtaccccgacaagtacgcctatcccataccacatacaacgagacctgccaaacccgaggaggagaacggacgcagctattactttgtctcgcacgatgaaatgatggcggacatcggtgcgaatgagtacttggaatacggcacccacgaggatgccatgtacggcaccaagttggacaccatccgacggattcacaccgagggcaagatggccatattggatgtggagccgcaggcactaaaaatactccgcaccgccgagttcacgccctatgtcgtgtttatagcggcgccctcactgcagaacatagcagattacgacggcagcctggagcgactggccaaggagtcggagatgctgcgccagctatacggtcacttcttcgatctgacgattgtgaacaacgatattagcgagacgattgccacgctggagacggccatcgaccgggtgcataccaccccgcagtgggtgcccgtatcctggctgtactgacaagacagcgaactggaatgccccgactgcctcgagggctgtgaatgcgagtgggaagcctacacacaggcctccaacgtagccctatactgaggcacagatgcagatgcgcacgacgatgcagatacacgccacatcaccacaccacacacaccattaaagtattaccaaggcacaagcaacagcaactgaagaagcaacacagcaaccactacgagagatgacagtcaggactggaggatagaaggcgcctggcgccgagctatataatttaagaataaatgggtattatgggaactgcggtcgcaacgcaatgacaaaagtgtgtgttaaacgacaaacaaccatttgtatttgcctcttatttgttttctgttttaacagtatgtttattttgtattaattttaatcgattgtatttgccattccatgctcaatgtgttatattttacgattattgttttgttgtatttgttttattcagcatttagtcaaaacagcattaaacgcttatgtaaa

SEQ ID NO: 14619 - protein, 461 aa, DROSOPHILA
MQYPCKNALLHSHDVVARDVYGEEALRVTPPPMVPYLNGDELDNVEGGELQHVTRVRLVQFQKNTDEPMGITLKMTEDGRCIVARIMHGGMIHRQATLHVGDEIREINGQPVQHQSVGQLQRMLREARGSVTFKIVPSYRSAPPPCEIFVRAQFDYNPLDDELIPCAQAGISFQVGDILQIISKDDHHWWQARLDTVGGSAGLIPSPELQEWRIACQTVDKTKQEQVNCSIFGRKKKQCRDKYLAKHNAIFDTLDVVTYEEVVKVPVGDPNFQRKTLVLLGAHGVGRRHIKNTLISKYPDKYAYPIPHTTRPAKPEEENGRSYYFVSHDEMMADIGANEYLEYGTHEDAMYGTKLDTIRRIHTEGKMAILDVEPQALKILRTAEFTPYVVFIAAPSLQNIADYDGSLERLAKESEMLRQLYGHFFDLTIVNNDISETIATLETAIDRVHTTPQWVPVSWLY

SEQ ID NO: 14620 - DNA, 14091 bp, DROSOPHILA
attctttattggaaatcttcacactacaactatctgctgaaacttaaaaaccttcatacatttacacatcatatcttcacaaaaggctccaccctcgatcacggacttaactcgcgcacaacaaaatataaataaaactccaatgtcaccgagtcgagttgataaaaagcatcgctaaaggccttttaattgccgctgcagtcgataaatcatcaaacgggaatatgaaagcatctcaggaattcagtgcgtaaaattagaatgcaacaacaacagcagtagcagcagcaacaacaacaacacgcgggcggaggcaggaaagatacaaaatagccaaggagccaatatacatacatatacatgtacatatacatccacgtcgtaaagtgcgtctctctcttgcactctctctctctctctgtgttagagctccatctccctctccccacagccacctacttcctgcacatatgctgcgagcaacaacaacacaacgtgctcctcttggggatgctgtgtgcgagcgagaaagagagaaagccagagagaacggcagagtaacttcgaatcaaagagcgcaactacactcgtaaaaattattacagctgccaagttaaaagctattacatcgtaataatgttgttgtggaatttttttaaaacaaatataactttttataaatacgttacatttgaataagatataattacgagaaggttagggaatatattgttatttaatgtttttacaatagatttgcgttttactctattactattactctaaccaaactaaaaaaaagttataggaatctttaatgaaattcctttattccttttgtttgagttgactgataactgaatttccaccctaaatttttgcgttatcgttttcccgtttagggcatccatttctctgagtgcagggctcagtcatcgcagccttttcgccttggccacgaacacacgtctcatttgaacgcgaaacgccgagtcaaacggacgcagtcgctcgtcgcagtggttgttaaactcgagtttcgtactttcgagcgcgcgtattgaaacataagtgagcgatcgtgtgaacagtgatataaagtgcaccgtgtatgcgggatagagatacctaacctagtgccacacgaaagttgaagtaataccagcaggatatctactcagttggcagtgaaaagcgtggtgaagtgttcggtcataatgagtgtgtgagcggggacaagctgacaaactgaatgcgataaggttacagatgtcctaaacacacaggcactggcacacaaggattcccggggtcctggtgacatgtaactggatccggatctggatacatgttggctcctaagacaacagcccgctcctttgcctatcgtctggccgcactgcagaaacgggagcaacaaaagcgagacaccgggtaagtagcgatgcttaactataataagaaacctgtcccctcggacaggataaaaacaagccgcacacacagtagcacatgcggacaaaggggcgcactgcagtggtcgtccgatgcttcctgcgccgctaagtatgccactgcaatgctattttaaggtgcaaagtgcattgagtaggaggaggcaaagtgccagccagctagccctaacccacacacacacttcgcatagacacacatgggcagtggactacggcgacaacacacaaaacgtattcaagtgtaactaaagacgaccaattcacaaacaaacaagcgcgccaggagcagttggcggatgtgtgggagggagggagttgggggaaacggaaccgactgaagcggagcggagcggtcgaccctcgaaccgtgtgaccgcggggcaggagggggcggggttctgaagggacgacaggggccgctcgctaatgtttattatgaaaagcgtgcccttttgaacgccatcgtgtatttttatttttatttgtattttatgattgcgcttagccatgtgtatttgctgtgagtggaactgtggtgagcgctagtgcacaggaagaaaaagatatagacttggttttttatttgaggttaaagggagatcccatttcaaagcaaaggaaaacaattctattgaaggtttcgattaggagacgtttcgttttttgaaatctgaactctacactgtggaattattgaagttcataccatgtttggtttacgatcaattaaaatgggatacattatacatcatgaatactatgtttggtttacgatcaattaaaatgggatagattatacatcgtcaaatgataagacagtttaaaacaatgattagtgaatcatataatgtgtattgaaaccttttcgattggaatacgattataaaatccatctaaaggcctgggaataatcccccgagagctcttacaaaccattctcgatcgattccgagtactacattttctctcagtatgtttatttatgtttttcttgtcacggagctggatcagagggggtgaaggggcggctgtcgagaggccctcatgtgagtgcagcactcaattcattgataaaagatgcagctacaattataataataataataagaactccggccaacgggatgccgccgcgatcaacatgccgcaattacagttataatttgggcccgtaagcgttgttcaaatgtaaattcaaatgtggatgaattgcaattaccaaccctccgcggcgacaaacgttggctgcttcgctgagtgggggtaacaaacaatcgccaattggcatataatgatcccctttggacgtcgaaacgtcctaactgactgactgacgtaccaactggctgactgactgactgacagtcggacgatatacatacgagtatatgcgccatgaggtgggtatggtaaaaagtggcatgggactcagacaaccagcagcgacattcggaacaattctcaggccttgacaaatgcacgtaatgattggactcacactttggtttctgcttttttaacaatttacgcgcagctcttactcttaccccttcttcgctggttctcacactcactcggcctagtcataattttaggggttgtgcaacccggcacagtaatcgaaactcaaacccaaaaactcgtagatacagatacagctgttcgccttgatgggcaaacaagggcttggaggtagacctccgcccttcgactttcgatttttcgggacatgggaacggaacgttgcatgaacatcttagactcctgcggtgattaattgtcattccagggccctacagcatatgtagaggccactcgggctcctatgtatatgcgttatgtaggatccagggttcagggtcttaacactggattagatgtcgatcgaagtgaaagaataggctcttttcagtttctttcggcaactggctttgttccgagcctaggtagctgatgttggtaagggcttagcgtcgtaaatcgttggattgaaccattccgatcgatggcggagagaatcggtagggcattaacatgcctaggtagtagaactttctatacgccagactcttatcattgcatcttcgacatgcgtaggcaatacgtttgctttccatttttctctggctatcatcagctggcatcatgtggcagtagttttggcaacataaattaggccacgggcatcatttgttacaaccggacacattagaactttgctaatacgatacaaatgataagggcctttcatcagttgttcagtttgtgctacttatgccgctgatgggatagaatcataaataatttgtttattgcatgcagagggggtcacaagtatgctggctacgattgtatcttgtgtatgctgtgtatcttgtagtaacatgagcctgtgtagcttggcccataactcatgcttgaaacttttgtttctacttctatttaattcctcgacaattacgcttaattaatttaaagatgtttgttgccgttgtcgtgctcgcatcccccgtcgagttgttcgatcaattttgagcagttatgacggcggctcggccatgggggaggattttttaaatagattaattaaaatcatctttaattgtttgattacaaggcaagcgcggcccgaaaaaaatgcgaagcgaacgcagatagctcacaatagctgctttcatacgttctcaagttgcggagtgtgtgggcaaaatgcgcaacatgtgaaatacagatgcctcagagttaccagcacggtcccttgggcattaaagatttcatttgtgctacagatgttccggcgattgtacaacataactacaaggaggagtctcacgcaattgaggcaacggcatctgccacaaccacaccaacactcacagccacatccacatccacatccatggatccatggttccacttcagcgcagtcaccaagcgactggcgcagcgtttcgagtggcatttgattttagtgctcgagagtgtgtgtgcgagtgcttcagaagtataaaaattattgctgccaagcaactgagtcagtcagtcatcaattattttatagaatgctcacttgttttgtgtgttctggcattgttccccgaccagacccaatctccatctccccgacccatttcggcatccccatgccccgaaatgccaaaaccgaatctgtgttcttggagttcacttggaagttctcgttcggtacaggaagggcttctccgccctctacacttcacttcactgggactccggcaatagttgtgaaattaaattgaatacgacgccgattatcccacgcagtcttccattcgcatttcccattcattcaggcaggcatccacgggctgcctaggaagcaagtgctggcgacacaatctcatcctcatactcctccgcggaatccgagagcttgggaaatcatcaaagttcagcgggacttcggtggcgtctcctgctcacaatataagatgattacatgcacacgcaacttgccgtatctggccataaatctcaaagagtgcacagggaaaaaaggatattaatatatacaaattatgaaacggtatagtgtttctactgcgcaaggctttaatattaatagacatgaaatcaattgaaaaatgtataaaattcttatctgaaatacacgttccttgacgcagtattccgttctatgtaaagaacaagaaatatcaccaatttggcagaagttctaatatttattttaatattttgtttaaaattctccttttctttgattttttcgctcagtgcatgtgcgtgtgtgtcccacagtttgtcactcagtcattccattcagaggatgaggaagtggatgtagagggggttttcgccggatgcttgcgtgccaaaatcaatgcaggtttttttatttgtcaacgacaagtttgcattcaataaataaaacccattcgattataaagtacacccgcagacaatgaaatgtcgctgataagcgcctcttacaatccatttggcctacttcagttcattaaaaatctattaaaatgtaatgtacaataccccacctcccctatgcatgaagctttcggtccgataaggcagacagccatccaatcgatcgaatcggggctatttaatgtgcgagactttgattaatctcgccatcagttcggttgttcccttgtcatgcggaatatatgtacatatgtacagctatctgtatctgtctgcaattcagcattattcttgagagtagctgcagtaataaataagccatgtttgtaagagctgaaaatttgttcgattttcgctgatggcgatatcgatttagtttagccgaaatgtaatttggctaagcagcccggcaaacaatgtggcccaatatcggcctcgtcaaacaaaggtctagacaaatcgaaaacaaaacgaacttcaatatcccatctataattgaatgcacacacaaaacaaagcggatagagttggaagactattataatctggtcagttacatgagcaccgcccgcccacacactccatatccacaaatatagcagatatgagatagcacatagtatatatggcatatatggcatttaccattactattaccccaacccatccacacacaaaggagaatattgacagacactcaagtgtccacaagcaccctgtaaatccaattgaattacgcataaaggcgcttaagccgaacgaaacgagtctctcgatgatgacgacccatcaaatgtatgatttccctttaacttctgattacccgatattttattacgtttcgtggtcacgccggctactgggtaccactgatttggtgtagctatggagctgtggcgcatggatcccccaataataatcacttatcgcatatcagcgtttccgcaaaatttacatatcgacttttacttgatgcgccttttaatggcccacgtcgacggcaataaaatattgagagactgagcgtgcgggggcctttgagttttaacttatgcatgattaatacataattacaaagacaaacgcataaactccaactcaaactccagctctaagtgaggcccaaagaggggggccggacttatcgcggtattcgtgcaggtatgcctcctccatataaccatttgccactccaacgtccaccacaccaccacttaataactctaaaagacaaaaggcacttttcccacagccaaaggcaaaggcaaaggcaaagcccgtggaggagaccacgtcctgaaccgagccaagctgcctaggtgcccggagaactgcagtgtggcggagcatacttatacctgttattaatatttcgattaggtaccaacgattcgtagaacctgacgcatgacttgcatggctaatgggaaattttgtaacttgtgaccacgctgccctacaatttgtgggtcgtcggacggggtcgtcggattggtcccctgattgatggagacaactcatcgattgtgcggcgaggacaggaagtgtccctaagtgcagccgatacatcctcattttcccatagatcctgacagtagattggaatctgggcctaccttcgccaggaaatgatatctaaactcatgcgtacaactcgagatagtttcattcgtgaaaggagcatattttttgaccttttggaagggtttgttgcgtgatcatttcatcttctcttcgcagacaccacccttaaaatattgttgattctgggaaatgtgattgtaagcagacacctttttcttccttactcataaagaggatttgcgtcataaaaaagcaggtgtacatctgagggttccattaaatgtttgaataacactgtaataggatatgcagcctaaatacagatacaggttagcaatatctacaacaaaatgtaacatgatgtttaggttaggttctataatgaatgaattcaatataaattcactgaacagcagatttcttaggcaatagagtgtgtactagtcgtctcagatagcaaaatccaagtgcaagaccataagtttgttaatgctgagcgtgtgcgtcaaagatatgaacagtttagtcaaaccgtggacactttcgtggcttgacagaccgctttgtaaataatcgccttatggccaagtgcgcaaattgcctggtcgaaggagcaaaagtaaatgtagctaactggcgtttcttatctgactttccagatcgtattcaccacgtgaacaaagcgagtgtgcggctaatgctaatgccagctccttcagctagctcgccacatcgccagcagcagcaacaacaattgcaggtgcccctgcaggtgcatcagttgcacaggaagcgccggacaaagggacacctacaccaccttcaccatctcaaccacgaaacgacaggtcaactgacagcgaagcatggcggtgattaataaagccggaaatgtgattgccctcctgctggttaagcttcagctaatcctgctgttcacgctgtcagtttccggagagttgccgcagctggactacggcagcttgtccgcatccctggaggaggatgctattgacccactcacggcgatggcacccttcgccaactccctggtcaccgaagaatcggcgcagcacaagaacaacgccgagctgcttggcaatagcagtgaggatgagaatgtgagaccgcagcaagggtcctcttcctcgggactaggatcatcgggagcagcaggtggatcaggcatactgctcgaggagtttaacagcggcaaactgagtcccggagaggcgagtaatacgctgcccatattcctcatcgagccggagagcgtgttcgtggtcaagaaccggccggcggtgcttaagtgcaaggcctcccactcgctgcaggtgatcttcaagtgtagcggcagttcgcaaccaccgccgtccacgcacgaaactcacgtggatccgcacacgggggtcaacatggaggaggtcaccgccaccatccaccgcgacctggtcgacgagttcttcggcgacggacccttcaagtgcgagtgccacgcgtggtcgtcgcgtggcgtggtcaagagtcaggcggccaccgtgcacattgcttgtgagtacactgttcaaaaagttgtagtttacaaatttattatgagcgaaaccttatcctaggattttcgtatcggaaaaaaagttaaaataaatatttattctacaatagttaattttccttacgaatttttgtttcagtataatggcatgcagttgaaaatgtaatttttgtagttaactttgcacctttgttcgggggtggcttcctgtcaacaactgaccctcgcttagcttacccctatctgtatctgaatctacatcggtaacctgcatctgtccgtttaacccccacagatattcgcaagtccttcaaccagtcgcccacctcgctgcgcctggagctgggcagtcgggcggaactgcgctgcgaaccacccggcggtttccccgaaccgaagctcacctggcacaaaaacaacgcggtcatcacggcggacagcgagccggggatcaccgtttcggccggcacactcatcttccgccaggtggccctgcagcatatggccaactatagctgcagtgcggagaatatcgctggcagacgcgtctccgattccgccgtgctcatcgtttatggtcagtacagatgggctttggggcaaattaaaaatttataggtttcatgctgtaaattccagaaagaaaccccatttactgggggttctcggttttaatcattttccatgaaattttattaaatttattgctaatagaactgaggaactataatcattttacactaatatactcttaaattatatggccaaaaatcgcatagcaccttaaatggagtagcgaaaaatcatttggtattgcaggtcgataaagctcttaattgttttattttccgttttcatcccacagtcaacggtggctggagcacctggagtccatggcgcgaatgcaagtgtgcgggcaagcccagccagggaaggaagcgttcgcgcacctgcaacaatccgatgccattgaatgggggcgcccagtgtccgggcccccagatccagaagtccgccgactgcgccgcatgtccaggtacgttcctgcggtcatccgcaaaattgtgggcgcatcgaattgcggccaacacgcccattatacgggcccattatatgtgctgctgtggggtttttggggggaaaatgggaatgggaaaatgcttaaaggcagatgttaagcagaagccaaaattgtcaatttaaatggtattttgcggccgggattccagcttgggcgccacctgaaaatccccatctggttgccccgctgcttctgtcgatacatctcccggagcgtcgagaacaacgcgtatttttcacaccagggcggacatgaggataccaggatggtgtggagtggcaaggactgcccaaaatacaaagcactgcacaacgcaaaagttcagggggcgtttcacaaaaaaaaaagatgagaaataaaagacaagataagcttttgagggtcaatgcgaactagacatactctaaggacctcagtgaattatcataatccgaaagggagcggatttacctgaatgatgggagtggcattgggattaatttacaaagtacaacagctgaacgaaatattttaatattaaatttatttaagactaatccgcatggttcttacaaatttctacagatttttatcagcaatcaaagttactagatgtcaaaatattttcccggtttaaagttagtctcattataactttttgacacaccttatttcaacaattagcgataactatttcttacaataatgagtacatcaaaaaatgcctatttcaagattaataacttaatacccactagaactaaatatagaccaaccccagtacatagtcaacatgccccgaccgaacaatggtataatacacttttgagtgagtgctgagtatttcattttaaacacgcattcggttcctcggaccgacgacagatatctccacatgcgagatgcgtatatagatggatagattgggccgccgcctttggcagtggggaacgcctgccgccggcgtgccaccgactaaatggtgacaaaggaatgaatccgggggaaggcagtccagagacttggtgcgactcagcattgaggactggagatgtgaggatgaaatctggagtggagtggcatggaatgggtcggacggtggtagctggggcgctctttttgacagacgcacgggcggcatgtgtttgagactcttcacttttattcatgtaaatttattgtattgcattgtattgtattgtagtgctcgcacagatactcacccacacggagatttcgtaggatacttggccaggcgcacagcgggcacagcaatgagcaattgttgacagacaagcgggccaaatgggtgatgggaaatgggtgggtggactacgagtatatactgtgctccagaagggggcctttcggtcgtcaagagggggacgccattgtgggctcgggtatttcttttctatgaaaagtgtgtcataaaattaattttaaatttcgcttggctttcgtttttcttccttttttttttttgtccccggacgacttttcatccccatggaaccgtgtcaaccttatggtcctgccgctgccacgcccaccaacgccccgtgattacgctgtcgctctgacgtcccgtcgtcctgacgtcccgtcgccatcgtcgccatcgtcgcccgccaacaacagaggacactcaaatcgtgagccctgatggatttgacatttcgtcgagtaagcgcagtaagttgaaccgaaagcccgacaatatgcatttccctcaaaggcttccgagccgtttcaggatccaatgggatggggctactcgaatgggtggatgggggttccaaaggattcaatacatcgacattgtgttcgagcagttaaacttgaatgtttaacgagccgacgacagttaaattttttagttggggtcgcctcgctatccactgggtccttaacaatccaataaacaatcgtgttaacccgaaccggaggcatcagcatccaaccaaccgtggcgtcattcgtttcgggacttcccccaaaaaaaaatcctccgcactttaactgactttaactgaagtgacttactttgcgacggggtagttgttggtgacgtcactgcggcagatagcaacttaaaaatcacttaccacgactcacgctctctgattcatgcaacagtctgagtctgggtctgggtctagttctgggtctcggtttttggctggggtcgaaaaggatacgtcctgggatgggtattgacaggcgggatgggttggggatcaggatgcgcacggcgtggcagcggggaaaactaaatgcctggcaatgtgatgatggctggcgacaagtccggaattttgtgcgccctttctgagggtggttttatgtttccaaaacaggaagtgccaaatgccgatgtatttataccaggatgtgcgcacacttagcgaaaaactagcccaggaactaaatacataattaaaataaaccatcgcagacatgtggaaatatgaatattattgcaaaagaagtaacttaatgaaaacattttgaattcgattaaatcaaaccagagaaaagagtgtacacatatgtattatgtttataaagtaggcttgttaattgtatctgttttcattaagaataacttgaataacttgaatcgctttgaatagattcaagtcaacttctttttctcagtgcatagctgtcgaacatatatttcagctgccattggcatgcatcacaccatggacatttttggctttttgtttagctttcggactttccgctttctccccctcatttagtggaaattgaaatagcaaagaaaatgcgaaaatagaaaagcattaaaatgacaatcacttttactcacccacccacgcagaaaccagcccaaaccaaaccccacaaatcaacagaggcgtcgtcagtggagttttgggggttaagaaaaaaacgggaaatgggaatcaggagtggaggaagacccactaattttatggtgggaacaaactttcgatttctccccatggaccatctattagaccgtaattgtgcagccggagaagctgtgaacaaagggggggggggggggttggaatgccacgtccatggttgtggccccgatggtcttgatatatgacccggggagtgccgctgtcgggaatgtgtgctaaatcatgttaatatgacttttgatttctaaactgcctgtgcttttgcctctgctcttccatttacagtggcccgctggtcggcgtggagtgactggagcatctgctccgcggagtgcattcaagtgcgtcgccggaagtgcctgactcagggccagactcagatttcctccgaggcggaggaagccggtgatctgctcctgggagctcccggagtgggcatggccgccctcatcgccgctgcaggagtgggcgcagtaggaagccccagcgaagcgactggctccagttccgacattatcccgggatatggcaaatcattgtgcgccggaaaagacatacaaacggccgaatgccgcggcgaacagtgccagattggcaaggatggtaagtctgtgctcatgactaggatgaatgcctggcaggatcaacaaagtagacagttagacaacaataacagcaaagccggagtgcagcatccacaaaaccagaatcccagaatccctcgcacaaaagatgagcactcaacgctgattgtcacaatgggaaattaaccaagtgcatttgtttgtgcacgaccacgggcttatttatatatatataatggaagtatagatggtatagaaagcatggccaggacatttcacttttcaccccaaaggacccccagctgtaagctctcaacttgcgactttcaatcgccccaaatgaatcccggacccaatcgaagaagggtcgcaaatcaatcgcagcagcaccacttggaattgagatttaagtgggggtcccacacaagtcttccgagggtttatgtgctttgccagataattaggcgtgcggcaaagacagcagcatcagcatcagcatccacacacccatttgccaccccaatccggggcttttcccgtgtcattgttgctgtttgcgattcgattttcatcggcagggcggctagaggggaaaattgtgcgattgacccaactcaaacatagttttgtgcggtccatggggatcaattagatggctgtcacagtgtgtaattgaaaggatcaggatacacagggagtaccaggagttgttcggcttttttggcaggtttgtcctttatttgattgcctgctgaaaagttttcgaagagctgtgacactctgcagcttattttcgattttattacgattcgctaaagctcgagcaatccgggcaaatccctggggccaccgatacctgcggcttcatcatggcccattgtcagcatctcgtactcaaccatctgatattaaaagcgtatttgtcagaccaaggagacgaatccccttttgatgtcccttgcaggaggca

SEQ ID NO: 14621 - DNA, 2155 bp, DROSOPHILA
gacgcagtcgctcgtcgcagtggttgttaaactcgagtttcgtactttcgagcgcgcgtattgaaacataagtgagcgatcgtgtgaacagtgatataaagtgcaccgtgtatgcgggatagagatacctaacctagtgccacacgaaagttgaagtaataccagcaggatatctactcagttggcagtgaaaagcgtggtgaagtgttcggtcataatgagtgtgtgagcggggacaagctgacaaactgaatgcgataaggttacagatgtcctaaacacacaggcactggcacacaaggattcccggggtcctggtgacatgtaactggatccggatctggatacatgttggctcctaagacaacagcccgctcctttgcctatcgtctggccgcactgcagaaacgggagcaacaaaagcgagacaccggatcgtattcaccacgtgaacaaagcgagtgtgcggctaatgctaatgccagctccttcagctagctcgccacatcgccagcagcagcaacaacaattgcaggtgcccctgcaggtgcatcagttgcacaggaagcgccggacaaagggacacctacaccaccttcaccatctcaaccacgaaacgacaggtcaactgacagcgaagcatggcgtttccggagagttgccgcagctggactacggcagcttgtccgcatccctggaggaggatgctattgacccactcacggcgatggcacccttcgccaactccctggtcaccgaagaatcggcgcagcacaagaacaacgccgagctgcttggcaatagcagtgaggatgagaatgtgagaccgcagcaagggtcctcttcctcgggactaggatcatcgggagcagcaggtggatcaggcatactgctcgaggagtttaacagcggcaaactgagtcccggagaggcgagtaatacgctgcccatattcctcatcgagccggagagcgtgttcgtggtcaagaaccggccggcggtgcttaagtgcaaggcctcccactcgctgcaggaggtcaccgccaccatccaccgcgacctggtcgacgagttcttcggcgacggacccttcaagtgcgagtgccacgcgtggtcgtcgcgtggcgtggtcaagagtcaggcggccaccgtgcacattgcttatattcgcaagtccttcaaccagtcgcccacctcgctgcgcctggagctgggcagtcgggcggaactgcgctgcgaaccacccggcggtttccccgaaccgaagctcacctggcacaaaaacaacgcggtcatcacggcggacagcgagccggggatcaccgtttcggccggcacactcatcttccgccaggtggccctgcagcatatggccaactatagctgcagtgcggagaatatcgctggcagacgcgtctccgattccgccgtgctcatcgtttatgtcaacggtggctggagcacctggagtccatggcgcgaatgcaagtgtgcgggcaagcccagccagggaaggaagcgttcgcgcacctgcaacaatccgatgccattgaatgggggcgcccagtgtccgggcccccagatccagaagtccgccgactgcgccgcatgtccagaggacactcaaatcgtgagccctgatggatttgacatttcgtcgagtaagcgcatggcccgctggtcggcgtggagtgactggagcatctgctccgcggagtgcattcaagtgcgtcgccggaagtgcctgactcagggccagactcagatttcctccgaggcggaggaagccggtgatctgctcctgggagctcccggagtgggcatggccgccctcatcgccgctgcaggagtgggcgcagtaggaagccccagcgaagcgactggctccagttccgacattatcccgggatatggcaaatcattgtgcgccggaaaagacatacaaacggccgaatgccgcggcgaacagtgccagattggcaaggatggtaagtctgtgctcatgactaggatgaatgcctggcaggatcaacaaagtagacagttagacaacaataacagcaaagccggagtgcagcatccacaaaaccagaatcccagaatccctcgcacaaaagatgagcactcaacgctgattgtcacaatgggaaattaa

SEQ ID NO: 14622 - protein, 558 aa, DROSOPHILA
MPAPSASSPHRQQQQQQLQVPLQVHQLHRKRRTKGHLHHLHHLNHETTGQLTAKHGVSGELPQLDYGSLSASLEEDAIDPLTAMAPFANSLVTEESAQHKNNAELLGNSSEDENVRPQQGSSSSGLGSSGAAGGSGILLEEFNSGKLSPGEASNTLPIFLIEPESVFVVKNRPAVLKCKASHSLQEVTATIHRDLVDEFFGDGPFKCECHAWSSRGVVKSQAATVHIAYIRKSFNQSPTSLRLELGSRAELRCEPPGGFPEPKLTWHKNNAVITADSEPGITVSAGTLIFRQVALQHMANYSCSAENIAGRRVSDSAVLIVYVNGGWSTWSPWRECKCAGKPSQGRKRSRTCNNPMPLNGGAQCPGPQIQKSADCAACPEDTQIVSPDGFDISSSKRMARWSAWSDWSICSAECIQVRRRKCLTQGQTQISSEAEEAGDLLLGAPGVGMAALIAAAGVGAVGSPSEATGSSSDIIPGYGKSLCAGKDIQTAECRGEQCQIGKDGKSVLMTRMNAWQDQQSRQLDNNNSKAGVQHPQNQNPRIPRTKDEHSTLIVTMGN

SEQ ID NO: 14623 - DNA, 6186 bp, DROSOPHILA
taggatagcaataccgaaaatttgatcaagatttcattaattttaatttatttttttatcacaacttaagaatatttccaaagaaaacattgaattttcagatgaaaataaaagctaagcgaaagagagtgcatatttaaataaacaattaagaacaataattaataagcattatttaagaaattcaggattccaggaccaattttattgacaaatgttctagtctaattccaataccaatttcagttagccaaattcaacagagcttgagaaattccaaaaagactcttaaaacccaaatttgaagagcaatctttttctttctctttctttttttcgtctggttcgagtttgagcgctttctcgagttccactcaaacccaagcggcgaacatgttgcgtgcgaacggttcgatgttggctgcccgctcgatcgaaccgagtgatagtggttgtcgacggggggggggaaggagacttggcgctgcttcgtctagagagctagctagtggccaggggaagacagggaaaggggtttggggggcgcttaccccgcccccttttggtttcatttggtggaagaggggggctggccgagggcagcaggtgggggagcggacctctgccggcgtcgcgttggagccaaaagccagcgaccagagaccccacaaagagctagctgcagagctgcagagctgaagagctgaggttgaagctaaagctaaagctgagccactgaagcactgagccactgaagcagtgaagcagtgaagctgaagctaaagacgccgccgagaagccgaatccgaacgataccgataccgagaccgagaccgagacacagacagacagaccagcaccagcacaacgacaacgagaccgagcgccccatcgccgtcgatcattcgtttggcgctctgctcactcgcgcgctcgaagcgggctcgagttgttataaaagtggcaaggacatacggtcgagccattagtcgaaaactataaacgctcgacgcgaaatcgtctccgggtctccgtctccgtaaccaaaaaccgccaactgtgtttcacacgttacgttgcgagccgaaacgcacaacagtttatatttattatcaaaaagtatatgtagataaaattttttttttttttggtttttggttattttggcatcctaaaaaagcctcgcagtaaaaaaaaaaactgaacactattccaaaggaatcccacaacgcatcgccaacgccaagcattgaattgcattttttttcaagtgccagtcgaaagcgagtaaaagcaaaagtgaccaccaatggccgccaagcagtgcagtaaataagcgaccaccacgagcagcaaagggaaatccgcctaagtaaggcgatagccagctatagccagggcagagaagcgccagaagcgccagagaaccaaagggaaccaccagcagcaggaggaggaaccactaccacctgtgcacaatcagcgcagctacagctacaccgccatgctagccgattcgtacctgatcaagtttgtgctgcgccagctgcaggtgcagcaggatggcgatgcccagcacctgctgatggtcttcctgggcctgctggccctagtcactctgctccagtggctggtgaggaactaccgggagctgcgcaagctgccgccgggtccttggggcctgcccgtcatcggttacctgctattcatgggcagcgagaagcacacgcgcttcatggaattggccaagcagtacggatcgctgttctccacacgactgggcagccagctgaccgtcgtgatgagcgactacaagatgatccgcgagtgcttccggcgtgaggagttcaccggacgaccggacactcccttcatgcagacgctgaacggatatggtgagttaccagttaccagttatcagttatcagttatcagttatcagttatcagttaccagtgctgcggtgcaggaggaggaagctgggggagattggtctagccgatatgttgataagccacctgtttacgtgaaattagtgtttactactctctatttactacgtacttgtagtatatattgtacgtatgcataggtaaattagctctgaaatatttcccataaatccgctgcgaaagctgaaacttatcaagccatctgatcgagccaagtccagatttaacgaatatatatatatatagtataaaaacgtatttatttagtacctgagatgtgagatgtagtgagattgtcgggaggagtaagggcgcctattaagtgaagaaattccactggcatttctttgtcggctcattttctttccgctctctttgattttcgtttttcgaattaatttgtatttttatttgcattttttattttattttgatttcgatcgcttcagctgcactcatttatacatatatatatatatgtatgtatgtatgtacgcatttaacgcaatgataaggcattgcggcacttttttcatgccgcaaaatcacgtttttggcttttgtttcgtttttgtgacttgtgcatttttcgctgggatttcttttctggtatttcattttgacgaagtagggcaagagcctacctcaattaagtgtaaagattgcggcataaaaaattaaaaataaagataagagcaccagcactcccaatccgaatcattccgaaccattcattccctttcgttccgttcagtatctcaatcgcctccatttcctttgcaggcattatcaacagcactggcaaactgtggaaggatcagcgccgctttctgcacgacaagctccgacagttcgggatgacctacatgggcaacggcaagcaacagatgcagaagcgcatcatggtgagttccgctaatcccgaccagcttgcagggagcagctagtaacaaccgtatcctttttcgtcctgctccttcagacggaagtgcacgagttcatcggccacctgcatgccagcgatggccagcccgtggacatgtcacccgtcatctcggtggccgtcagcaatgtgatctgcagcctgatgatgagcacccggttcagcattgacgatcccaagttccggcgcttcaacttcctcatcgaggagggcatgcggctgttcggcgagatccacacggtcgactacatacccaccatgcagtgcttccccagcatctcgacggccaagaacaagatcgcccagaatcgcgccgagatgcagcgattctatcaggacgtgatcgatgaccacaagcgcagcttcgatcccaacaacattcgcgacctggtcgacttctatctttgcgagatcgagaaggccaaggccgagggcacggatgccgagctcttcgatggcaagaatcacggtaagttgaagtccacgccaacccattcctactagctgcaccacacgctcccacctggaacttcactgaccataaattccttttcttctccttttcattgcagaggagcaactggtacaggtgatcatcgatctgttctccgccggcatggaaaccatcaagaccaccctgctgtggataaacgtgttcatgctgcgcaatccgaaggagatgcgccgcgtccaggacgaacttgaccaggttgtcggtcgccaccgcctgcccaccattgaggatctgcagtacctgcccattaccgagtccaccattctggagtcgatgcgccgttccagcatcgttcccttggccaccactcactcgcccacaaggtaagcttccaacgagattagagattacagattggggatagtacgaggtttggggtgtgcggggtgggatctcagcctggagctgcaactggcagagcaatcagcagatggagtgcttacgcactggcgtttagagatctacgcaaatgccgcgaggtccgttcattcacaccagatctcggtgattgccattcattgtcgtggctctccattcagctggctcgtgccccggatcccccggtgccctcccgctccgccgcagcccaagtgcgtggcccactttctgtgtgcataggcatccacagatgccagttaccagattgtggcagtgcgcagtgggcccagcccctgccgctcgctgataatcgccgatgcaccgatcacaaactaatcacaatttccgtcgctcttgcctctcccctctcgtccgctgcagggatgtggaactcaatgggtacaccataccggccggctcgcatgtcatcccgctgatcaatagcgtccacatggaccccaatctgtgggagaagcccgaggaattccgcccatcgcgattcatcgacacagagggcaaggtgcgcaaaccggagtacttcatacccttcggagtgggcaggcggatgtgcctgggcgatgtgctggcgcggatggagctcttcctgttcttcgcctccttcatgcactgcttcgacatcgccctgccggagggtcagccactgcccagtctcaagggcaacgtgggcgccaccatcacgccggagtcgttcaaggtctgcctcaagcgccgccccctggggcccactgccgccgatccgcaccacatgcgcaacgttggcgccaactgatgtggacctggtccgctccagagcacggttttgttcctacacaaatgctagaaagcaaaaaaaaaaaaaaatatataaaaacacaagagaaaatcgaatggtggtaatgggaggccatttccattctggcctcccatcgcgagctatcgatttagcgataagttagtagttatccgcccgtgggaggagcacatccggataccggctagagccgggctggacaaggagcagagcagccggaagctgtgaccaacgcacagaggactgcaaccaattctattctttcacccccaagaagctgtgttcaactaattgtaattaaatcctagttaatacgccctagttaggttcgattatacagctaatgtcaatgtttttatagttattaagttatattattactaccgctaatgctaagataccgctatgtctacagccagcaggccgattaagtttagttagctaacgttcttgtttatccgtagtattagtgctagcttaatgtccaaacaacaaacaacaaaacaaactgtggtttagtcttacaagcacacatcaaaataggcaaacgattcgaaaataaagaaaaatttgtggaaaaaaccttgaaaatgaactgggctatatttatttcataatgttttttaatatagctcgcaaattgttatttttgcctttgaaattttactaagccaaaccactcactactaaaatcatataaaactttctagaaattcttactctcatttgacatttttcttattcattcaaccattttaaaatcttatactaacattcggcactataattaaactttacatatagaatgtattttaattatttattaaatatgcaaatggaaatgccttcaaaaagtgatttgcccattaaaaaaaacgcattaaatagaccaccattcactaaaaagtataatgtaattgtaagggatacaaaaaaaaatcggatacaataagatgcactcaggatgcacaacctaatcctgcaccacagctccgtcgggtgcatggcgcatctccaccgccggcagcttggtgaatcgcagcatgtgcggagtgggggtcagggtgatgccgctctcacccgccatgtccacctcagtgcccgagggcagttccaagtggaagcgcctgaggatgcgacccgtaaagagcgtgagtatcatgcgagccatctcttcgccgggacacattcgatagccggacgagaatgggatgaactgtggcggcgcctggtaggctccatcggcggtcaagaagcgctccggacggaactcctccggttccgggaaggccactgggtccatgtggatagcccactccgagcaaacgatcatcgaaccacccttgataaaataatcgcccacgacgaagttctctttgcatccgtgcggaatgcccagtgggacaacgctgcgtatgcgcatcgtctcggaaatgcaagcccttaggtaggccagcggctccagttcctccaaagtgggagacggacccagcggcaggaggagctcatgcaggcgccgctggcagcgttgttcgcgggccaagtagagcaggaaccagcgcagggtggccagcgaggtgtccacccc

SEQ ID NO: 14624 - DNA, 2730 bp, DROSOPHILA
aaacgctcgacgcgaaatcgtctccgggtctccgtctccgtaaccaaaaaccgccaactgtgtttcacacgttacgttgcgagccgaaacgcacaacagtttatatttattatcaaaaagtatatgtagataaaattttttttttttttggtttttggttattttggcatcctaaaaaagcctcgcagtaaaaaaaaaaactgaacactattccaaaggaatcccacaacgcatcgccaacgccaagcattgaattgcattttttttcaagtgccagtcgaaagcgagtaaaagcaaaagtgaccaccaatggccgccaagcagtgcagtaaataagcgaccaccacgagcagcaaagggaaatccgcctaagtaaggcgatagccagctatagccagggcagagaagcgccagaagcgccagagaaccaaagggaaccaccagcagcaggaggaggaaccactaccacctgtgcacaatcagcgcagctacagctacaccgccatgctagccgattcgtacctgatcaagtttgtgctgcgccagctgcaggtgcagcaggatggcgatgcccagcacctgctgatggtcttcctgggcctgctggccctagtcactctgctccagtggctggtgaggaactaccgggagctgcgcaagctgccgccgggtccttggggcctgcccgtcatcggttacctgctattcatgggcagcgagaagcacacgcgcttcatggaattggccaagcagtacggatcgctgttctccacacgactgggcagccagctgaccgtcgtgatgagcgactacaagatgatccgcgagtgcttccggcgtgaggagttcaccggacgaccggacactcccttcatgcagacgctgaacggatatggcattatcaacagcactggcaaactgtggaaggatcagcgccgctttctgcacgacaagctccgacagttcgggatgacctacatgggcaacggcaagcaacagatgcagaagcgcatcatgacggaagtgcacgagttcatcggccacctgcatgccagcgatggccagcccgtggacatgtcacccgtcatctcggtggccgtcagcaatgtgatctgcagcctgatgatgagcacccggttcagcattgacgatcccaagttccggcgcttcaacttcctcatcgaggagggcatgcggctgttcggcgagatccacacggtcgactacatacccaccatgcagtgcttccccagcatctcgacggccaagaacaagatcgcccagaatcgcgccgagatgcagcgattctatcaggacgtgatcgatgaccacaagcgcagcttcgatcccaacaacattcgcgacctggtcgacttctatctttgcgagatcgagaaggccaaggccgagggcacggatgccgagctcttcgatggcaagaatcacgaggagcaactggtacaggtgatcatcgatctgttctccgccggcatggaaaccatcaagaccaccctgctgtggataaacgtgttcatgctgcgcaatccgaaggagatgcgccgcgtccaggacgaacttgaccaggttgtcggtcgccaccgcctgcccaccattgaggatctgcagtacctgcccattaccgagtccaccattctggagtcgatgcgccgttccagcatcgttcccttggccaccactcactcgcccacaagggatgtggaactcaatgggtacaccataccggccggctcgcatgtcatcccgctgatcaatagcgtccacatggaccccaatctgtgggagaagcccgaggaattccgcccatcgcgattcatcgacacagagggcaaggtgcgcaaaccggagtacttcatacccttcggagtgggcaggcggatgtgcctgggcgatgtgctggcgcggatggagctcttcctgttcttcgcctccttcatgcactgcttcgacatcgccctgccggagggtcagccactgcccagtctcaagggcaacgtgggcgccaccatcacgccggagtcgttcaaggtctgcctcaagcgccgccccctggggcccactgccgccgatccgcaccacatgcgcaacgttggcgccaactgatgtggacctggtccgctccagagcacggttttgttcctacacaaatgctagaaagcaaaaaaaaaaaaaaatatataaaaacacaagagaaaatcgaatggtggtaatgggaggccatttccattctggcctcccatcgcgagctatcgatttagcgataagttagtagttatccgcccgtgggaggagcacatccggataccggctagagccgggctggacaaggagcagagcagccggaagctgtgaccaacgcacagaggactgcaaccaattctattctttcacccccaagaagctgtgttcaactaattgtaattaaatcctagttaatacgccctagttaggttcgattatacagctaatgtcaatgtttttatagttattaagttatattattactaccgctaatgctaagataccgctatgtctacagccagcaggccgattaagtttagttagctaacgttcttgtttatccgtagtattagtgctagcttaatgtccaaacaacaaacaacaaaacaaactgtggtttagtcttacaagcacacatcaaaataggcaaacgattcgaaaataaagaaaaatttgtggaaaaaaccttga

SEQ ID NO: 14625 - protein, 538 aa, DROSOPHILA
MLADSYLIKFVLRQLQVQQDGDAQHLLMVFLGLLALVTLLQWLVRNYRELRKLPPGPWGLPVIGYLLFMGSEKHTRFMELAKQYGSLFSTRLGSQLTVVMSDYKMIRECFRREEFTGRPDTPFMQTLNGYGIINSTGKLWKDQRRFLHDKLRQFGMTYMGNGKQQMQKRIMTEVHEFIGHLHASDGQPVDMSPVISVAVSNVICSLMMSTRFSIDDPKFRRFNFLIEEGMRLFGEIHTVDYIPTMQCFPSISTAKNKIAQNRAEMQRFYQDVIDDHKRSFDPNNIRDLVDFYLCEIEKAKAEGTDAELFDGKNHEEQLVQVIIDLFSAGMETIKTTLLWINVFMLRNPKEMRRVQDELDQVVGRHRLPTIEDLQYLPITESTILESMRRSSIVPLATTHSPTRDVELNGYTIPAGSHVIPLINSVHMDPNLWEKPEEFRPSRFIDTEGKVRKPEYFIPFGVGRRMCLGDVLARMELFLFFASFMHCFDIALPEGQPLPSLKGNVGATITPESFKVCLKRRPLGPTAADPHHMRNVGAN

SEQ ID NO: 14626 - DNA, 3328 bp, DROSOPHILA
cagcaaaccggcgggcgtgggtttgaactcgaatttccgcaagaataggcagccagtgccagaggattccaatattttgccggatgtcgaggaggagtcagaatcgaaggcgtccaagtctcagcagctactggagaccggcgtccagacgaatgagtctgagatcctcgatcataagctaatccttggcgaggtgaagatggtatgcccctccgcgcagctggtcgatcaaatagatcgggaacggctcgagcttaaggaggaaagagagcgacaatcatcgcgcaggtttgctgctcacgagcagcaggaggaactgcatctggacgaactgaaggagttctcgttccggaatgccgtgaccaagagggcgcccaagaagccaccaacgcaccagtacgctcgctatgataatcagtatcagaacgttttcaagtccatggacgatttcttcagccgggtccaaaactctatgcccaaatcagagtccgtgtccaccatccaggatcgcatcaagcgcaaggaagaggagctgctcaggctcttcgacaacgtcgagctaaacgaataatctaaaaactataggaaattctatatcaaattgtctgtgtcgtgcacgtaaagtagtagtccttttcaattcaatggtcatttatgacttttaatgggtgcttgggttttatgatatatgagtggtatgttctataaaaaaaaagaattttggacttcaaaactgagactaactgccgatacaaatcaagaatatatatatatatacgtttaagaactggttatttaggttataactttgaggcttattttactccaacaacattatatcgccactgtttatgatccaataaaagccgtctgagctaactaatggcttggaaccacaccttttggggaaaattcagcgtcagcaagtacacagacattaactgaagtcgtatttaaattgagcttagccaagcggcaatggagtgccatactagccaggccagcaccagcaccagcaccagcagctgacactttctctctgggccgaaagcggggtcaagacgctttcatgacgggcggttcttcagtcaacgctggcaactgatcgcgcgagcaatggaaaatacgcctctcaagtttccacacgaaattcgcgatgtggaggagtccaccaatgctgagctattggatcacttccatggtatgtttatagcgcgcaaatggcttgtgatgcacctagtatataaaaaataaaaaaaaaaaaacaggtgagcgaactggcttcgttcaggtcggatcggagggttacttctttccgcacaagtacaaggacgaggccgagcggtactacaactttgaggcacggccggatgacgtgtggatagccacggtgcccagatcgggcaccacttggacgcaggagctcatttggctggtggccaatgggctggattttgagcatgcccaggagcgaccactaaccgaacgctttccattctttgagtgagtgcttgtcgcgcgatcctatcttaattaagtgaactccaaccgcccttagatttccgctctttgtgcatcccaaaattaaggaagagctgcaggaggaaaaccgagactcggctgaagctctggagttcattgagaagatagctcgaccgggttacgaggctttgagcgaaataccacgctcgcagcgacggtttatcaaaacgcatttccccttttctctaatgccgcctagtgttctcgaaaagaagtgcaaggtgatctatgtggttcgtgatcccaaggatgttgcagtttcctactaccatttgaacagactcttccgcacccaaggatacgtcggagattttgagcgttactggcattatttccaaaacggattaagtaagtgatccttcgatggagttgccatccttaaccaactatctttcagatccctggctgccctattacagtcacgttaaggaggcgcgggagcatgcccatttgtccaatgtactctttctgcgctacgaagacatgttggctgatctgccaggtgcaatcaacagcatagccagcttcttagagtgtccaccgaaacccgaggatatggataggctactcgatcatctgagcatcagaagcttccgtgagaacaagtccgtaaacatgcacgaaatggcttccgttggcgttctcaacaaaggagaggcaggattcgtgcgcagcggagccaagacagcgtatcagccgcaacaggagttcgtggagaatccgaagcttttgaagagcgccaacgagtgggtggaacagaatattaaatcattcaagaccatatgaaatacctgactttgttggctatctttactggtgtttttcttttttggttttgaattgaaacggaactagactatgactaacgtatttgcacattgaaactatccacgctcgcactagcgatctgcttgtggatttcgttgacctccgcctgggttaaggtgcgctccatatggcgataaacaatgcggaagcacacgctcgatttccccgttttcgggtgcttaaacttgtccaccagactgatctgtaagaaaagtaaagtatatgagaaatactcgtaacatatgatacgtttgggatagctaagaccaacctgctccaccatatcaccagctacagagcggactagatcgtaaaagtcgttcggcgagaagccggcatccacctcaatgtcctggggcagccagaacgacaagtcattcgtgcactgcggatagtgggagatgggcttgtacttgggcagattgtgcagatccttttcgctaaactgcgacagaaagccactgtcgttcgaccagaagagccggatgtcaggtatatcgaacagcaccatggccagtcgctccaggccgacgccaaaggcgtagccaatcgattgatgaacgcccgatctctgcaggatttcgtggcgcatgatgccgcagcctaagacctccagccagttgtccttgaaatagatctccagctcccaggagggctgggtgaagggaaaataggtgtccacccatctgtacttgatgcgcggcccaaacagatccttggtcaggccaaccagcacgtgcttcatctcgtgctccatcaacttgacggcctcgagcgtgtggcagggctgtttggtttggtccatgaacttggatgagggcagaatcagcttggggtcggccagcgtacccgaccacgtctcttcaaagagttccaggccaggattgcgctcgaaaagcttgtctttggtgaccagccgcacagcgtccgcctggtggaataccggatagtgggtgct

SEQ ID NO: 14627 - DNA, 1157 bp, DROSOPHILA
ccagcaccagcaccagcaccagcagctgacactttctctctgggccgaaagcggggtcaagacgctttcatgacgggcggttcttcagtcaacgctggcaactgatcgcgcgagcaatggaaaatacgcctctcaagtttccacacgaaattcgcgatgtggaggagtccaccaatgctgagctattggatcacttccatggtgagcgaactggcttcgttcaggtcggatcggagggttacttctttccgcacaagtacaaggacgaggccgagcggtactacaactttgaggcacggccggatgacgtgtggatagccacggtgcccagatcgggcaccacttggacgcaggagctcatttggctggtggccaatgggctggattttgagcatgcccaggagcgaccactaaccgaacgctttccattctttgaatttccgctctttgtgcatcccaaaattaaggaagagctgcaggaggaaaaccgagactcggctgaagctctggagttcattgagaagatagctcgaccgggttacgaggctttgagcgaaataccacgctcgcagcgacggtttatcaaaacgcatttccccttttctctaatgccgcctagtgttctcgaaaagaagtgcaaggtgatctatgtggttcgtgatcccaaggatgttgcagtttcctactaccatttgaacagactcttccgcacccaaggatacgtcggagattttgagcgttactggcattatttccaaaacggattaaatccctggctgccctattacagtcacgttaaggaggcgcgggagcatgcccatttgtccaatgtactctttctgcgctacgaagacatgttggctgatctgccaggtgcaatcaacagcatagccagcttcttagagtgtccaccgaaacccgaggatatggataggctactcgatcatctgagcatcagaagcttccgtgagaacaagtccgtaaacatgcacgaaatggcttccgttggcgttctcaacaaaggagaggcaggattcgtgcgcagcggagccaagacagcgtatcagccgcaacaggagttcgtggagaatccgaagcttttgaagagcgccaacgagtgggtggaacagaatattaaatcattcaagaccatatga

SEQ ID NO: 14628 - protein, 346 aa, DROSOPHILA
MENTPLKFPHEIRDVEESTNAELLDHFHGERTGFVQVGSEGYFFPHKYKDEAERYYNFEARPDDVWIATVPRSGTTWTQELIWLVANGLDFEHAQERPLTERFPFFEFPLFVHPKIKEELQEENRDSAEALEFIEKIARPGYEALSEIPRSQRRFIKTHFPFSLMPPSVLEKKCKVIYVVRDPKDVAVSYYHLNRLFRTQGYVGDFERYWHYFQNGLNPWLPYYSHVKEAREHAHLSNVLFLRYEDMLADLPGAINSIASFLECPPKPEDMDRLLDHLSIRSFRENKSVNMHEMASVGVLNKGEAGFVRSGAKTAYQPQQEFVENPKLLKSANEWVEQNIKSFKTI

SEQ ID NO: 14629 - DNA, 6401 bp, DROSOPHILA
aatctggtctcgaatctggtggtctacaatcccaaaaaccgactcaaggccagcgaggtgggttctgcttcaagtttgacaccggttaggtattataattggtaaattctatatttctcaggccgtcgagcatgattattttcattaatctaggactatttacacggacattgctagcaactaagagttttcggattctttgaatctgcaaggtagaatgtgtgtgattagttgtggaagtgaaggaatatgtttatcaggacacctacttgcacttaaggcaggtaaagaacaccgtctggccttcgtccgccgatcgaagctgcagggtggcataggacatcttgtcgtggttgcacttgggacacttcctctccacaacggggccatccgcgtccgattccgactcccttttcgtcctgttgaacaccttgctgggatcgtaggtgttgaagtgtatggtaaactcggacttctcgccgctgtaaactatttttaagtgttaaataaattaaacaaagttgtaatttctggatttaccatctggctgaaactccttcttgcagttgtagcaaatcacattgcccttgacttgaagctcgggcagaatggagccgcaggaggggcaaaagcccggacaattggaaaaaatatccatgccagtatatatcacccaaaatcaaaatcaaaatacaaaaaccgcacgtgctatttcggatttcagtatgagcgtaactgaaccgtttgaaatataccacacggtattaaaaatatacttgattcatatactaaatacgtaagggtggaaaactagaataagtctggttgaaagccttgatgaaacgggtagagccgtttacccgtttcgattaccggttcttaatcaaaatcaattattcaaaataaactttcaaaatagtatttgatattcatagccaatattacgtaatgaaaacagttagattttaatagccaatatcaagttatgaaaacagtaagatttttacttttatctttactttgtattaaagtttacaaaactattacatcaataaggcgatcttacggtctagttagctgaaatgcaagtcggatgtgtactgtgttccaattaaactacctaaaactatcacaggcagaacattaactacgcactagaggttcctaactacaactaagcatctaggaactattgatccttggctgccacatatcgcacagtatatatatatttaaaatgcagctatcgggtgggatgactctgcggcatgttaagctcccagagcttcacattgttgtcgagaacctcgtggtaccagctctccttttccggctcctcccggaagatgggcttcagcgacttgaggtccaactgcagtatggcatcgttgccgagcagcgagtccagggatcgcagtagagtactattaccgtgcagtttcagcagggtcacatacttgaccacatagtactcgtactgcagcttccttctcgcccatctttccactgtagcattggcactagccgatcgaatctggcccagatgggcggcaaaccagggcgcaaagtagttgtaaagatccaacttggacagtccgttcagacctttactcttgattcgctccttgatcatgctgtagttcttcctgctgtacacaaacacctgatacagcgaattgccggtggtgtatgagtttacgtagtgggtgcccacatcttccataaatcgcactgcggaagttatatttccgatttgcagttgatccattctcgatcgcacatccggctccaagggttggtgcaccggaatctcagcgttaagacgccccgtttccctgaagcgcaccaccctcaccaaaacatacgagtaatcgccttggatgaaagatgtattgatgcccagcttcttggccgcattatccggaaaccatccgccagtaaatgcctcccacggtttgtccattcgctcaatggaaaagtcacggaagtaggcctggaacagttgcctccgattctcgcagaactccatgtgaaagtctccatgaaagattccgggcgtggtgtcttcatgactctccgccaggccactcagattctgaaagaaaaaaatcattaattatctaattgtctagtcagctcaattatcaggtaataaatatcaagtgacatacttgaataatcgtatataatgatcgttttcctaaatctgatcaaacaaatataataagcgctcattctaacgacaaacgtggcggaagtgaacaatataattacaactaaaaatagttttaagtgataacaactttaaaccctattttaaaattttgattatactccaaataattatggtgattgtggttaaaggttaatacaaacaattccgagttcatcaacgccatttaatttattaaatgtaagcttaactctgccttaagtcccttaccctatagatgtttttggtgggctccttaaacacccagcgatccggctccgagttgtcattgagcggtatcacacgcatggagattcccaggtagccatagcgcaggaatatattgatggccttgccgatccggagctgggactcgcgacgacctccatccgccaggagcgccagggtcagcagccagaaaaggccaggccacgaccgcatcgctcagcattcaaggttagatctatagaggattataatagaaatattatattgcaaatttaaagcgattacacttgaattaggcaaacgtttccatattccatatccatataatcccttgctataaaatattattgattgaaacaaacgcaacctattccgatctcttataaaattcgcaatttaacaataatgaggcatatctatcccacaataatttattcaagtgactagataactcttgattgcaatgtgcatattgatgacaagcaagtacaaacagcgctataccatccgaactcattactcacttagactaaaaccggaaagttttacagcaagctacttcggtggtttgtttatattttatagccagtgcagtagttgcgatacagtggggttaactaaacagcaataattgcagggccgccgtgtttgttttccactccataaacgggcgataatataagcgcgctctaattggccatgaaccttcagtggcgctgaacttgaaccgaccaagtcgacttgggtagaggccaccagctggtggtgatgatgagctggagctctgcgtagctccactctgatcaccttaagtggatgcaattagccgcaggctctgtggccgtaaaagcagctacaaagtatagccatcaaaattggttcggctgtcgctttgacttgcaaattatttcctaaaaacattttgcatgcctcgtaaccgttttcctatagttggcccactacacttcagaggaccggttatgccgtttttgtttttttttttttttttttctgtccaagcattatggccggcaaggaagccaaacaaattggcccaagccagacatatacacacattctaacagcttggcgaggcagcttttaattcgagccgttatcacagaacgagcgacgtgtttgatgggccaaaaacacagaggttagccgggtgttagccacgtttgtgagtcacacctgtcgacccgacgcactgaagcgcagcaccagacaaaaaaaaaacacaaacgcagccatgatgagactcaaatgttaaccatttacgtgaaccataaaatgtaggcgtcgctaaacttgtccagcagcaaaaactaaacaaaaaacagcaggaagagtgactgaatgaaactagccgtgaatggaacaaagaaaaagagacatttgactactgcatcttgtctatacttgcctatagtacatatattactgcccatgggcgcgattccaggaaatatttgtttgcacattttataaacacatgaatatttgctaaatgctgcaatcagctgtcttgaccttacagatgaacctcacagattgcaatcactctacggatttaaacattctgactcggcatagaatacgatttcgaaggcttccaacttctggcaaacaactaatgcccaaatgagcttagttctccatcgcgagacccagaaaatcaaactgtcgcacaattgccaaacttgaggttcaaaatttgagatccgcttgaaaggcatgtgttatgtgacttaatgatagttagttttgtcggtgggggtattgacaatagcggacgcataaccttgtgcaaaagaccccaaaaaaaaaaagaagccgcgaaccggagttcgagatgaagaagacgaattaaatcaaaaattcaatgcgcgcactcggactccaaagcaaaggcaactaaaaatcaactcgttcaactgtgactccctgtgcactgggagaaaagagtgtggctatctaggactagaactgaataagagaagaatcagtcagctcttaactcctcttttgagctatttggaatcttattccaattgtttatgcttttatcagatttaaatcgttattagatttgttatttggcctatatttatccaataagattttataatgtgtatttttcttggacatcctaaaaaacctgcatacatttctctcagtgcttcccaccgtggttgtccgcggcccagtcaattggagattctttatgcgcatttcatgagctcttttgtggtagtagtctggagtaaaccccgggcgaagggcacagacgtggggcataaggtctgcagtttatatcgcgcttaattttatgcttggtccgtgtgcgttgtttccttgagcggtgttaaacaaaagttgtcttgactgctgctgaggtgctgctgcttttgccacttttgtggtagtattatttacctgcacgagaactcgaacgcgaatcgaaattgacgtaaccatcggccagaagcggcttgttttattttcggcagaagcttgaagctccggctaattctatatgccagtcgacacaaatccgcaggtctagagttgtggctcgccactggttagccttatcgctctgataccgggggccattgcacaaggctggttggctggctttatggctggcattagcatcgttaagactccgatttttaacgctttgtgggtcagaggtcggcggcttggttggcgccctcaagtgataagacggatctatgaatagatcgctgtggttcgaattacatgcgtttgcgcagatttcaacaaccaacaacgtacacacacacacacacaggcagtcgtcaagtaccctgaacggcaaacactaaaacagacttaaaacacactaaaacgagcgacgacgtgccttcaattgcaattataagccggaatttgcggcagcacttacactcaaaacgcgagcagcacaccttcaagcgcgaagactcaaaacctaactgaaactggctaccaaaaactcgatcgccggagagaacaagccgatccgttcaagcagctacagcagcagcaacaatatatgttgcgctacgacagcaacatgttgctgctgtgcgtcgtgtcgtctgatccaaccgagcaactggcagcagttgcagttcaatgactggcagccagcagaagttctactcctccaacggtagtggctatggctaatgctaatggcctggcacaaatatctattgttgacatctgccgtttggggggacagcttttccgcttattaatatttccgagcacgtcgttcaacttccagttttcttcaatggcgcggggagtcggagggctgccgaatcgaggcagattgaaatgattgcagtttacccgggccagacttgcgcaagattcccatagaactgggcggccagtaatcaaaaacttttggtactacttgtgcaaaaaaaaaactaataatgagaccaaaagtaagccgaaaaataaaaacgaaaacgaaagtatcaaattcgcattaccttgaaaacatgctaacaaatttgggtcaactcaaagtgttgggcgacaacgtttgaagttcgagtgtaatgtttcaattagaagctcaagatacaaatgtatctgtatctgtatctgttgctcaaagagccatggctgcagggcatccgctttgtcgcatttgccttgacttccaatggccattgggaatttctgcaaaattcgctgctggcttctaagaaatgaaaaggttctgatttgaagtctttttttgctgctgatatgggggggggtctttcttttggaagaggcgttgggggaagggcttccgaaaagtattgcaaaagctggttgaaattgtatctctcgtatatttttctcttttcatatatagaagttcattttattacttttgtttcggtttctgtgtgggttttgctttgtctttgcagcatgcatgatt

SEQ ID NO: 14630 - DNA, 1849 bp, DROSOPHILA
gaaggtgtgctgctcgcgttttgagtgtaagtgctgccgcaaattccggcttataattgcaattgaaggcacgtcgtcgctcgttttagtgtgttttaagtctgttttagtgtttgccgttcagggtacttgacgactgcctgtgtgtgtgtgtgtgtacgttgttggttgttgaaatctgcgcaaacgcatgtaattcgaaccacagcgatctattcatagatccgtcttatcacttgagggcgccaaccaagccgccgacctctgacccacaaagcgttaaaaatcggagtcttaacgatgctaatgccagccataaagccagccaaccagccttgtgcaatggcccccggtatcagagcgataaggctaaccagtggcgagccacaactctagacctgcggatttgtgtcgactggcatatagaattagccggagcttcaagcttctgccgaaaataaaacaagccgcttctggccgatggttacgtcaatttcgattcgcgttcgagttctcgtgcagatctaaccttgaatgctgagcgatgcggtcgtggcctggccttttctggctgctgaccctggcgctcctggcggatggaggtcgtcgcgagtcccagctccggatcggcaaggccatcaatatattcctgcgctatggctacctgggaatctccatgcgtgtgataccgctcaatgacaactcggagccggatcgctgggtgtttaaggagcccaccaaaaacatctataggaatctgagtggcctggcggagagtcatgaagacaccacgcccggaatctttcatggagactttcacatggagttctgcgagaatcggaggcaactgttccaggcctacttccgtgacttttccattgagcgaatggacaaaccgtgggaggcatttactggcggatggtttccggataatgcggccaagaagctgggcatcaatacatctttcatccaaggcgattactcgtatgttttggtgagggtggtgcgcttcagggaaacggggcgtcttaacgctgagattccggtgcaccaacccttggagccggatgtgcgatcgagaatggatcaactgcaaatcggaaatataacttccgcagtgcgatttatggaagatgtgggcacccactacgtaaactcatacaccaccggcaattcgctgtatcaggtgtttgtgtacagcaggaagaactacagcatgatcaaggagcgaatcaagagtaaaggtctgaacggactgtccaagttggatctttacaactactttgcgccctggtttgccgcccatctgggccagattcgatcggctagtgccaatgctacagtggaaagatgggcgagaaggaagctgcagtacgagtactatgtggtcaagtatgtgaccctgctgaaactgcacggtaatagtactctactgcgatccctggactcgctgctcggcaacgatgccatactgcagttggacctcaagtcgctgaagcccatcttccgggaggagccggaaaaggagagctggtaccacgaggttctcgacaacaatgtgaagctctgggagcttaacatgccgcagagtcatcccacccgatagctgcattttaaatatatatatactgtgcgatatgtggcagccaaggatcaatagttcctagatgcttagttgtagttaggaacctctagtgcgtagttaatgttctgcctgtgatagttttaggtagtttaattggaacacagtacacatccgacttgcatttcagctaactagaccgtaagatcgccttattgatgtaatagttttgtaaactttaatacaaagtaaagataaaagtaaaaa

SEQ ID NO: 14631 - protein, 353 aa, DROSOPHILA
MRSWPGLFWLLTLALLADGGRRESQLRIGKAINIFLRYGYLGISMRVIPLNDNSEPDRWVFKEPTKNIYRNLSGLAESHEDTTPGIFHGDFHMEFCENRRQLFQAYFRDFSIERMDKPWEAFTGGWFPDNAAKKLGINTSFIQGDYSYVLVRVVRFRETGRLNAEIPVHQPLEPDVRSRMDQLQIGNITSAVRFMEDVGTHYVNSYTTGNSLYQVFVYSRKNYSMIKERIKSKGLNGLSKLDLYNYFAPWFAAHLGQIRSASANATVERWARRKLQYEYYVVKYVTLLKLHGNSTLLRSLDSLLGNDAILQLDLKSLKPIFREEPEKESWYHEVLDNNVKLWELNMPQSHPTR

SEQ ID NO: 14632 - DNA, 4838 bp, DROSOPHILA
ctgtcctcattagtgacatcgtacattaggatgaaacccatcgctcctcggtagtaggctgtggtgatagttctgtaccgctcctgtccagcagtgtcctataaaagcgaaattacagtttaatgggaaatgaggctacgagtttaaaatccctttagagccgatacttgacttataactcaataaatagcagttaagccctaatgaatgaatccccaacatagattaacggcttaaaccacaagcctctaccgtattccactcattgattatattatcttaatggatgactgaaaacacgactggcatcgcacagcaaggactctcgagaggacgctcacctgcgctctcgtccgtagcgattgccaatcaataaatcaatgtgtcagctttccggtttaatgctcttctccggacgattcattcccccccacaaaactaatcgaggtcaaacaagttctacacatctcaacagcaaggcagcacatgctgcgacccgattatatgtcttagaaagaacatcaatagatacttacccagatctggagtttcacgcgcttatcgtgccgaaatacggtcttcaccttaaagtcaatgcccaccgtggagacgaaggcggatgtgaagctatcgtcggcgtagcggaagaggaagctggtcttgcccacgctggagttgccaatgatgagcagcttgaacatgtagtcaaagttctggtcggcggcatccttctgccacttggggtctccgccactcgccattttatccgtttagagcggtgctgcacggagggaatggaaacaaggattagaaacgattaggattagtagtcttgcaatatcttactactccctaagacatttgtttgggacttatttaaattttgtacactttattataactaatccacatgatctatttaacgtctcatgatatcaagatgagattaacaaagtagcaggctagatttgactgtcacctggtatataagacaacagaacctttaagaactcagtcacataaacacattctcaaaacgtacagtcataaaactacgaagcggaaagttttgtaaaataacttggaaatctaaaaggagttgagcattttgtttccgcgtttttgtttggacatttctgcacttgcagattctttttatcccataactggctttctaatgcaagtccgcgtctactaaaaggcaacatgtttgataccgcattgggaacagtattgagcgttatggtgcagttgataatcctagtatttggtcagattctgggacaagtggtccagcatccattgattactactggactttgcctgttgggagcatttgcataccacgcggatcaggaaacactcaaggagatatatcagcgtgtactccttttgattaggactccacttcaatttgggaacacatcttgctcaagaaattctgctccagtatacggttacgacatgcaacatggtccgcatacttggttgccgaagtccaggtcatcttccagttctgtggaggaagcgactttcttccagagcccagtcaacatcgatgaatctcaaattcaacgcatggccataagagagctgctgagctggaaccactatgatgatctgcccgccagcatcactctggagaatacgggtcagacacttatcctccgtgcccagttccacggtaatgcacctactatcagtggagctgatctcctggccagctatacgtttctggaactgcgcttccactggggctggtgcaacagcgagggatccgagcatacgatcaaccaccgaaagttcccacttgagatgcaggtgatgcacaaaacgggatcgggtattccccgtacttgcaccagcagctatgatctcctgatgatcggatacgtctttgagctatccgcgcacaatccgttcctggatcccctggtgcagaatttgcgattggttcagaagcctggaaagcgtgtccagatttctccatttcccatatcctacttgatgtatcaatttcgatctggattctattcctacggcggttcgctgacccatccgccctgttaccagggcaccgaatggttcatctttcccgaatccctagccattagcgactttcagctgcgtcactttcgtttgctcctaggtccggatgggatctcgcccatagcccgtaacagccgaccagtccagcacatgggcaatcgagttgtaagcctaaactgcttctgcccatacgatgccgcccagttgtccagaatgcatgtggagctatgccaggctcaagctcaggaggagcacgaagaggaacgtatcgagcaggagcagcaattggaactagagcgcgaactggagcggcaaagggaaagcgacttgaaagctcagcaggagcaagcaagcgaggcggccatcgctgcttccgaggatgaaggtcagctaattgagaccatagataccacgaccataataactagtagcagcaacactagcatatgcatgactacgctgatgcggaaggattcgcctaggcaactggaacagccatctcagatgcctatgatggctcccaatcagggtaacttttgcaatcctggcattgtgatattcagcggtgtcaatgaatccaagtccaagtgcggcatccatcaggatacaccggaggagctaatgatccataacagaggaacgggaagaaacatgggtgtacagaatggctgcaaggccgatgccttttgcggcgtgggcgatggcgtcaacatcggaattcgcatggagctggtcgagtagctaatgtgctattatcaacctttatgtcatccatagacactccatttgtggtccatgctgcacgaagaaccggtggggctagatggtgcacatgaaacaccggtcaaggccaactggtggccaaccggagttctctctgtgcccggaagtgattgaatcgcgtgcgtgtggattaaacaagttgcgtttatattttctaaagcataaccccccaattcccttgacttttaatccttggagtaggcgggaggggttggctttagcggcctgacttgggaaaggacccacttgattatccctgtcacgtcactgggaaaactcaaagcgaatttcagagctgaacggcgggttggtgggctggtgggctggtgcggccttgaaaactttcagccttggcttgggcaagtgacaacagtctcggcttacagtttgccattcgggatggttggctgcctgttttccatatgcaatgaaggcggcgacattgtgtcgataatttgtgtatatagcctggttctcctggttccgtttccgctcatccttatttcccccgtccagaatcagaagttgcgcagcggcaaaacgctgtcagattgctgatgaacgacttggtgtagaaggaccgagtgcgcgcgtcatcgtcaaggattttgctggcaaaaggacaggcttcgctcctgtcaagcctcttcaggcccagaaatatcctggaggggcccgaacccaaacccaaacccaaacccaaacgcagacaccaaagaggggccgcaataagaggtcttcaacggcagacggcccttatcacaggcgctgtgtggaaatgtttttatctgctcgactgcgtgtaattatcgatttttctgttgttttccccctgcgtgggggtggctgccagaccctgcccccattacccacccccttaactgctctttcatgtttcaaatttccaatgatttggcagctgttcagcggtcggcagctgcgggcttgtttaattattgataagaaacccaatattggccaaaacgagaactcaatcctgccttaacggttccaattggaaaagtttcaatttaaggtttgttgtcaaacgtaaatattaggcatgtgcataaataccgagttatcaatcaatgggaataaacaattaactctttcctggaagttgtaaaactacatatgtattatttggccacattcatatgtatgtatagcccatatctattgtcaataagatatgatacactaagctgaaatccatcagaagtttttttggaactactataaaagtaacattgagttattaaataccttttaaatacttttaaaaagttgatgtgtaatctttataatgtcaaaatcaatgaagtttaatgtaaaaataataaattccaaccaacggcctcattatttgacaatatggaactgatactgcaaagtttttgatgcgaaaactcaggtattttggttttagctggaactagtacccccattcacccattttggtccatcatggcggatacttaatgtgtcagataaacttactctttcttgaggttattgcggttacagtagtatctgctgctaatatctcagttgctgtttatgatggtgctgctgcagatcctgctgtcacaagaatatcctgctgttttcgatgtgtgggtgagaggtacgccgtgttgttgctcgcacatacacacaaatcgataatggcagctcctttcgctgaagggataaggaaaaggactcgactcagccttggcactggactgacatacgccgcgatttcacgtcgattgattcgtcgagttgtttacggttacccaatcaactattcacacgcccgcggacccactcgtctggccagaattgaactgactccggctgcagtggctcaattattcagcaaatgcaacgcaccaactgttctacctttttgcctcgacacgtcgacaccaaaggacacacaattttcaattttttcttcgctctcaggcggcgaattgactggtgcggcgaaaacgggccagttttgtatacgtttt

SEQ ID NO: 14633 - DNA, 2276 bp, DROSOPHILA
cctttaagaactcagtcacataaacacattctcaaaacgtacagtcataaaactacgaagcggaaagttttgtaaaataacttggaaatctaaaaggagttgagcattttgtttccgcgtttttgtttggacatttctgcacttgcagattctttttatcccataactggctttctaatgcaagtccgcgtctactaaaaggcaacatgtttgataccgcattgggaacagtattgagcgttatggtgcagttgataatcctagtatttggtcagattctgggacaagtggtccagcatccattgattactactggactttgcctgttgggagcatttgcataccacgcggatcaggaaacactcaaggagatatatcagcgtgtactccttttgattaggactccacttcaatttgggaacacatcttgctcaagaaattctgctccagtatacggttacgacatgcaacatggtccgcatacttggttgccgaagtccaggtcatcttccagttctgtggaggaagcgactttcttccagagcccagtcaacatcgatgaatctcaaattcaacgcatggccataagagagctgctgagctggaaccactatgatgatctgcccgccagcatcactctggagaatacgggtcagacacttatcctccgtgcccagttccacggtaatgcacctactatcagtggagctgatctcctggccagctatacgtttctggaactgcgcttccactggggctggtgcaacagcgagggatccgagcatacgatcaaccaccgaaagttcccacttgagatgcaggtgatgcacaaaacgggatcgggtattccccgtacttgcaccagcagctatgatctcctgatgatcggatacgtctttgagctatccgcgcacaatccgttcctggatcccctggtgcagaatttgcgattggttcagaagcctggaaagcgtgtccagatttctccatttcccatatcctacttgatgtatcaatttcgatctggattctattcctacggcggttcgctgacccatccgccctgttaccagggcaccgaatggttcatctttcccgaatccctagccattagcgactttcagctgcgtcactttcgtttgctcctaggtccggatgggatctcgcccatagcccgtaacagccgaccagtccagcacatgggcaatcgagttgtaagcctaaactgcttctgcccatacgatgccgcccagttgtccagaatgcatgtggagctatgccaggctcaagctcaggaggagcacgaagaggaacgtatcgagcaggagcagcaattggaactagagcgcgaactggagcggcaaagggaaagcgacttgaaagctcagcaggagcaagcaagcgaggcggccatcgctgcttccgaggatgaaggtcagctaattgagaccatagataccacgaccataataactagtagcagcaacactagcatatgcatgactacgctgatgcggaaggattcgcctaggcaactggaacagccatctcagatgcctatgatggctcccaatcagggtaacttttgcaatcctggcattgtgatattcagcggtgtcaatgaatccaagtccaagtgcggcatccatcaggatacaccggaggagctaatgatccataacagaggaacgggaagaaacatgggtgtacagaatggctgcaaggccgatgccttttgcggcgtgggcgatggcgtcaacatcggaattcgcatggagctggtcgaaatcagaagttgcgcagcggcaaaacgctgtcagattgctgatgaacgacttggtgtagaaggaccgagtgcgcgcgtcatcgtcaaggattttgctggcaaaaggacaggcttcgctcctgtcaagcctcttcaggcccagaaatatcctggaggggcccgaacccaaacccaaacccaaacccaaacgcagacaccaaagaggggccgcaataagaggtcttcaacggcagacggcccttatcacaggcgctgtgtggaaatgtttttatctgctcgactgcgtgtaattatcgatttttctgttgttttccccctgcgtgggggtggctgccagaccctgcccccattacccacccccttaactgctctttcatgtttcaaatttccaatgatttggcagctgttcagcggtcggcagctgcgggcttgtttaattattgataagaaacccaatattggccaaaacgagaactcaatcctgccttaa

SEQ ID NO: 14634 - protein, 689 aa, DROSOPHILA
MFDTALGTVLSVMVQLIILVFGQILGQVVQHPLITTGLCLLGAFAYHADQETLKEIYQRVLLLIRTPLQFGNTSCSRNSAPVYGYDMQHGPHTWLPKSRSSSSSVEEATFFQSPVNIDESQIQRMAIRELLSWNHYDDLPASITLENTGQTLILRAQFHGNAPTISGADLLASYTFLELRFHWGWCNSEGSEHTINHRKFPLEMQVMHKTGSGIPRTCTSSYDLLMIGYVFELSAHNPFLDPLVQNLRLVQKPGKRVQISPFPISYLMYQFRSGFYSYGGSLTHPPCYQGTEWFIFPESLAISDFQLRHFRLLLGPDGISPIARNSRPVQHMGNRVVSLNCFCPYDAAQLSRMHVELCQAQAQEEHEEERIEQEQQLELERELERQRESDLKAQQEQASEAAIAASEDEGQLIETIDTTTIITSSSNTSICMTTLMRKDSPRQLEQPSQMPMMAPNQGNFCNPGIVIFSGVNESKSKCGIHQDTPEELMIHNRGTGRNMGVQNGCKADAFCGVGDGVNIGIRMELVEIRSCAAAKRCQIADERLGVEGPSARVIVKDFAGKRTGFAPVKPLQAQKYPGGARTQTQTQTQTQTPKRGRNKRSSTADGPYHRRCVEMFLSARLRVIIDFSVVFPLRGGGCQTLPPLPTPLTALSCFKFPMIWQLFSGRQLRACLIIDKKPNIGQNENSILP

SEQ ID NO: 14635 - DNA, 7503 bp, DROSOPHILA
gattgccgtggtcgtgcgccgcgggagaaatgcccttttcgtgtacgcaattactaggcaaaaaggtttggacggcccttgctttattaggccataatttacgctgtcgagcggccattagagcggcatccgctggccaagttggtctataaaagcccggcggctgcaagtggcgttttccattccacgtgaaaggacactcgcagtcgggccgacgagatgctgcgccacctgctccgccacgagaacaacaaggtcttcgtcctgatcctgctctactgcgtcctggtcagcattctgaaactctgcacggcacagccggatagctctgtggccgccacggataatggtatttgataaggcatttgataatatcatattattcgctctaatggattccatttaccatccagatattacgcatcttggcgacgattgtcaggtgacgcccgtcatccatgtgctccagtatcctggatgtgtgcccaagccgattccctcgttcgcctgcgtgggtcgctgtgccagttatatccaggtgggtgttgatatacttgaaatataaattataatttgatataatctgatgactttaggtttcgggcagtaagatctggcaaatggagcgttcctgcatgtgctgccaggagtctggtgagcgggaggcagccgtctcgctattctgtcccaaagtgaagcccggcgagcgtaaattcaagaaggtcctgaccaaggcgccattggagtgcatgtgtcggccatgcacttccattgaggagtctggcatcataccacaggaaattgccggctattcggacgagggtccactcaacaatcacttccggcgcattgctctgcaatagattcccccatcagtttagcactcatacccatgcccatttgctcattaaaataaattagagttgccgtttctgcttgtacacagtgaaaaatgtgcctctgaaagctcatgccagtgaaagggaaacatcagcagatatatgattattttaaattgtaatttatttcccaactatctcatgtcattgctactagttcactaaatggtgtgtgtcctgcttcacagggtatgtatgtagatgcgtaactccaaagaaaacaaagataatctttacactgcaactggatctaacaataggagtttaactacggcataatgcatatgactcgcgccgcctacaagtactcgacgatatcgcatttgatggatatattcggacagctctggcccacggcactgcggccccgatagttgggactcttctcggtgaggagtttccggaagatgggcaaaattgccgtctcgccctcgagcagttccgtctcgctgctggcgccgtagatgctgctatcctgcttgccgcgctgcctgctccgctgcttatcgggcgccacattgggcgaactgtggtggtgggcggcgtgctggatgttagagctccggctgaccttacgcggctggacgcacggctgactgttgggcggcggatctcgttcccgttcgctgtccgtctcgctctggcaaacggtgcccttttgcggttttggccgatgtttgttgcggttcttctcggagacggaccgctggatgggcgaggtggtgttcgggtcataggtcatcccgtggccgccatgatgttccgcacagcgctgcggactggcgtagttccgcggcgactggcgctgcttggcgtgcgacagcgtgtgcgtgtcccagaggtcactctgtgaaaccacgaaattggacttcagagcggagcccatgctggtgcggcgatggtcggaggcagtgggagctattttcgattagaaaatcgatagtattatagtattataagagacgcgcagaaaacttactcttaatcacagccggagtactgggctttgagtgtggacacatgttgctcaactccgattgcgatgtggagatgttggtggaggagttccggtgcgagctgctgtactttggccgggcggtgggcgtctggctgccactgtcgtagtgcctggaggcggtcgattgacgcctctcccgcatgctggagcagtctcctccgctccgcttgcccgccgtactggtgatgctgcctatattatcatcggtctgagcggacaccgagtttctcttctccagatggcgatgatgatgctgctgctgctgctgttgctgttgcatctgctggtgttgctgctgctgcaggtgctgctgctgcatctgctgatgttgctgtaagtgctgctgcagttgctgctggatgggctgcatcatagttggagcaggggcatgcgagtggtgctctacaatcgattgctttttctttttgctgttggagaatatccatagattagagtgtatttaagaccaaaatttaagaacttacggaggaagcgatggcgccatcactgtagactgcaccgacacaaaggagttatccatctccacatgagtcgaggtcacactatccacggacgtcatctcggtaacttctatgacaaacgggttgcaatgcatgaacatatctacgaaatccccctccttagccactcacctgtggtgctgggcatctctcgacgcaccggtggagctgagagcctaacaatgtcatcgttcagtatgggctccagttcgctaccgacgttggagccacctgtgcaggtcaccccatcgatccatttgcgtgcctcgggtcccagcttgcggattaaggcctgcagctcgttctccttctccatcagcgcctttcggaatcggcagtttgtgttctttacatctcgcaatcgttgctccagttcgcacaccgaggaatcccggcgtccgtttttggacatgggtctcaacgtggccctaacgcgtttgtccaccacgccctggggattccgcttcagctccaccaactgcaaaacgattcgcatgaatattaaccaaagattatactacgcggtcaacatctaggaaggatcaactctacggacagtaatataggatagttaaagatattccaacagcaaggaagtgggatttgcctacaaccttgctgctgctcttagtgggttctatatagttcaagtttatagttagtctgtagtgttatatagcattttaagatctgttttcgagtacatgttgtttctgtatcaaggtgtatcaacgctagacgaaagatcagctcagctggcggtaaagtacgatcagttaagaagctctaaccacaactgatcggcctattaccgccgacaaacaacattcatattacacgattattatatgtaacatataacagctacaaaaactacaaaacttccttactaccagtcttactttcggtacgaacaccaaacacaaagtggctgtcgtacaaaaaatgataaaaaacgagagtaagacaaaaactaaatcctttcgatccgatagcaccagggatatagccgctccggccagacaagtgatgaacacgttataaacggagaaaccaatatgcttggaatcgttcagagccggtatagaaacatgtcgagtttcccaggccaaaaaggcgccaaaaacctattgaaaaaaattattgctttattataatgatatcttacaaattaatgtttattatatactcaccaacaacagtcccttgtaggcataaataatgctaacgaatatggtcatgtgctcagactggcagtactcgttttcggggatcaccaagacatcatcaatattctcgtgatgctgtagttaataataatcattttagatttttcacttcaaatatgttctatcaatgcactcaccaagggttccaactgtttagtttcgcggtaaaagggatcggcaatctgccaggtggttataatggctatatcaatggccaaaagcacgcccacaaccataaacaattgatagtccttgatcaccttcttattgagcttcagatcggtgaatatcgaatgcacccgccacgtcttcgagaacatggctccaaaactgagactgaatccagccatcaagatccaggctcgagctgtgcagatatagggaaaagctgccacactacttaatgtggtatcgagacccaggaaaatgatgctcaaataggtcatcatacagcccacaatgatcagattgttcaaatggggactggacatcttgatgtatctataaaaacatcaatattttattaaacgaaattgtttaatatagcattgttaagctcacctttgattgcgatacttaatgttaaaggccagaaaaactgtggcaataatcactccaatgaccgaagcactagccgatacaatatatatggttggattgacctgactgtgctcgatgtagatcaaagtgcgatccttgggaggagttttccccacccatttgactggttttcccaagcttaaatccaagtgtgacttctgtgagtggtattccccgatcttttccatttgtcccagctgaaactgattgatcaggatgttggccttgcgctcgttgttgtagaaacgcacgggtcccttgagaatgtaaaatatgttttaactgcaaaaactggattgtttatctatctaccgtcacaccctcgaaggatgtattacgtagagcctcaaggaagacactctcccagtccttcacgcgataatcaaaatgtgttagcagatcctctcgcttttcggccacatactgaatggccagggcagctgcccagataccatcgtaggtatagccatgaaagcgggaatattcagtgcctcgcagtctgtcgtactccacaagatactcatcagcagtctagtaaaatatgaaatttattacaagaattttaatagactttactggtactaacaatgccagccactgtgatgtcaccactggtggacaagggcaaaagatccactagaatggcaccttccaaggctgtagcgatctcctccacactgcactcgctgtcctgcgtgacattccaccaatccgtggaataggtagccatgatcagccattgataggctctgccatacatatccaatctggaagggagtttattgcaataattttaaattgagacttaagttagtatatccaactcacttataagcctcacagaatgccttgcgtgcaaagtgctcgttaaagttgcccagaatgatcctcacgtccttctcgcgcagtttcttcaatgattcagccacatcgttgacgaagctctgcgtttccaccacctcgacctccatggcatccaggtcagccaccatgtgattgtggggcagcgaatagcgtggctcattctggtagacagtgcccactctggtccaattgaactccttcagcaaggccagtcgcggcgcattaaaggcattctccgagggtaccacgcgaaagaaattcggaaacgcatccttggtgaacatgggatgggtgtccgcgtagctgagctgggtgaggtgccagtgcttgctggccttggctatgggatcggtcacatgggtgcacgcagcgccgaagagcatcactttattgggacccgaatgcatcatatcgaagaaggactttacgcccacagcagcattgcactggaaaggaaaccaaaattacattccagaatatatggaaatatgcataggtaaaggtgtgatattacaatatgaaccaatgaacattaaaaaaaatacctaattgaactttaaaaaccacaagtccatcatcagagattcacttaatgaaatcttcaagctaaaccctaactcacctgagtgtcgttccaccacatgtgcagcctgtagttggccagtatctttccatgctcattaacgtgacccaaggcgagctttacactgggcataacgccccgaccggtgtaggagttttccacgccatccccgtacgggaagaatcccgctatgtagacgtccgatctcttggctgtcctgccacaggcggtgctccaaaggagcaggaacagcaggctggcgaatggaaaccaacttggccggaacatgttgaccgcgtgggctgtaaaacgattctaaatgtgaatagcgcatatcgaggacgtgaacttggagccaagttgtgggtggtgaatggcagtggttggtttcgggtgagccaaggctgccgaggcaaggctgcgcccagtgggtgtgtattattttctacgttctacctgtgtttgctggcactcgcatgcaattttacaggacaggtggagcaaggctaaggccagtccaggccagcaaaattgcttcaaattgctgcagcaatgctggcacgtttagtaattataaagcaatttaatgatctaaaggattcgtgcattatttagtatgctcgttaacgcgaaggagtatcttccaggtgttgcatcctcttaaatcttatgtgtacatgtttttaggaacctaccagcttgcttagtcccagaactggcttttatttcactaccgatgccatttgaaacacttattttacatcaaatctcagccaacgaagaacttttgcagtgcgagggtccgaaaaattatgtatccccctgacttgacatttgtctgacaggaggaattcgaggcaggaagtgcgcatgtccttaaaccgaaagctgtcactgctccgccttggcctaggctttccaacccccgtaattaccataaacccactgcgcttgtaaacatcctgcaacaggtggtcccatcagctggtactccggcaattgttgtgcccgttgccatggactactggggtcgaaaaacgaagtagataactgctcggaaaattaccaaattgaaaattgtgagtaaccataatggaggactatgcgcccagccgctataaaatgcttgagaaaatcggcgaaggcgtccatggctgcgtgtttaaggccatcgatctgcagcgcaacaaggaggtggccatcaagaaggtggcccttaagaacaagttcggaaacatagccctaaatactttgagggaaatcaagaccctgcagctttgcaagtctgaatatgtaggtataccatatatctattttccatttgttaattatgtaactaattgtagattctggacatcattgatatatatcctgacctaactggtctctccttggtgctggaataccagccggacactctgtacaaccgcctcaagagcgaggttaatcccctgagccgccagcaggtgcgtaagtttgcacaccaaatgttcaaggggattgcatatctgcatgaagcgggtctcatgcaccgggatattaaacccgccaatctgcttatcagcgatacagatatgcttaagattgccgatttcggactggcccgtctgtacttccctgaagacgagtcgcgcctttattcgcctcaggtctcaacccggtggtatcgagcgccagagattctatttggcagccagaagtatggaaccggagtggatatgtgggcggcaggttagccatgactctttgatgggtttacatatatccttatggctgacattattgctat

SEQ ID NO: 14636 - DNA, 3971 bp, DROSOPHILA
aaaagttcttcgttggctgagatttgatgtaaaataagtgtttcaaatggcatcggtagtgaaataaaagccagttctgggactaagcaagctgcccacgcggtcaacatgttccggccaagttggtttccattcgccagcctgctgttcctgctcctttggagcaccgcctgtggcaggacagccaagagatcggacgtctacatagcgggattcttcccgtacggggatggcgtggaaaactcctacaccggtcggggcgttatgcccagtgtaaagctcgccttgggtcacgttaatgagcatggaaagatactggccaactacaggctgcacatgtggtggaacgacactcagtgcaatgctgctgtgggcgtaaagtccttcttcgatatgatgcattcgggtcccaataaagtgatgctcttcggcgctgcgtgcacccatgtgaccgatcccatagccaaggccagcaagcactggcacctcacccagctcagctacgcggacacccatcccatgttcaccaaggatgcgtttccgaatttctttcgcgtggtaccctcggagaatgcctttaatgcgccgcgactggccttgctgaaggagttcaattggaccagagtgggcactgtctaccagaatgagccacgctattcgctgccccacaatcacatggtggctgacctggatgccatggaggtcgaggtggtggaaacgcagagcttcgtcaacgatgtggctgaatcattgaagaaactgcgcgagaaggacgtgaggatcattctgggcaactttaacgagcactttgcacgcaaggcattctgtgaggcttataaattggatatgtatggcagagcctatcaatggctgatcatggctacctattccacggattggtggaatgtcacgcaggacagcgagtgcagtgtggaggagatcgctacagccttggaaggtgccattctagtggatcttttgcccttgtccaccagtggtgacatcacagtggctggcattactgctgatgagtatcttgtggagtacgacagactgcgaggcactgaatattcccgctttcatggctatacctacgatggtatctgggcagctgccctggccattcagtatgtggccgaaaagcgagaggatctgctaacacattttgattatcgcgtgaaggactgggagagtgtcttccttgaggctctacgtaatacatccttcgagggtgtgacgggacccgtgcgtttctacaacaacgagcgcaaggccaacatcctgatcaatcagtttcagctgggacaaatggaaaagatcggggaataccactcacagaagtcacacttggatttaagcttgggaaaaccagtcaaatgggtggggaaaactcctcccaaggatcgcactttgatctacatcgagcacagtcaggtcaatccaaccatatatattgtatcggctagtgcttcggtcattggagtgattattgccacagtttttctggcctttaacattaagtatcgcaatcaaagatacatcaagatgtccagtccccatttgaacaatctgatcattgtgggctgtatgatgacctatttgagcatcattttcctgggtctcgataccacattaagtagtgtggcagcttttccctatatctgcacagctcgagcctggatcttgatggctggattcagtctcagttttggagccatgttctcgaagacgtggcgggtgcattcgatattcaccgatctgaagctcaataagaaggtgatcaaggactatcaattgtttatggttgtgggcgtgcttttggccattgatatagccattataaccacctggcagattgccgatcccttttaccgcgaaactaaacagttggaacccttgcatcacgagaatattgatgatgtcttggtgatccccgaaaacgagtactgccagtctgagcacatgaccatattcgttagcattatttatgcctacaagggactgttgttggtttttggcgcctttttggcctgggaaactcgacatgtttctataccggctctgaacgattccaagcatattggtttctccgtttataacgtgttcatcacttgtctggccggagcggctatatccctggtgctatcggatcgaaaggatttagtttttgtcttactctcgttttttatcattttttgtacgacagccactttgtgtttggtgttcgtaccgaaattggtggagctgaagcggaatccccagggcgtggtggacaaacgcgttagggccacgttgagacccatgtccaaaaacggacgccgggattcctcggtgtgcgaactggagcaacgattgcgagatgtaaagaacacaaactgccgattccgaaaggcgctgatggagaaggagaacgagctgcaggccttaatccgcaagctgggacccgaggcacgcaaatggatcgatggggtgacctgcacaggtggctccaacgtcggtagcgaactggagcccatactgaacgatgacattgttaggctctcagctccaccggtgcgtcgagagatgcccagcaccacagaagttaccgagatgacgtccgtggatagtgtgacctcgactcatgtggagatggataactcctttgtgtcggtgcagtctacagtgatggcgccatcgcttcctcccaaaaagaaaaagcaatcgattgtagagcaccactcgcatgcccctgctccaactatgatgcagcccatccagcagcaactgcagcagcacttacagcaacatcagcagatgcagcagcagcacctgcagcagcagcaacaccagcagatgcaacagcaacagcagcagcagcagcatcatcatcgccatctggagaagagaaactcggtgtccgctcagaccgatgataatataggcagcatcaccagtacggcgggcaagcggagcggaggagactgctccagcatgcgggagaggcgtcaatcgaccgcctccaggcactacgacagtggcagccagacgcccaccgcccggccaaagtacagcagctcgcaccggaactcctccaccaacatctccacatcgcaatcggagttgagcaacatgtgtccacactcaaagcccagtactccggctgtgattaagactcccactgcctccgaccatcgccgcaccagcatgggctccgctctgaagtccaatttcgtggtttcacagagtgacctctgggacacgcacacgctgtcgcacgccaagcagcgccagtcgccgcggaactacgccagtccgcagcgctgtgcggaacatcatggcggccacgggatgacctatgacccgaacaccacctcgcccatccagcggtccgtctccgagaagaaccgcaacaaacatcggccaaaaccgcaaaagggcaccgtttgccagagcgagacggacagcgaacgggaacgagatccgccgcccaacagtcagccgtgcgtccagccgcgtaaggtcagccggagctctaacatccagcacgccgcccaccaccacagttcgcccaatgtggcgcccgataagcagcggagcaggcagcgcggcaagcaggatagcagcatctacggcgccagcagcgagacggaactgctcgagggcgagacggcaattttgcccatcttccggaaactcctcaccgagaagagtcccaactatcggggccgcagtgccgtgggccagagctgtccgaatatatccatcaaatgcgatatcgtcgagtacttgtaggcggcgcgagtcatatgcattatgccgtagttaaactcctattgttagatccagttgcagtgtaaagattatctttgttttctttggagttacgcatctacatacataccctgtgaagcaggacacacaccatttagtgaactagtagcaatgacatgagatagttgggaaataaattacaatttaaaataatcata

SEQ ID NO: 14637 - protein, 1221 aa, DROSOPHILA
MFRPSWFPFASLLFLLLWSTACGRTAKRSDVYIAGFFPYGDGVENSYTGRGVMPSVKLALGHVNEHGKILANYRLHMWWNDTQCNAAVGVKSFFDMMHSGPNKVMLFGAACTHVTDPIAKASKHWHLTQLSYADTHPMFTKDAFPNFFRVVPSENAFNAPRLALLKEFNWTRVGTVYQNEPRYSLPHNHMVADLDAMEVEVVETQSFVNDVAESLKKLREKDVRIILGNFNEHFARKAFCEAYKLDMYGRAYQWLIMATYSTDWWNVTQDSECSVEEIATALEGAILVDLLPLSTSGDITVAGITADEYLVEYDRLRGTEYSRFHGYTYDGIWAAALAIQYVAEKREDLLTHFDYRVKDWESVFLEALRNTSFEGVTGPVRFYNNERKANILINQFQLGQMEKIGEYHSQKSHLDLSLGKPVKWVGKTPPKDRTLIYIEHSQVNPTIYIVSASASVIGVIIATVFLAFNIKYRNQRYIKMSSPHLNNLIIVGCMMTYLSIIFLGLDTTLSSVAAFPYICTARAWILMAGFSLSFGAMFSKTWRVHSIFTDLKLNKKVIKDYQLFMVVGVLLAIDIAIITTWQIADPFYRETKQLEPLHHENIDDVLVIPENEYCQSEHMTIFVSIIYAYKGLLLVFGAFLAWETRHVSIPALNDSKHIGFSVYNVFITCLAGAAISLVLSDRKDLVFVLLSFFIIFCTTATLCLVFVPKLVELKRNPQGVVDKRVRATLRPMSKNGRRDSSVCELEQRLRDVKNTNCRFRKALMEKENELQALIRKLGPEARKWIDGVTCTGGSNVGSELEPILNDDIVRLSAPPVRREMPSTTEVTEMTSVDSVTSTHVEMDNSFVSVQSTVMAPSLPPKKKKQSIVEHHSHAPAPTMMQPIQQQLQQHLQQHQQMQQQHLQQQQHQQMQQQQQQQQHHHRHLEKRNSVSAQTDDNIGSITSTAGKRSGGDCSSMRERRQSTASRHYDSGSQTPTARPKYSSSHRNSSTNISTSQSELSNMCPHSKPSTPAVIKTPTASDHRRTSMGSALKSNFVVSQSDLWDTHTLSHAKQRQSPRNYASPQRCAEHHGGHGMTYDPNTTSPIQRSVSEKNRNKHRPKPQKGTVCQSETDSERERDPPPNSQPCVQPRKVSRSSNIQHAAHHHSSPNVAPDKQRSRQRGKQDSSIYGASSETELLEGETAILPIFRKLLTEKSPNYRGRSAVGQSCPNISIKCDIVEYL

SEQ ID NO: 14638 - DNA, 4799 bp, DROSOPHILA
cagctgctgcggcaacaacaacgaaaacaacgaggatgatggtgatgagcagcagcaacaacaacaacaacaaatagctacgacgaagtttcccatacaacaacgcactgcatggaaatgaaatcatcggtgattttttcgtagaattccagtgtttatacctagaattttatacagcacgactgtccacatttactacttacactttgcacttaattttgctacgttttgtttgttttatttacataaaatcagtgtaaatagttatgctcgtaaaaatttaccactactccaaaaacgcacaagccaaccctggcttgggttgccagtgttggccaatagatgggcatttgccgtttccagccctggtcaacagttgttatttgaaatttaatcaacatataaagttttactcggcttttttttgcgtttacgtagttttcttatatattccaaatcatatttctctaatggacgtgctgtgaacgttatcgatttgttggccggcgcatcgttgctggtatcgtccgaaatatgaaactcagagtcggaactatcttcaattatttgagctgagcttagtgttaaatcacgagtggagctgggagtttgtggcagtgctgcaacattttcgccaactacgcgcatgggcagcgcatgataatgatatgatacatttcgacaggatttgcggcgtagtttgtgttttctgcttgtttcaaagtcacttgaacttgtggacgtgttatcgtccccactatttgagccttccccgcttacagaatccttattgtcaattttattggagtttttcgtgattttagacatatttgttttaagccgcgctggattgttttggttccaaaaatgaacaatttttcgctgatctgtttctggttctttaccaagtacaacgatgtggcaactccctggcagggccgcaactgaaaaatctcaaacgggacatcgttgccagatagctagccagagtgtggccagatcgcagcgactgcagtgcattttcaacaaaaataaggtaaaatatagcacaattatggccagcaattgttaaacaattaacgcaattgccagtattataaccaaatgtcaactgtgtgagtgcgacaatcgagctcgcgtgggcgttgcacatgcagcatcatcgaattgattaattgcggcgcatgccgaaaagtgaaaaaagggaggatgtgtttcaatcaacgcgagtgaaaaccgcgacgaacgaagaaaaaaaaaaccaaactactgcggcaatcgtgaacaaagagctcgttgcgtccgaaattatgtggcacagcaactaaactattggatttcccactcattttccagttgaaatcaacgcgttgcagcagcccccgcagcaacagcaacaacaaaacaaaggcaactggaagtgcagcctaacgggaattgctccagcatatagagattatagtccacacatataaatatccatttatcggaagatagtccacaatggcggatccagagcgacaaagcctgatcaacaaggacgacggcaatggctacaattccgtggacgccgtggacgagggtgccgataatcccggcagcaactcatcggtggccacaaacgaggacggtgcgtatcgttactgtaaagccgggcattcaacccgcatccaatcagccgggcgggcaacccattggaagcccaacaagtgtgcgggcgctccacttatccggatccaacgccgtgattccgagttgtctgctcgccgtctcatttggcattttcacacttcacccaactgagtcataaatgcgtgtggtttggtgcggggggagagcaatgggactgcacagaaagaaaaactgataggatatgtggtgcccaaatgccattttaaattatctgccatttttttattttttaatagggcccagtattattggtattaccaaaaatttacaacctaatataaaattttcttattggcctaaatatcaaatgggccacgtacaccataaaaaaaatgtaattttatcacgaaattgtgaagagctgccaaaaatgtaaagatcgattgtagttagttactcgacgccggtatcggcaaaatttttgcaccgcctttgttattgtttatgctaggacgctcgtaatcagcgcaaaaagcgttccccacagctgtttaatcagcatcgattcggaggtgttgctatagtggtggttaagcgggggcagtcaatgagtccatgagtcatcatgtcattcgctgccttatcgcaatacagggcgaaaatgagggtctgcgatgagcagtggttccattgtttaccaaggaacctgatcttcagctcggaaaaagcttgtccatatcattaatatatacaagagtttagttacaagggctttacgactttccatgttcccaattaatttgcataggttatctttctgtattcctttctttttgacattatatatttatttagccaaagtaatatgactttatttgcaatttatccacttcatatcaattttcctaaagagtgtgtgcgatgttactctttgcgttgttttcatttaaaaacgtctttcacaaagttcgaacttgttttgatcgagagacgagaaccacaactgcggtctagttgcactagtttaatgcttgtacgagaaagctgcattcataacgccaaaacattgacccatttggtttatcgcagcttcccagagccacacactgcacactatcagaaaatgcagttctcactccctccatgagccaatcaccgccagatgagcagtgtggttgagcgaactctgctggcgagatgtatttattctacaccaaaggtctcgcctttgaagggcatgggtcttaacaatattataagtagttaataatactttgcaatggaattttaggcaatggagcaccgaccgcagtgccttgcattggacccgatgagctgccgccgccgtatcagcagagtaccaacaccggaggcgtcccgatggtcacctgtcgggtatgtcaacacatgattgacatcaccacgaagcgggagcagcacgtggtcaagtgcacccactgcaatgaggctactgtgagtaattctaagcagattctttgaatccaattgtaacttaatacgcttttggctatcaacagcccattcggaacgctccagcgggcaagaagtatgttcgctgcccatgcaactgtttgttaatctgcaagagctcgtcgcagcgaatcgcttgtccaaggcccaattgcaagaggatcatcaacctggccccaagtcccgtcaccccgcccgtgccaaccatgccgggcatgtgccgcgtcacttgtggccactgttcggacacgtttttggtgagttattaatccaaatcacagcagcaggagtcttgtaacgcttgctcttacagttcaacacgtatcacaacgccttggcccggtgtccacactgcaggaaggtctcatcggtgggctcgcgctttgccaacagccgcgccgtgatgttcgccatcgtggcgctggtgttcctcatcacaggcatcgctgtaactatcggcacatactcgattgcttcggtaagccaaatcaatttaaaatcaagctgaagtatgtgattttctaaacccatatgtgtgtttccttttgcatttttccaggatcatggtggcatgtacttcctctacgtggcgctgttcgtgatttcgggttgcatgctggccaggtccgcctactatttccgccttaaagtgagcgccatcgatgggccaatgtaaagctaaagcacggggccagtagcaaggaagaaagtgcattgttttatttttatatatatatattattcatatatatcattccttttgatattaaatttaaaactaaacacaagcagccaatttgcagacggaacatatgaacatttctccagcagttcagctacatacaaaaattcttcgtttcgagcaaaactaatagcaaacctagctaaatttacgaaagaaggtctccccgttgaagagcataattaggatattaaggccgtaactaactaaacactatactaaaagcgaatatttcaagggtcgccgtgcagctaccattcaagtgctaaaagtaaaaaaggaaaaccccgatctgtgttggcagtcattagttattagaccagcgaccgatcaatccacagtgcatctcatttttagaatcgtcaggatccattttaaagattgtacagtttcgttgtttaagtgtccgatttgttatccgttcgtgcctgtcctgcaagatatttcggtattcatacattacgtattcgttgatacgcttttgagttttgtgttgcctaaaatttaaccaatgcactttttctcagttctcgccaaagcggaggaaagcgttttgttgcctggcgttagaaacaatttgaagggtatgctaatagtgctaatgaaggtacatacacatacgcgcatatacaataccataaatacataattataatgcaaataaacaaagcaacatttcttgaacaacagagaacaagcaaacgctcatgcagatataaagaaaattaatttagacagcaactgctaaactgcgaaattgcatatatatatatgattaaaaggaacggtttacttttgaaatatatatatatatatacaacaacatttatatttagtacattataaattagcatacatacactgtaaataaaaagaaataaaaccacaagcaccaccaactttttggcgacaaaatgacaaggctatgaaagta

SEQ ID NO: 14639 - DNA, 984 bp, DROSOPHILA
tcgcagcgactgcagtgcattttcaacaaaaataagttgaaatcaacgcgttgcagcagcccccgcagcaacagcaacaacaaaacaaaggcaactggaagtgcagcctaacgggaattgctccagcatatagagattatagtccacacatataaatatccatttatcggaagatagtccacaatggcggatccagagcgacaaagcctgatcaacaaggacgacggcaatggctacaattccgtggacgccgtggacgagggtgccgataatcccggcagcaactcatcggtggccacaaacgaggacggcaatggagcaccgaccgcagtgccttgcattggacccgatgagctgccgccgccgtatcagcagagtaccaacaccggaggcgtcccgatggtcacctgtcgggtatgtcaacacatgattgacatcaccacgaagcgggagcagcacgtggtcaagtgcacccactgcaatgaggctactcccattcggaacgctccagcgggcaagaagtatgttcgctgcccatgcaactgtttgttaatctgcaagagctcgtcgcagcgaatcgcttgtccaaggcccaattgcaagaggatcatcaacctggccccaagtcccgtcaccccgcccgtgccaaccatgccgggcatgtgccgcgtcacttgtggccactgttcggacacgtttttgttcaacacgtatcacaacgccttggcccggtgtccacactgcaggaaggtctcatcggtgggctcgcgctttgccaacagccgcgccgtgatgttcgccatcgtggcgctggtgttcctcatcacaggcatcgctgtaactatcggcacatactcgattgcttcggatcatggtggcatgtacttcctctacgtggcgctgttcgtgatttcgggttgcatgctggccaggtccgcctactatttccgccttaaagtgagcgccatcgatgggccaatgtaa

SEQ ID NO: 14640 - protein, 266 aa, DROSOPHILA
MADPERQSLINKDDGNGYNSVDAVDEGADNPGSNSSVATNEDGNGAPTAVPCIGPDELPPPYQQSTNTGGVPMVTCRVCQHMIDITTKREQHVVKCTHCNEATPIRNAPAGKKYVRCPCNCLLICKSSSQRIACPRPNCKRIINLAPSPVTPPVPTMPGMCRVTCGHCSDTFLFNTYHNALARCPHCRKVSSVGSRFANSRAVMFAIVALVFLITGIAVTIGTYSIASDHGGMYFLYVALFVISGCMLARSAYYFRLKVSAIDGPM

SEQ ID NO: 14641 - DNA, 2534 bp, DROSOPHILA
ttataaattagcatacatacactgtaaataaaaagaaataaaaccacaagcaccaccaactttttggcgacaaaatgacaaggctatgaaagtagaatagagtgccttgaacttgacatcggacatcggctgggattttcgatttcgattacatttttaaagtttttaagttccttggccaagatgtcatcattggctccttgctttactgtgggctctattgtgcgctgcaagacttgttttggcgacaacatttcgggcgaggtaaaactaaatattatttattatttttatgattatgtaatgctttcaatttcccaggttgtggccttcgatctgggcgtgaaaatgctgataatgaagtgtccatcaagcaatggcggtggcgacgaacagaccacttgcaatgtgaccattgtgaacctatccctgtgcatggacattgaaatagtaaaggaagcaattccgccggctgaagttcaacagccagaaccgattgatttgcccatggtagaagcactctctatatagatatttaaaagaaaccccattcaaccatttgcaattgcagatccgagaacgataccgatacgcaaccgaacatcgtacgctctcctgccggagctatcatcccaatgcctcgccctttggtcaagctctgttcagactgttagtcaagcgattcggtgatcccgctatcatctggcagaacaaaggcgaccaagtggcgatcaatatactccgtcaggtggtcatcgatgcgccgtatgccacggagaatatccgatacctcgattggaatcccaagctggcgatatgcgtccaagaggtcgttcaaaacttttgcagtaaacaattctagaacgatggcccgtgcccatggcaacagttgtctagatagcatccgattctctgtacgttttgtttatcaacaaaacaattcaaaatacacatacatatagccatgacacccacacagaatactgctctttatctgccaggggaaaccattctcgtttgtacaaattcgatttaatacactacaccacaacacccaacacacataatacacgatggccgatgatgaagataaaccaaagaagcacacgctggacagcctgttcttggtgtattccaacttccaggtatgatgaatgacccggttaattgaagagtaattttcatctaaatgatgccaggtcatacccaccgacatcgagaacgagtactttgacagcatactcctctcgcagttggacgcctggctagagcaggccaagctcatgcccaatcccataactcgaactcagaccggtttaatatacatgcgatacaagtgagtaactacatcaaatctacatatcattcttaatcaaatacatgtttcaggaaatggcgtttggagtacgaagactttctcgaggtcctaaataacttggcatccgataacaatctggctatagatgaaatgaagcaaataatgatcgatgctggcgtcccgaatggtgctgatgtagttatagtcgtcaagtagattgaatcatcactgcattttatttatatgcatacaaaaagtcggacaacaaattattaatagtaacaattgcatacaagagtaactttgattaattcacaaaaattatagtaaaatataaaagcatccaacaaaaagagcctctaaacccgattggttaatttcagttagttaaacacttattttgacatagagggtgcctaattaaggtatgttttgagattactgatctgaaaactaaatacaaaatatatgcgtattacattttttgatgtgattcaataaattgactgatattctgaaattctgcttaagcttataaatattcgatgagttggttggcttgttcgcttcgcgttactttcctgataataataacaacgtttgtttgggtaacagagtttggctggacttatttctagcacctgggcaaatatgtggactgctcggagctaacgatgttacaaaaatacatgcttattcattccgtatatctaataaatattgtcgatgcgttctaatggctttccgagcgtctcatagcgattgtaaggtaataatgcactgtttgtactagtaaatttccggctcttgacgaggtgcatggagtggatttgctattgatgcttgctcttagtcatccctccagttgcgcagcatggtaaaaaaaaatctatagcgttaattttttgaattgtgtatgcgggatttatactgtttaccgtgcatactcgtagcaacctcgtgccgttccaaggccactccaatttcgccacatgatttgtatttccggatatggtcatatagataagattctcttgttggctcagtgagtgtatctctttgcatcgccggatcgcattgtcatggatttgtgtgttggctttctcatttgaatgcatgaataatatgatgcacaggtagattaagtatacgtcgcacttaggattagattagtagcaattgcaagtaatttaagagtaaattgttcgctccagcc

SEQ ID NO: 14642 - DNA, 427 bp, DROSOPHILA
ggggaaaccattctcgtttgtacaaattcgatttaatacactacaccacaacacccaacacacataatacacgatggccgatgatgaagataaaccaaagaagcacacgctggacagcctgttcttggtgtattccaacttccaggtcatacccaccgacatcgagaacgagtactttgacagcatactcctctcgcagttggacgcctggctagagcaggccaagctcatgcccaatcccataactcgaactcagaccggtttaatatacatgcgatacaagaaatggcgtttggagtacgaagactttctcgaggtcctaaataacttggcatccgataacaatctggctatagatgaaatgaagcaaataatgatcgatgctggcgtcccgaatggtgctgatgtagttatagtcgtcaagtag

SEQ ID NO: 14643 - protein, 117 aa, DROSOPHILA
MADDEDKPKKHTLDSLFLVYSNFQVIPTDIENEYFDSILLSQLDAWLEQAKLMPNPITRTQTGLIYMRYKKWRLEYEDFLEVLNNLASDNNLAIDEMKQIMIDAGVPNGADVVIVVK

SEQ ID NO: 14644 - DNA, 6044 bp, DROSOPHILA
cagcgatgatacgttggctgatggcagactaggataaagtcctgatccagggtatggcgtggcactggggtatggagccggcgctgagggggcttctggcacgggcattcccatgcccatggtgggtcccgcatacgaagcattctgggcatgactcgtctgctttaccacatatggcattccgcccacggattcggatgatggatagggcaacgaggggtagagacccgctttgggtttgggagctcctcctccttcgttcccgccgctgacttcattcttgctgtagcccaaggccgccaaattgacaaggccaatgccactggcatgataattcttggggtaattatcaatgccgtacatttttactggtttttcgctgtggttttcctcgtccacgcactggtttttccctaaatctaactactaatggcgttgcaaatcggctaaaactacggaactggatgatatccagatgtttattaactcgctgccgtggtaaaactgctgactcgctgagaatcgtacgctttaaatgggagaagtatccaaatttaactttctcggtaaatgattcataatctttaacccttgcgcgttctgtataaattttctttgaatatgcatgtgcaatcaaaaaagctttgaaaatgcagaatgaaatatttataacattctaattcatttattaactcagaaaatatattatagaaatattaattttgttttattaaacagtttcaataaaaacaaatatagcttttaataaattttagttttctaaaaaatgtatttttatggtattagagaagtagttatgtagtctatattgtttacgaacgtaaactattaaattagtgtcaatattgaagacccaacacgtttcgagggttaaaaaaaggcgagcagggctacattgtcgcgcagagttgccatctttatccgaatgaatttggtatttttttagccctgtcggcattttcaatagaagaagaagaagttaaacagtgctgtgtttttttttataacaaacgcaaattagttaataaattctggcgcagaaccggcatttgagcgatggaaacgcaacctgaggtgcccgaggtgccgctgcgaccgtttaaattataagtattcaccctgctctgttaggaatccaaaaataatgagttctcccttttgaatagcacggcgcatcaggttgtgagcctcacgggcatcagtttcgagcggaggagcataatcgtaaggatataacttagatacacttaaatatgtacaaaacataacacacctcctccctttagggcgtggtcgagctgaccattgtgccgaacagcgagaatctgcgcctgatacgcctgaatgccaagcagctgagaatctacagcgtcgttttgaacgatgtctgccaggcggatttcacgtacttcgatcccttccagaacatctgctacaaggagcacaagagccgcgcgctggaggtctactccaagcatcatctgaccgccgcccagtacaccgatcccgatgtgaacaacggcgaactgctcatccaggttccgcccgagggctactctatgatccaggagggtcagggtctgcgcatccgcatcgagttctcgttggagaatcccaaatgcggcgtacattttgtcataccacccgcttcaacggacgaggagacacagatgaacagctcgcatatgttcaccaattgctatgaaaactcgtcgagattgtggtttccctgcgtggacagtttcgccgatccctgcacctggcggctggagttcactgtcgacaaaaatatgaccgccgtttcgtgtggagaacttctagaagtcattatgaccccagatctgcgaaagaaaaccttccactattcggttagcacaccagtatgtgcaccaaatattgcgctggctgtgggtcagtttgagatctacgtggatccgcacatgcatgaagtgacccacttttgtctgcccggattgttgccgctgttaaaaaatacggttcgctatttgcacgaggcatttgaattttacgaggagaccttatctacgcgctacccattcagttgctacaaacaagtgtttgtagacgaattggacacggacataagtgcctatgccactatgagcattgcttcggtgaatctgctgcactccatagctatcatcgatcagacctatatatctcgaacctttatgtcgcgcgctgtggctgagcaattcttcggctgctttattacatcccatcattggtcggacacctggctggccaagggcattgcggagtacctgtgtggattgtattccaggaagtgcttcggcaacaacgagtaccgtgcttgggtgcaatctgaactggcgcgtgtcgttcgctacgaggagcagtatggcggcattattctcgattgcagtcagccgccagctcctttgcctgtttcgggcacaaatcaatcggcggcttccagcaaacagcaggagattgtccactattttcccatcaagagtttgcacaccgtatcgccgaagtatgtggaggcgatgcgaaggaaagcgcatttcgtaatccggatgctggagaaccgcatcgggcaggagctgctgattcaggtgttcaataagcaattggctttggcttcaagtgcggcaacgacaaagatcggtgcaggactctggtctcagctgctcatctcgaccaacatttttatcaaggccatcttcaccgtaaccggaaaagatatgtctgtcttcatggaccagtgggtgcgcactggagggcacgccaagttttcgctcacatctgtgttcaatcgcaagagaaacacgattgaactggaaatccgccaggactatgttaatcagcggggaattagaaaatacaatggtccattgatggtgcagctgcaggagttggatggaacgtttaagcacacattgcagattgagagtaccctggtaaagtccgatatcacttgccactcgaagagcaggcgtaacaaaaagaagaagatccccttgtgcaccggtgaggaagtggatatggatttatcagccatggagtaagttttttatcgaatatatgattaaacaattttgttaacttttactattacatagcgactcacctgtgctttggatccgcctcgatcccgaaatgattctgctgcgcgacctcataatcgaacagcccgacttccagtggcagtatcagcttcggcatgaacgtgatgttactgctcaatttcaggcgattcaagccctgcaaaagtaccccacgaatgccaccaggcttgctttaaccgacaccatagaaagcgaacgttgcttctatcaggtgcgctgcgaggcagcccatagcttgaccaaagtggccaaccagatggtggcctcctggagtggaccgcccgccatgctgaacatatttaggaagtttttcggctcatttagtgctccgcacattatcaaactgaacaacttctccaactttcagctgtacttcctgcagaaggctattcccgtagccatggcaggttagtttgcttagctaagcagggtgatttattttaaaacttttgcattccttttcaggtctgcgcacatctcatggtatttgcccgccggaagtgatgcgttttcttttcgatctcttcaagtacaacgagaattcgcgtaaccattacacggatgcatactacagggcagctttggtagaagctctaggcgaaaccttaacacctgtggtctccgttgctatccatggcacacaaatcactacggacagtctatccacggatgcgaagtacggttttaaactccaaaagatttgcttatattaagtttatttatttctaacccgcagacttgtgctagatgaagttacacgtctgctgaacatggagaaacatctaccctcgtacaagtacatggtgtccgtgtcgtgtctgaaggtcatccggaagctgcaaaaattcggtcatctgccctcactgccgcacatttaccgcagctatgccgaatatggaatatatctcgatctccgcattgctgctatggagtgtctcgtggactttgtgaaagtggatgggcgcagcgaggatttggaacatttgattactctgctggaaactgatccggatccggctgctcgccatgcactggcccaactgctgatcgataatccgcctttcacacgcgaatctcgcagccgtctggataaacccaatctcgtggatcgtctatggttcagtattaaccgcttgccctacgataccaagctgcgctgcgatattgtcgatctgtactacgcactgtacggaactaagcgtccgaattgcttgcaggccggcgagaaccaaagcttctacaaggatttgatgaaggacaataatagcagtgtaggcagcgtaaccggcagcttcaagaagaccagtgattcaaagtcacatttgccaacaccaacgaatactttggacaatgagccacaggagcggcaaaagccggcaatggttaccatcaagcgaacggccacagaagcatttgaggtgggcgatgagattatcaagctggaacgcagcgaggagatcaccgtgctagatgaaccagttaacgtgcaggcctatgacagtgagaccaaagtgaatgccctgcaggcagatgaagaagcacgtgatacccatcaggctgccaagcgccttaagaacgaaatgtacgccgaggatgataactcatccacaatgctcgacgtgggcgactccaccagatatgagagtagccacgaggagggcaaattgaagtccggcgatggtgggctcaagaagaaaaagaagaaggagaagaagaagcataagcacaaacacaagcataggcacagcaaggacaaggacaaggacaaggacaaggagcgaaaggataaggacaagcgtgacccgcatatatcacgcctgcaggcgcgcgagacagccactccggacactctcagctcggaggacagtagcaacagcaatagcctgccgcccatgaaccttaactaagtgagggttcttgcaggtggggaaactgcaatgtttgggggatagatgacagaataaaggtataataccttagacattacatttcttaaaggggttaacattatttgttagttttattcatatgtttatttgtcggtttataatttaacattaaggaagtgtgctgaaacatttttacaatacttacaaactagacaaggacattttaactaaaacaggacatgggtttactgcaccttcgccttcgcagactccgcctccggagctgccgccttgggctcgctgcccgccacggcggtatcctgctcatcacgcggtctcctcttctgcaacgcatggacatgggccagggcatggggatgggattgaccctcgatgggttgcaaatacgtgatactaccgccgccgatgcctgtggccgtttgctgatgcagctctccggcggaaggagtggacaggatcttgaccgacggctccgagggagcggccagcgatctgtgttgctgatgtgcagccaattgccgcgtggccaggcgcatgatgtgagcgtagtctacaggcgggtgattgcggtactccggatgatccttaacgtactgctcatacggaacgggaactggcacgggcactgccttcactggatatcccgcgtccacaagagcttggaattcggcctgggtcagtggcttgccattgggaggcggcagattcaattgcttcacttcatccagagtccgtagcttctgaataggagctgtagtgggtgtgggccgggatggtgtggcaattccagttccctgggacacatagatactggactgcgatggagacggtgagggatattcagcgtgcagcggcagagcagtgggtgtcacggctagatttctctgggaatgctttagcggatccggcggactgggatagaagttggatggcggcggtggagatggcgatccctgacgttcataatcggcatagagcaatgccttagcgggtgaag

SEQ ID NO: 14645 - DNA, 3737 bp, DROSOPHILA
ttaaacagtgctgtgtttttttttataacaaacgcaaattagttaataaattctggcgcagaaccggcatttgagcgatggaaacgcaacctgaggtgcccgaggtgccgctgcgacccacggcgcatcaggttgtgagcctcacgggcatcagtttcgagcggaggagcataatcggcgtggtcgagctgaccattgtgccgaacagcgagaatctgcgcctgatacgcctgaatgccaagcagctgagaatctacagcgtcgttttgaacgatgtctgccaggcggatttcacgtacttcgatcccttccagaacatctgctacaaggagcacaagagccgcgcgctggaggtctactccaagcatcatctgaccgccgcccagtacaccgatcccgatgtgaacaacggcgaactgctcatccaggttccgcccgagggctactctatgatccaggagggtcagggtctgcgcatccgcatcgagttctcgttggagaatcccaaatgcggcgtacattttgtcataccacccgcttcaacggacgaggagacacagatgaacagctcgcatatgttcaccaattgctatgaaaactcgtcgagattgtggtttccctgcgtggacagtttcgccgatccctgcacctggcggctggagttcactgtcgacaaaaatatgaccgccgtttcgtgtggagaacttctagaagtcattatgaccccagatctgcgaaagaaaaccttccactattcggttagcacaccagtatgtgcaccaaatattgcgctggctgtgggtcagtttgagatctacgtggatccgcacatgcatgaagtgacccacttttgtctgcccggattgttgccgctgttaaaaaatacggttcgctatttgcacgaggcatttgaattttacgaggagaccttatctacgcgctacccattcagttgctacaaacaagtgtttgtagacgaattggacacggacataagtgcctatgccactatgagcattgcttcggtgaatctgctgcactccatagctatcatcgatcagacctatatatctcgaacctttatgtcgcgcgctgtggctgagcaattcttcggctgctttattacatcccatcattggtcggacacctggctggccaagggcattgcggagtacctgtgtggattgtattccaggaagtgcttcggcaacaacgagtaccgtgcttgggtgcaatctgaactggcgcgtgtcgttcgctacgaggagcagtatggcggcattattctcgattgcagtcagccgccagctcctttgcctgtttcgggcacaaatcaatcggcggcttccagcaaacagcaggagattgtccactattttcccatcaagagtttgcacaccgtatcgccgaagtatgtggaggcgatgcgaaggaaagcgcatttcgtaatccggatgctggagaaccgcatcgggcaggagctgctgattcaggtgttcaataagcaattggctttggcttcaagtgcggcaacgacaaagatcggtgcaggactctggtctcagctgctcatctcgaccaacatttttatcaaggccatcttcaccgtaaccggaaaagatatgtctgtcttcatggaccagtgggtgcgcactggagggcacgccaagttttcgctcacatctgtgttcaatcgcaagagaaacacgattgaactggaaatccgccaggactatgttaatcagcggggaattagaaaatacaatggtccattgatggtgcagctgcaggagttggatggaacgtttaagcacacattgcagattgagagtaccctggtaaagtccgatatcacttgccactcgaagagcaggcgtaacaaaaagaagaagatccccttgtgcaccggtgaggaagtggatatggatttatcagccatggacgactcacctgtgctttggatccgcctcgatcccgaaatgattctgctgcgcgacctcataatcgaacagcccgacttccagtggcagtatcagcttcggcatgaacgtgatgttactgctcaatttcaggcgattcaagccctgcaaaagtaccccacgaatgccaccaggcttgctttaaccgacaccatagaaagcgaacgttgcttctatcaggtgcgctgcgaggcagcccatagcttgaccaaagtggccaaccagatggtggcctcctggagtggaccgcccgccatgctgaacatatttaggaagtttttcggctcatttagtgctccgcacattatcaaactgaacaacttctccaactttcagctgtacttcctgcagaaggctattcccgtagccatggcaggtctgcgcacatctcatggtatttgcccgccggaagtgatgcgttttcttttcgatctcttcaagtacaacgagaattcgcgtaaccattacacggatgcatactacagggcagctttggtagaagctctaggcgaaaccttaacacctgtggtctccgttgctatccatggcacacaaatcactacggacagtctatccacggatgcgaaacttgtgctagatgaagttacacgtctgctgaacatggagaaacatctaccctcgtacaagtacatggtgtccgtgtcgtgtctgaaggtcatccggaagctgcaaaaattcggtcatctgccctcactgccgcacatttaccgcagctatgccgaatatggaatatatctcgatctccgcattgctgctatggagtgtctcgtggactttgtgaaagtggatgggcgcagcgaggatttggaacatttgattactctgctggaaactgatccggatccggctgctcgccatgcactggcccaactgctgatcgataatccgcctttcacacgcgaatctcgcagccgtctggataaacccaatctcgtggatcgtctatggttcagtattaaccgcttgccctacgataccaagctgcgctgcgatattgtcgatctgtactacgcactgtacggaactaagcgtccgaattgcttgcaggccggcgagaaccaaagcttctacaaggatttgatgaaggacaataatagcagtgtaggcagcgtaaccggcagcttcaagaagaccagtgattcaaagtcacatttgccaacaccaacgaatactttggacaatgagccacaggagcggcaaaagccggcaatggttaccatcaagcgaacggccacagaagcatttgaggtgggcgatgagattatcaagctggaacgcagcgaggagatcaccgtgctagatgaaccagttaacgtgcaggcctatgacagtgagaccaaagtgaatgccctgcaggcagatgaagaagcacgtgatacccatcaggctgccaagcgccttaagaacgaaatgtacgccgaggatgataactcatccacaatgctcgacgtgggcgactccaccagatatgagagtagccacgaggagggcaaattgaagtccggcgatggtgggctcaagaagaaaaagaagaaggagaagaagaagcataagcacaaacacaagcataggcacagcaaggacaaggacaaggacaaggacaaggagcgaaaggataaggacaagcgtgacccgcatatatcacgcctgcaggcgcgcgagacagccactccggacactctcagctcggaggacagtagcaacagcaatagcctgccgcccatgaaccttaactaa

SEQ ID NO: 14646 - protein, 1219 aa, DROSOPHILA
METQPEVPEVPLRPTAHQVVSLTGISFERRSIIGVVELTIVPNSENLRLIRLNAKQLRIYSVVLNDVCQADFTYFDPFQNICYKEHKSRALEVYSKHHLTAAQYTDPDVNNGELLIQVPPEGYSMIQEGQGLRIRIEFSLENPKCGVHFVIPPASTDEETQMNSSHMFTNCYENSSRLWFPCVDSFADPCTWRLEFTVDKNMTAVSCGELLEVIMTPDLRKKTFHYSVSTPVCAPNIALAVGQFEIYVDPHMHEVTHFCLPGLLPLLKNTVRYLHEAFEFYEETLSTRYPFSCYKQVFVDELDTDISAYATMSIASVNLLHSIAIIDQTYISRTFMSRAVAEQFFGCFITSHHWSDTWLAKGIAEYLCGLYSRKCFGNNEYRAWVQSELARVVRYEEQYGGIILDCSQPPAPLPVSGTNQSAASSKQQEIVHYFPIKSLHTVSPKYVEAMRRKAHFVIRMLENRIGQELLIQVFNKQLALASSAATTKIGAGLWSQLLISTNIFIKAIFTVTGKDMSVFMDQWVRTGGHAKFSLTSVFNRKRNTIELEIRQDYVNQRGIRKYNGPLMVQLQELDGTFKHTLQIESTLVKSDITCHSKSRRNKKKKIPLCTGEEVDMDLSAMDDSPVLWIRLDPEMILLRDLIIEQPDFQWQYQLRHERDVTAQFQAIQALQKYPTNATRLALTDTIESERCFYQVRCEAAHSLTKVANQMVASWSGPPAMLNIFRKFFGSFSAPHIIKLNNFSNFQLYFLQKAIPVAMAGLRTSHGICPPEVMRFLFDLFKYNENSRNHYTDAYYRAALVEALGETLTPVVSVAIHGTQITTDSLSTDAKLVLDEVTRLLNMEKHLPSYKYMVSVSCLKVIRKLQKFGHLPSLPHIYRSYAEYGIYLDLRIAAMECLVDFVKVDGRSEDLEHLITLLETDPDPAARHALAQLLIDNPPFTRESRSRLDKPNLVDRLWFSINRLPYDTKLRCDIVDLYYALYGTKRPNCLQAGENQSFYKDLMKDNNSSVGSVTGSFKKTSDSKSHLPTPTNTLDNEPQERQKPAMVTIKRTATEAFEVGDEIIKLERSEEITVLDEPVNVQAYDSETKVNALQADEEARDTHQAAKRLKNEMYAEDDNSSTMLDVGDSTRYESSHEEGKLKSGDGGLKKKKKKEKKKHKHKHKHRHSKDKDKDKDKERKDKDKRDPHISRLQARETATPDTLSSEDSSNSNSLPPMNLN

SEQ ID NO: 14647 - DNA, 4118 bp, DROSOPHILA
ggtcgcggagctccttcagattggttccatcaaagggtaaggaaccactcaccaaggtgtacagcaccacacccagtgaccatgagtccacctccggtccagagtacttctttcctctgaacagttctggggcggcatacggtggacttccgcagaacgtctccagtggcgcttttggttcaaacgtggtgctgaaaccaaaatcagcgatcttcaatttcatttgctggtccaacaacaagttctctgcctttagatcccgatgcacaatggacttgctgtgacagtattcaatagcagacaccaactggcggaagagcaccctggcatctcgctcccgcatccttccgtttttgaccagataattgaagagttctcccccgctgacatactccattaccaagtagagagtcctttccgactcgataacttgcaagaggcgcacaatattcgggtggttgagctttttcattatatttacctctcggtacaacttctgccgggcaatcgtatttagcgcagttttatcgatcagcttaatggccacttcccgaccggtgggcagatgaatcgccaacttgactttcgcaaagttgcccttcccaagggtcttgatgatcttgtacactccgtagccgttgccatttacataggactgaaacttagggctcgatctgcctccactgctcccaaaacatccccccacattctgggcagctgcagaagggggcgtggcggtagtggatatcgatgtattgggaccgggatcgttctccttgtcggtcgttttgtttgtgtttgctgccgtcatttctggtaggattaatttatctaaatcccagcaaagcgttcgccgcacacttgtaagacaaactgatttgctgagttttgacttaatttcgttagaatgctcggtcagggccgactgtatcactttctttatcactctatcattctatctctatcaccttgacattgccccaaacaacccgacttctggctatttggtgaggttcttgcgctgctcggtgacatccttttcgttcaagtggattacccttcgaccgaaacgtgcggtcagcttggagaagaaacctacccgcgaggcgggcttggtgtcgtccgcggataagggtggcgtctgatagctgtcctcctctccgcctgcgccatttcctgatccaccgccccgtttgccactgcgcgcttggccgaaatgaaaagtggcccgtgccacattttgtcgggtgaagggcttgtcggaggtcttttccactgctccacctccgggaatccgttctagcagtcgagcacccatggccggcgacttgggcaccagaagtggagtgactgcaggttccgctttctcgtacagggtcgtgggccgcctggaggatccctgagcttgattcggagtttgggcaacggggtactggaagcgcggaggagtgttggccagcttttgggtctgggccaattgtcgctgggcactcagcagcgtgggcttcacatccatgttggcactggctctctttgactgcggagtgtgcggaagactcgaaggctccggacgtccttggccgctcgtatggttggtggccttccgggctggtgtcctggctggagtgcgtcttgtgggcttggcaggcggtcccgttggtggcgttgaagtcggtgtattgggtgcatttgccaaacgtggcgcaatgggtctacccgatgctgaggaggagtggatgggcggattcttgtccagcgcaagcgtgacatgagctatggtaacagtgggtgtggtgatattaggaagcgggctactgacagctggagtagttaaatccactgttggtatagcctccggtttcgtactgcggttcgaggagcgcggcttggccacgcccaggagcatgtatgtgcaatagatgtcgtcgaacagttgcccctttacagactgctccacatcacggcgcttgtggcccatgctcatcagtaaatcgaaccgggctgcatcctgcagctccatgggcttctcgcgaaacggacgcaatcggtcggattcatcgtggcccagatttatccacttatccgacatcacagcagaaagcgaagtgcgcttggcgggattcaggaccaggaactttctcattaggttttcgcagtccattgagatgtagtagggcacacggtacttgccccgcaggactctttcccgcaactcctttagggtgcctccatcaaagggcagcgaaccgctgacgagagtgtacagcaccactcccagcgaccaggcgtccacctccgggccggcgtacttcctgcccatgaaaagttcaggggcagcatatggtggactcccgcagaacgtttcaagctgggcgttgggatcgaaggtattgccgaagccaaagtccgctattttaatgttcatgtgctggtccagcaacaggttctccgccttcagatcccgatgaaccacaaacttgctgtggcagtactgaatggcggacaccaactgtcggaagatcaccctggcatcccgctcccgcatcctcccgttcttcaccaggtggtcgaatagctcgccacgactcgcgtactccatcaccaggtagagtgtcctctcagactcgatgacttggaagaggcgcacgatgttcgggtggttcagcagtttcatgatcttcacctcgcggtacagcttctgacgtgcactcgtattgagctgcgtcttatcgatcaccttgatggccacttcacgaccggtgggcacatgaatcgccaacttgaccttggcaaagtttcccttaccgagtgtcttgatgatcttgtacacaccattgccattgccatttacgtacgattgaaacttggaatccgtatttttactactacatgcaccgtcacccaaatcctggccagctgccacagtaggcgtggctggtagggcggtggcatttgaggtagtgggcgtggctggctgagcagtggcgcctgttgtgacgatagtacccgtgaaatgggaatccggatcgttctccttgtttgctgctgtcattgctgttttctcactctccttacccgaagataagtctagaattcccaagctgttgtccacggacattataatactgggaattttggagctcctagtctgaggtcgattctgattgcccaggcgaacgttgctcctattcagtggatctgcaagtgtgccgagcacgcgtcgttggatggtaactatcgcctcccctcaagctgtaattgctgggtttcgtcggtcatccgtcatcggggccgttgtttgcacatctgctctatttcgtcaccctcccgacagtctgagctttaagataagaacgcgtgtttgcaaccctcagccaccccgaatcccgtgcatggctgataagcggctcgtcctgctccttgcggcaggatcactttgtctcgacgcacgaccgcatgagtcgttagttctttcaggaggcgctatcaacaaccccctgcttcatgtggcacgagccctttgtgatcctccggtgcgatcgtgtgcccctgttgttcttgtttgcgactggcgaggatatatcccagctggtggtattcggtttccttcgtcagcgaggagtaacagctgccttctggtgaatggagagaagaatgattcgattagatgttggaagtaatcggaatcgggaattcaatggttgctctttatagaaactcggtattagggtaatttcgtttcaaatgaataaaactaatagttaaatgtacatttacaaccgaattagcaaccttttttttttcagtgaaaatttgtttatttgactagtcccaaattataaattgtaagggaatgccaaaaaaaaaactatcaaaaatatgacttatttattatacatacgaatttttgtttgcgagagtatatatttttatccgtatttttctaatcactaagaaagttcacagaaacatttgaatattgcattacagttcgtatttgctcttatcgacaaattttaaaacttgacttgtattcataatatagtgacgatctatcaaattatttctatagaccttgcaccactgtgcactaagtgatttgctctctcccctaacaa

SEQ ID NO: 14648 - DNA, 2118 bp, DROSOPHILA
atgtccgtggacaacagcttgggaattctagacttatcttcgggtaaggagagtgagaaaacagcaatgacagcagcaaacaaggagaacgatccggattcccatttcacgggtactatcgtcacaacaggcgccactgctcagccagccacgcccactacctcaaatgccaccgccctaccagccacgcctactgtggcagctggccaggatttgggtgacggtgcatgtagtagtaaaaatacggattccaagtttcaatcgtacgtaaatggcaatggcaatggtgtgtacaagatcatcaagacactcggtaagggaaactttgccaaggtcaagttggcgattcatgtgcccaccggtcgtgaagtggccatcaaggtgatcgataagacgcagctcaatacgagtgcacgtcagaagctgtaccgcgaggtgaagatcatgaaactgctgaaccacccgaacatcgtgcgcctcttccaagtcatcgagtctgagaggacactctacctggtgatggagtacgcgagtcgtggcgagctattcgaccacctggtgaagaacgggaggatgcgggagcgggatgccagggtgatcttccgacagttggtgtccgccattcagtactgccacagcaagtttgtggttcatcgggatctgaaggcggagaacctgttgctggaccagcacatgaacattaaaatagcggactttggcttcggcaataccttcgatcccaacgcccagcttgaaacgttctgcgggagtccaccatatgctgcccctgaacttttcatgggcaggaagtacgccggcccggaggtggacgcctggtcgctgggagtggtgctgtacactctcgtcagcggttcgctgccctttgatggaggcaccctaaaggagttgcgggaaagagtcctgcggggcaagtaccgtgtgccctactacatctcaatggactgcgaaaacctaatgagaaagttcctggtcctgaatcccgccaagcgcacttcgctttctgctgtgatgtcggataagtggataaatctgggccacgatgaatccgaccgattgcgtccgtttcgcgagaagcccatggagctgcaggatgcagcccggttcgatttactgatgagcatgggccacaagcgccgtgatgtggagcagtctgtaaaggggcaactgttcgacgacatctattgcacatacatgctcctgggcgtggccaagccgcgctcctcgaaccgcagtacgaaaccggaggctataccaacagtggatttaactactccagctgtcagtagcccgcttcctaatatcaccacacccactgttaccatagctcatgtcacgcttgcgctggacaagaatccgcccatccactcctcctcagcatcgggtagacccattgcgccacgtttggcaaatgcacccaatacaccgacttcaacgccaccaacgggaccgcctgccaagcccacaagacgcactccagccaggacaccagcccggaaggccaccaaccatacgagcggccaaggacgtccggagccttcgagtcttccgcacactccgcagtcaaagagagccagtgccaacatggatgtgaagcccacgctgctgagtgcccagcgacaattggcccagacccaaaagctggccaacactcctccgcgcttccagtaccccgttgcccaaactccgaatcaagctcagggatcctccaggcggcccacgaccctgtacgagaaagcggaacctgcagtcactccacttctggtgcccaagtcgccggccatgggtgctcgactgctagaacggattcccggaggtggagcagtggaaaagacctccgacaagcccttcacccgacaaaatgtggcacgggccacttttcatttcggccaagcgcgcagtggcaaacggggcggtggatcaggaaatggcgcaggcggagaggaggacagctatcagacgccacccttatccgcggacgacaccaagcccgcctcgcgggtaggtttcttctccaagctgaccgcacgtttcggtcgaagggtaatccacttgaacgaaaaggatgtcaccgagcagcgcaagaacctcaccaaatag

SEQ ID NO: 14649 - protein, 705 aa, DROSOPHILA
MSVDNSLGILDLSSGKESEKTAMTAANKENDPDSHFTGTIVTTGATAQPATPTTSNATALPATPTVAAGQDLGDGACSSKNTDSKFQSYVNGNGNGVYKIIKTLGKGNFAKVKLAIHVPTGREVAIKVIDKTQLNTSARQKLYREVKIMKLLNHPNIVRLFQVIESERTLYLVMEYASRGELFDHLVKNGRMRERDARVIFRQLVSAIQYCHSKFVVHRDLKAENLLLDQHMNIKIADFGFGNTFDPNAQLETFCGSPPYAAPELFMGRKYAGPEVDAWSLGVVLYTLVSGSLPFDGGTLKELRERVLRGKYRVPYYISMDCENLMRKFLVLNPAKRTSLSAVMSDKWINLGHDESDRLRPFREKPMELQDAARFDLLMSMGHKRRDVEQSVKGQLFDDIYCTYMLLGVAKPRSSNRSTKPEAIPTVDLTTPAVSSPLPNITTPTVTIAHVTLALDKNPPIHSSSASGRPIAPRLANAPNTPTSTPPTGPPAKPTRRTPARTPARKATNHTSGQGRPEPSSLPHTPQSKRASANMDVKPTLLSAQRQLAQTQKLANTPPRFQYPVAQTPNQAQGSSRRPTTLYEKAEPAVTPLLVPKSPAMGARLLERIPGGGAVEKTSDKPFTRQNVARATFHFGQARSGKRGGGSGNGAGGEEDSYQTPPLSADDTKPASRVGFFSKLTARFGRRVIHLNEKDVTEQRKNLTK

SEQ ID NO: 14650 - DNA, 29828 bp, DROSOPHILA
taaaaagaactgtaaatggaagtgaaacgcgtaattttccttagcaattttccagcgtatggcaagataaaagcgcaaatacccgtacatcgagcaaacagcgggtattcccatacccagtataccctagatgtgcacacaaacaagaacaaatcaaacagaagccaagcagcgttcacaattcaatttcagcattgaaatcagatactccagctaacatagtcgcagtcgcagttggtgggatagcggtgagcccctttggtcggagttgggatgtggatgtggatgtgtttagaatttcgcacaaggtacaaatctgttaacgctttgaaaccgcagacagccaccggaatgttggcgcagctaccgagttgtagatgcactgggggccagagataacaaaacactctaattgatgaaaatattgatgggtcccggtgttcttaacaattaattattatggcccatttgcctgatatgttcatttttgttagctcaacatttgaacttcaatactgtttttctcaagggaaagctgcttgaaattggccaaatatataagtactcttcaaattctaattcttcatgaaaatgattgataaatcaaaaaaaaaactatctaattaaaattaaattagtttttgcattccttagagccactgtaatgctagtttttcttgtatgcatatagtgtaaaacgaattacggaaggtaaatatatatgaatcgcctattttcgagtctggcattgccaagctgataatattcccctcttaaagcaaaggcaatcggggaaataaagcatgaaaaaatcaataaaaaaaaaagaaagtgagtatttattttaaaaattgcattttctgcacaatttgccaatcgtccaatttccatttcccttcaggcagtttaagccgcttagccaatggtcctcactttggtgacgaaattggaaattgcatttgactaatccacgcttttcctttatattaacaatttgatggatttctttttcgattcgtttatttgaaatatattttaacatttagattttgatttcacaattgatttgtacattagaatcaataataaaatgtaatttatttaaacgttattcatacgaatatgtaatgaacaaagcgacaatatttaattgcatttgaatatggaagaaaaaaaagagcaagtgcttggtattcctcttgaatttggatatgtcaccctcctattttgattacttcgaatatctatccttatggctgggaggccattcgtatcctggccgtggcccttgactttgtgtgtatctcagccgttcgcagcgtgatgccaaagatgtcctcgtggtagcgactttcgtcctgtggaaaatcgaaagagcagtgcaacacaatgtatgtagattcgctgtcatcaaatgttcttttacactacattgttcaaaactatttttatactagctgtggaaatattgctcatacgccgtgtgtggctgggcggaaacccctccactgtcggtatttatgcctgcaaagctcaacgttataccgctaaggatacttacccgcagtgttagcaaaaatgtctcaacttccgcctcgcttttctgctctttgccggcaatgcacttcctgtcaaagagaaaaggaatacgggtaagttgaagtgtgtatagaaaatacaggaaaatgctgaaaaactgtttatttattcgcacaggaatatgggacgtaatctgtggggacgttgctacaagatttacaaagtgacgagatgaaagggaagctgtaaagcacaccatcacttctaaggtctctttagtgatattagctaaatttactaaaaacccatttgacctgactctgtaatagcctaataacatattaattcacttattagtcatttttacttcttcataattacaagaattaggtcgaatcgtatgtatttcttcccaagaacctttccaattaccaaacgcaacagatgcgacagtcttatctgccctggtttcaattaaactaaaccgcttaagactacaagcacatttccattgaaatccccccgtaaggacagcgccattatgcaatatcctgtgtgtatggattgagacagcccctatttcacaataaggcacttaatcagaagctttgaaaaaaatgcgaggcagagaaacgaaatataaaagccaagccgatggcaaaatacctgaccgttgggcattggaaaacagaaaactcccaatggtgtctcagggggaatgggccccctgcctccgtgtcctgggaatgagcagccactcctcggtccaaacacacaaaggcaatcaaacttaaggcagagcaaaccttacctgatggtctggtacacatgctcggccattgtgacatcgccgcagacgtagatgtggccccgctcctggacaatcaactggtacaacgaatcgaattcctgctcaatcaggtcctgcacatatgtctgcaatgcacgggcgattcgatgccaaatcgaaaaacaaatcattatttaaacgggaattgctcagatacagagggagaaaaatcacgaaatcacgataatatacacttttgttgttagtaaattttgtggtaagtaatgtgtgtttcgaataaaataaaatagaatgtcttcgatatgttttctgtgtaaaacatacacaaacaaacacaaagttttatggcttaccacctaaacttaccttcggaatggcctgctccctggacagagcgagaaaaactcggtctaggatttgatccttctgtagctctgccttctcctcggcgtacaaatcgacatcccgattacggcagccaaagaagagccacatcttgggcaatttggccgtgggatcaaggtcgcttagcacctggaactcctgccaaaaggagcggaatggagctattcctgtgccaggaccaatcagaataatgggacgactccgatcgctgggcaaatggaagcccaaggcgctcctcacgaacatgaacagctcgtcgtctgcccgcaagccggatagatagttagagcacacgccataccgctcgtctccctggccatcttcacagcggtacttcacgatggccaccgtgaggtggatttcgtcactaacgcggcgcggcgacgaagaaatggaatagaagcgaggctgcagcggcgttagttgggcaagcagaaggggagccggtggtcggcacgaggggaactcctcgagaacgtccagcagatggggcagccgccagtgccgccagtcctcgtaggccgacgaatcgttgaccagcaactccagccgctccttgtccgcggtatcctcacagaatcctgccagcagggtgagcaactgtcgcgatggcggagtggtcagatcaaagaatcgggccagaagattccttagagtatccggcggtattttgtcgtgcggctcccagcacttgaatataccattcgatgtctgcttttcctttagcaattgcaactgcagcacctcgtcgggattatccacacccaccagtcgatttagcagtccgtcgaccagttccgttcgattcgccggaaagatgcccacatgatcacccggctcgtactccaagccaggtgcacagatctccagcagcatcgttgtcttggctccctcactcaaacgggtcaaattgtggggcttcgccttcgccttgcagcagtgcaccttcttgttgtggtacttggataaactgctgtccagggatcccttattcgccgacggcaccaggcgcaccgtattcacagtcagcgaatcgttctgcagggctagcgaggcatccgaaaggctctcctctggatccaggcagaaggtctcgcaggccaactaagaaaatatataatattttatgcacacctattctaagtcatttggaagtcatcccaaagtgcatttcctcggttccttcttctttcgaaaacttgcatattttcgcatgtccccagcacagattccccatgaaggtgtcactttagatcgccgcactcaccttgaatacctcgggcgcccacttccggaacgactgctcctgtccgcacatctcgtcgccgtaggccaccctcagcaggcgttcgccgcccagctcgcccagaatgttgtccacatactgaccgaaggcgcagaaatttggataggccgaggagccgagggcaaaaacggcgaaccggacattggagagggggccaaaggtctcctcggtgaaggtgtccgaggtggagccccgcagcgagtcccagcggtcgattctcttcacctgttgcagtggcagcttcatgaactcctgccgcgagctggccttcatgaaggactttgacgagccaatgctgtttgggtgggcagaaaagaagagattttgtttgaggcctactgctaggagaaaattccgccatccagtgcagctcttttgggtggtcagcccagaagtatgcaggccagttttggaaacagtccccaagaacactcaaattaaaatgagcctgttgggagggggactttcccgcccgccgtttcatatttcacaaaggacgacccaacaatgggcagggggcgtggtcaagggcggccagcagcttctgctgttgttgtgcaggaactaaacaatgaacaaaacacgccaaaggaggcaacaataaaagaagaaaagcagaggctgacagcaaagcatttattacgcttgtcattggatgtagtgaaaaatacaagaaaaaactagggaaaaaaatgaaaatgaaatctgcaaaaactgccaaaataaaatgagcacaaagtactgctgtagccagaaagaaaagacaagatgtggactggaattcagagaaggacatggacatggacttggacatgggcaattcactaaaataaaaaaaaaaacgtaatcatccgctcgtcagctgctcgtcatcggcaagctggaaaagctggaaaagcccagcatgtgagtttttccccgcgcaaactgcagttttcgactgctcagttggagagggaaaatttgagtgatgattcaacaatgaacactgtcatcctttaactaaaacccaaagaccgacgaaaaatccgctcttggccagactgctcaacgggctcaactgccaactgcatctggccaaggccatggcccactggcaatgcgtttaaaactatttgagctccagctgctcggcttggctttgggtcaaagtttatggctttggtggggtcgtaaaaacctgttgccccgagcagagggctcagcacccgtcacgactgcctggcatggggcttacaagttgtagaagcttgttaacagcgactgatggagcagaccctgtcggggattacggccaggatgaagccaccacgccggcactcaactcttcataaggcgatggtcatggagaggaatattaaattacagcattgctacttaagcggctctacgatttaagtaacgggtcccaatcctcattatatctaaatgggttttgcaaaactaacttggcttaattaatacagaagggcaaatattattgttagtctggtgcgataaattagacaatcaatatttaagcatgtgcacatcacgagtcagcatgtgtaaccttcgcatgttgttcgatatcaatgaaacatttgcaaaagagcctgaacctaatctaatataatcatccctagaacttttaaatccccccttaaccattgtaattataagtaaacgtaatcccattccaaccgaaacacatgcaattcatcacgccggcagaaagcacaactcaacgcttcggtgcttagccaatctgtaagctgtgtgacgcctatcaacttaatcacatgcttcttaaagcggcaacaacaacgaactggaaggatccaaatagcacgcaaacaaacagacatccctttcacccaaaagtgcagcattgcgtgaaaagagtgttgtaatttacagctcaactttcaccgagtgaggcgggaaaatacaggaaaagagcaggtgccagagcaaaactattgaaagcgaaaaaaaatagaaaccagcagggccaaagaacgaagtggcagactggaaatcctggactccgaataattaaaacgaagccaagctccgttgcgaattgcctgtacttttacactaaaacactggtataaatagttttagaaaataaaattataaataattgctttaaagatacaattattaatcggctaatttgtagactttcgttgataagccatattaagagtatcaagggtaataagcacatttcagctatcctggccacacacacactgcgtatacgtaatgttcgcagtgcatccccgcatcatcataaatttgcaaagttgcctaaaagctggcagtgccattttcgccccgtatttattcagtctgctcttgagtcaagtagccccatccaacaacttgtgcttgtaattatttttgtgcacttgaaaatctgctgggaggggtgggggtggcatacaaaaaagatgctaatgattttcagaagcattttattcaagtgtttggctccactcattatgcaaagtggagtaatttcgagcttataggtgccatcatcagagtgaagcaactttcatggcaaatgcatcgtgctcacctgtccttaatgatgacgtctaaggccggataagtgccccattccgagctgttgcagtttacagacaacaggatacggatgtcaggtgctcacacataaaaacacaaacatgccacccacactgcagacacttaaaaggacactcagaggcgttgatggcataatggactgcaattaagtgagctcgagatgacagtcacttgactcaaagcaggacaaggctagtatttttaaacgaattgtgctcttttgtggttctcaagctatttcattcccaaccagtgaagtctcttctgtttcgccacaaatattgtaccgaaagtcggtggtagtcttaacattctcttggctgaaaaagactctgctctccacttgactttcgactagaaactatgcgacaactattaagcaataatctgagtttcagtttcagcaagttgtgccagcaagtttgcaagtttcgagctttaaaattaaatcaatcgaagcaaacaattaagagcaaagcaatttgcgaagcgacaaaatgcctcgggaaaataagaaacacaaatacacgagccaagctcactcgagcgtttaagcagccaaaaaggaggaggaccttcagcagcccagctcacatgatgttgatagcctccccgaagcgattttggcatcaggctgcgaggcttggttgtttaaattgctcatacgcagcgtggcacccaaaacggcagccaaagaagcggggcctcatttctgcaatgctggccaagcaaaaattgcaatcgattcaagtggagtgctttaaattctacaaaataattgaaacgattatagccgagtctgatacaaaaggttcttagaaagataaattccctctctataatttgcccgacaattaatcataatacaaatgagaaacgtgggctgaggcatgctaattaactcaggtttggcaaaattcctgcgaaacttccgcccaaatgagcttcgcccaattcaacaagcagataaatacaaaatggtatccaatgaagaagtaataaatcaaattaattggtttttacagcacacaaaaggagtgaaactaaaaacatgggaggacgctcatcacaattcggccattataataaactccaattaataagcatgcccaattgatacaataaacacgcacaattatgtcagatcagagaatcccaccatttttttttcttttcaattaaatcatctcccttatcggaagagcgaaagtgcggaaatgcggccgcaggacattttttacagcttgactctcgtaatatgttattgaattggcttccgtccgtggggagcgtgtgtttgtttcggcagccccgggtccttccgtcagcagcatatgaattttcaatttcattttcaacaggcgactgccagcttgtttaggtataaatttagcaaccaaagaatggctgggtggtgtgtgtgtgtgtgtgtgtgtgccccaagttgtcaaagttgtcaagcggaaatcccctttacatcataaaaaccccacacatcacacagacctacatacgtgaggcaaaatatcgaaataacaaaattattgttattgttttttccccttcgctgtggcgtaagggaaattgcgcggatttgtctgctctctcaagcggcacgcacttaagtgcgtgtccttatccctgcgcgcatcggtatgcgtgcgagggcccatgtgtttgtgtgtgtgcctttgtaattttaaagccgagtatgcgggacaacaagaagaggggccaattaataatacaaaaatgccaaatatgtgtcagcaataaagccaacaattctggaattgcaagtagctacagtgggcataacttagtgaatacccagcaaataaaattgaatgccttgaattgcgtttggataaatattaataataaattaaatgtcatattcaatttaaagtgtgtagccatggtattctgcttgacatatatttaaatttatggactaaaatttgtattttctatttgctttcttttctatcttgttatctattccctcatattttaaatcgctttccaaccccagtccagctaaataattaattaatccggctttcgtttcgttaccaaagacaagggattaaaatctcattgcatggcccacaaggtatgcaataaagattgataccaaaaaaaccccatttgcatgagcttgaaattcaaaatgaaagaaaacttgcttaaaaagcaattcagttacgccccttcgtccctatttattatctttgctcctttcacgacatcgaagtaaccgcaaaaaaattgatttatacgaaatttatgcaaagactgcgccaacagaatggatagaaggaggtggagaagggctgggaatttattgactcacctggagtcctgcaatccatgctcggaagactcctggacacgcatcgcatacaattcctgggagaaaagctgcgtggcaggggcgaaaagttaaagttcacatttcgggtcattagaaggcggctgggcctaatccattaattagttcagtatgatccttgcgggggggagtacttacctcgccgttttcgggcggatcaccgttgccaaaggtggaggccacaacaattaacaatgcctcgtgctcaatggaggatatatcgtagtcggacatgcaatatatctaaatgaattaacaatttagtgctgtgggtagccgtattctgttcatcctttctcttttttttttttttttgctagccaaacacttttgtggtcattagatactcggcccaaaacacgcattatggtcagagaacctaatgagcctggattctcgcaaataccctgtggtttgtcacaggtgtttgcagcttatcttattttgccaggcagccggcagatgctttttacacacacatgtcgaggaaaccaggactacgactaggccaagctggaccggatcctgtggatcggaggaaacggaaccaaccggacactatgccggcaaaaaaaaaaatttttaaagtaaatttcggttttatgctaatttatctcatgtggcgctggcctttacggcaagtctaaggtcgcaggttaaattggggacacccgaaatggggctaattttagatgtaggttaaagcgttttataatgtcaaattagggatgtcatttggcagtatgaagtatgcctaatggtagctcatttcctgggcttatttttaacaaatttgtaaacaagccccaatattttctactctatttcgtgataataataatattttcaacaagaaattcactatgattaaaatccctgcgaaatgaaacattcactacaaaaatgacttgcttgaatgttcatttcgtaaggttttttattgctactttattgtatacctcatgttagactcacctgtgcattgaatgcgtgccctaggagttcacaaagttgcttcgcatattgctccgatttgccagtttcggtggcatatagaactgttgcctttatgcgtttcgataaggcgcgtccaaatagtttcgatgtaaatttcacagccctgcaacgaagtgagaacgaatgtttagctcgtttatatggccaaatatggtgaatgtcttaaagctgcacgaccagcatccatcgacattcgagccataagccttcttgtcgaggctaagaccataacatatgtagaacataagaggcgccggctaatatagccactttgattgacatgccgagtaattggaaaattgtctacaaatacataaacatatgtatgtattttcgtctaaggatccgcacacatggttagtcaataatcaaaagggcgcaacagaattttatttcatagagtcggacgcccttcatttcgacatttaaagtaggatcgcataaaattttatgcacagcaaaaagcgaggcaacacaatgaaagtcgaggaattttcctgcggaaaattaaagcccaatacatgagaggaaagccttcagctgattcaacgccagacgttgttcagaaccctttcgtctgtattatatttattattaaggagttgtgttaatatattaagtaagtatgcagtattttaaggtaaatgcagcaaaatatattaagtaaattctactaatttttgtttttatactttcaacaaagtcgttccggaaactttgagatatttccttactaaaacgtatgaatatatatctagggtattccctagttgaaacttcagcatgcctggcttccatttcttattttcctttgggatgccattgctttcttgactctgcgccggctgccttcagtctgcgcctggcaggcagggaactactttttgggataagagtccaaatggatgcttataggcagtttaaatgtaattcaatatgtctggcacttccactttgcagcacctcgtgcccgacgcacttctacttctcgatacccgggagcagcaactcctgcacctccacatccacctccatctccatctccacatccaccttcatctccagcatttcatccacacacatttcactgcacacacttttgtgcgagcatgaatataatttcattttcataaagttgtcgatgtcagcgctgatttaattccatttcatctcatcagagctaagagccgcggcgcgtgctgaaacaattaaacttaattatgtctacggcctgtcatcgcagcatggatatatgtgcggatacgtaatacgtatatcctctcataaatacgtaaatacgaatgatttcatttgagcgctgataaaaagtttggccctcgaataggagtcgatttaatggcaggccgtatatgtatgtgcagttgcaacagttttaattgataaatttttaatgaatttgtgaacgccatttggcagttgcttgttggcctggccatgttgttggcttcaacggactgattgcagtaaattaaaattaattagcatgcaaaatacgctggtgtggacaatgccattaacgtggagcgctttaaagtgcggtcgttaaataatcattataattcttcacgctttatttaacagcaattctcattatttcatatgttttttttttctacctgcttaattgtgtaattgattttatttgttagggcctaccgcaggtgtttgtttgagcatccgattaatggacagaaacatgaataggtgtaagtattaaatgcaattgagccaatgctaaatgaataatttgctcggatttgcataagcctttggaatccgatagattcagcatcgtttatttgttcacaaatcggatactgaattgatgaaccatatctggtgtacaagcggtttttgtatcagactgcatattgcccaaaagtaagtttacacatgcacttgacttataattaaatgacttattaacagatacagtatcaaatattaatatttattatttgatgtactatcggactgcaagttaacaaatatttcttcaaatttgctgaggtcataagctggttaattagccctttggttaaactttgtttgctgggactttaaattctcaaatttaaaatcagatagttcaaataaacttcctttcttcctgacgaatttcaatttaagttcgtaaaagcggaaactaacttataaatgtctcagcgttttacctcgcataaaataaggacatcaaatttgcataacaatcaactttagccgcacatatgttcccaattctgctgctaaatctaggggagatctcagatagaaaggacgtggcagtatcccggcaaataacatttaaaataacaataacgggcacaacaaacatgatgcaatgtaccaaattatccgggcgacttgataacactggagcagatggaggaggaacaggaggagcaggaagccccatggcaataaaccacaatccatgtaatctacttaaaagctaatccctgctgatgctgtcgtgtgacacagtggcaaaacgaccgaacacggggacaattacacgggcaaggatgcgagtatcaacatcatcatcatcatcatccaccgaatggttcaggataatggtgggagtgtgggcaggatcaggagtaggaacaggagcggtagcaccaccaaaggtcgccacgttaacggtaagtacttacctagcgatttgtttaaaattgaatttacgtcttggcttcttgcccttgctctcgccacgccccttcttccacacgtgggttcgccaggcgggatcctggtactcgaacgagggcttcaggtagtacagagccatctcctgatggaataccggcgttatggagcccgacagcggcggcacgatccaaatccaatcagcgggacacccattcctatggagaaacacaaacgatttcagcaacggcaagcgatgtactttaattgacgaggaggggtggctgaatcctttggactcattcctagtatttttagtgccccaaatggcagattaccatttactaagttaattgtggctgcccccgtctgtcgttgccataaaaatagacacgaggcttatggttttgatttagtgcttgtaaaaggagacgatttagactggtttgggcattctaaaatagcccatttaaacaaggttaaggacatttgtgaaatggtaatgaattttgaaatctaactatacaaaataaataaacaaagtaaaaatgaaatgcgaacaatgtaatatttatttataacttctacgaaaagagaaactccctgcttttttccgacgccaatgaaataagtttgacaaattgtgcggcatttatgtgtctcgcgagcactttacataaacgctggcgacagcaaattggaagcgataaatttactttcgcacctgcaaaagagttttccgcgcgattttccccgcggccgtggcaaagtcaaataaaacacgttacgccataaacatgcggttgggatatggatacacaaacatacatatacatatacatatatatatatacacggttgcggatgcggaggtgtcataaatgcaaacccagccgggtcataaacaaacacacaggatataatcgccgatctgggggcaaactcacctgagcttggactcgttctcgaaatgcttcataaagctctcgctggccgtgtggtgatccacaatggtcacgttgcgactctggtaggagtggagcacggcaatgttcatctccaccacagccttgtccttccacaaggatgtgggcgtacgggtgtccagttgcatcttcagcgccaccgtctgcggttagttaaaaatcaatttcgttactgcctaatcgctctaatcgaataactatgtcgattttcgattactgttttcggttttgcggccagcatttattaattaccaactatgctactgtgttggccaggtccaacaagtggcccaaagcctcttgccacttgcctcctgcctcttgccacttgcctcctgccatttgccacttgccacttgctagtcagaagccacaacgtatgtcaattattaatttggccataggccatcgaatgtcacgagtggagctgatgcttgcaaatgattgactttgatgatgacaaataccacaggataatgggaaatgtgtgccaaagcgcacgtattctacgcataataatacgaacgagctatgtacttcaaaacaaataattatcactagaactgcactacattagatgagctgtgatatctgcaaaatgtttcatatattttatataagatttataaaaaattcttatacttaaacacaaatttttactttctttttaaaaagaactatttaactgcatttactactcaattaagtaagtgaagtggaaataatgtactctattttttatattttacatcaagttccatcctcacattggcctaccaatgcacctgtacacctgtcgcaacattttgctgtcataaaatggaacccgatttccggagaagtgctaatggcgttttcatgctgctgaaatctaattaggttgccgagatcgatcgaattttaaatgcattgccagtgtatttagttgcaggtccgaatcgagcatatctcacgcataaaagtacattaactttcactctataattaataatttcacaattattaatgttgccaaggcaacagttttcaggacttaaagagtcgccgttcttaagtgttgttaaccagcttacatccaccgcccagcggcacatagctggtgggtaaaaagaatgttggcccagtaaaaaaaaaaaataaagagggctttatgtggggacagcaggaatgataagggggagtccccggttgccgggtgctctgcacattatgcggccttataatgaaataagcgccacatcgcgatacagcgacaaagacatcaaggacatcggacgaggacaagagcaaggacaatgtcatgagagatggggagggggggcggtggcggatatcaatactaaaattaccacacatatacatggtcgaatatctttttactccaacttacctccagcatattgcggcgatttgtgtcgcataaattccggctgccaatctctgtcgacatgtaccaaccactgaatgtggtggccgtaaactgaatgccgcccacatcgaacagcatactggatacggcgggcagggcgtaccatcgcagtcccagatccgagaaccattcgaatctgcaatgggagagcaagagtattgggtgcttttatttcgccagctcgattcatattgggagatatggctgacgatgcgggtgggtgggtcagtggccacaggccgcgattgtggatgcaaatccattggttatacaagccatcacccgaccagctgatgtacgtccgtacataatcccgacgtggcatcgacgacaagccaattgagtagctaaacactacggagtcccaaatgaaccacacagttataaaataactcaataaacgccaaatgaagagatacattacctataaatgaaatttgaatttggacgcataataaaaccgatttaattaaagagtcacgatgtcacgtaaaaaagcgctttgccaacagcattaatcatatttgcatggatactttaggtcacttacaatgagcggcaaattaaatcatataactaaaaatcatataaccgacaagttatggaatagtttttgtgtggcatagcctcgttgagtatttaagctacttcccctacatacaataggaaacatttgcttgatacacgcagtcatggaagttggccaactaataattataccactatttttactgctgcttgaccattcgatgggccaactcaggaggactcccatcactcgtcagatcaaccagaacaagacccatgccaatgtgaaggcggagaagatcttgctggcggccaagtactttctggtggacagacaatcatcacaaacgacacaggtgctagccaacggattcaatctggagtacaccattcgcctctgcatcggaacaccaccgcagtgttttaatcttcagttcgacactggatcatccgacttatgggtgccgagtgtaaagtgttcaagcaccaacgaagcctgccaaaagcacaataaatacaactcgagtgcgtccagttcccacgtggaggatggaaaaggatttagcatacagtacggctcaggcagcttgtctggatttttgtccacggatacggtggacatcgatggtatggtaatcaggaatcagacattcgccgaggccatcgatgaaccaggttcagcctttgtgaacaccatttttgatggcataattggaatggcatttgcgtccatttccggcggagtcaccactccctttgacaacatcatccggcagggattggtcaaacatccggtgttctccgtctacctcaggcgcgatggtacctcacagtctggcggagaagtcatctggggtggaatcgatcggagcatctacaggggttgcatcaactacgttccagtatcgatgcctgcctattggcaatttacggctaattcggtgaaaatcgagggcatccttctctgcaacggatgccaggccatcgccgatactggcacctcgctcatcgccgttcccctgcgagcctataaagcgatcaataaagtgttgaatgccactgatgccggagatggagaagcatttgtggactgcagcagtctctgtagattgccgaatgttaatctaaatatcggtggcactacctacacactaacgccaaaggattacatctacaaggtccaggcggataacaatcaaaccctgtgcctatccggcttcacatacttgcagggtaatttactatggatactgggagacattttccttggaaaggtctatacggttttcgatgtgggcaaggagagaattggattcgcaaaactaaagaagcattcaagttatagggtttatgcctccagttatgtgaaagaaccatctagctacggcatcgattacccattctacggcgatgaatactccagattctttacttgagtcaattatatttcaactccaaactaatccacgtgcctatttgtttcatcataaaccttatggctaaacacttgtattaaagaagatttgtaaaacgaacaacaaatatttgccgagttctttaatctctacgactggagttggctttgtttccaagtcagcttaagtatgccaacagaactcgtggacgtcattaacttccagaaatggaaaatttcgtggctatttatggatatttgcagttagacaatacaaaaaaaatgggagagcagacagaaaagttatttaaatttcgaacccatttcaaatctattcacagtcgaatttcagccgcagacatgagacagttgttagttttattggtgcttgtcgggattggccattccgctgccaagttgaatcgcgtccagctccaagtgaacaagaatttcaccaagacccatggcagtgttaaggccgagaagaccgtgctggcatcgaagtactcctttttggcggagacctctttcagtgtcagttcgtcgggtgccaccgaaaacctgcacaattccatgaacaatgagtactacggcgtgattgctatcggaacgcctgagcagagattcaacattctgttcgacacgggatcggccaatctgtgggttccaagtgcaagttgcccggcttcgaataccgcgtgccagaggcacaacaaatacgattcttcggcatccagcacttatgtggccaatggtgaggagttcgccatcgaatacggaactggtagtctgtcgggtttcctgtccaacgacattgtgaccatagcgggaatcagcattcagaatcagacattcggcgaagcactcagcgagccgggtacaaccttcgtggatgctccttttgctggaatcctgggactggccttcagcgcgattgccgtcgatggagtgactccgccgttcgacaacatgatctcccagggactgctcgatgaaccagttatctccttctatctcaagcgacagggaaccgctgtgcgcggtggagaactgatcctgggcggtattgactcgagtctctataggggaagcctcacctatgtgcccgtttccgttcctgcctactggcagttcaaggtgaacaccatcaagaccaatggcactttgctgtgcaacggatgccaagccatcgccgatacgggcacctccttaatcgcagttccactggccgcttacaggaagatcaatcgccagctgggcgccaccgataatgacggtgaggcattcgtgaggtgcggccgagtctcatccctgcccaaggtcaacctgaatatcggtggtactgtcttcaccctggcaccaagggattatatagtcaaggtaacgcagaatggccaaacctactgcatgtccgccttcacctacatggagggactaagcttctggattctgggtgatgtctttattggcaagttctacacggttttcgacaagggcaacgaaaggattggtttcgccagggtggcggattattaacataacgttgttatcgaaaaggaaataactaagagaaatacatgcaatacataaaatctaacttggagtattcctgtgggtaataactatcaggtttacttgcttacaatgtatgtaagtaagatttaagtaaatcacaaatcagagcgatagtaagctgtggtaatagcacccatctgcatgcatctttatactcactttggatgggtcagcggaacttccagtatcaattcgggcgggtaatcaaagtagtccggatcgtgaccattggccgagaccaccaatggcagtatgtcccactcgctgcccttgctcttccagcccagcttggtgcagacctgatggatggaagagcgatgggattggacatcaaacaaatgtgattcggaatcgaaaatcagcataaggccagcgggcaggcggtggcgtatataaaagtgacatgtgtaaaaataaatggggatactttggggctcggttttatatgcaaatacattaatgttggcatgggtatgtggactatggattgactgaaaccatggatcgcagtgtgcccaaccgctcggcggtaacatctgctaccgtatttgtgttcgtatttattgacagctttgttgtttgttcggtttttgcgtatttaaaaagagatttattacaacgagttatagagctgtagagcgaacttgccgccgctgctactgctgctacaccgccattgttgttgtgggcttttggggcttttccaacttgttggttcgacaaaaggtcgccacatgggaaattgggtgggtcaaagggggcgacggaggctcggatttaaaggcaaagtcagttgatgcgtgtaaatatcgtgatggcagaggaaaaaaaatatacagatatttatgcatgtatgatatgtaaattgatagctggattgcgcagaaccatgtgaataaataagagctgtttgatggcattgtaaatattttcgaaccgtgtctataactttgcgttcaaataagcaggaaattaaaagtcaaaataaattatagaaaaaatttagaactactaatttacctctgtaaactccacattcatgggatcgccaatgattttcccatccgcctgcttgtagccggcataagatattaattggttattccaaatgcgataatcatgcttggcatctgtgcgttgtggaaatatcgtgatggccgatctgaaatatgaaatcaatttactttacacaaggcaaccgcaaaacaatttgtgtactcaaaacgttaaagtttgccaaagttgaatgaaacttttgaaaacagccaaaagcgctttgcattctaatgtgcaacaccaaacgaatgaaatggggaagttgaaagggatgttgcctgaaatattcatggcatcaaattggcaatagccctccttactttcaccctctcaatttagccaattagcggaccaaacccataatttggcaatcacttttcgcaaacattccactgacgcctgccacgtagcgagtagattatttgaaaatttcgatattgtgtgtgccaaagagcatgggaaaatattaataattatgtgcagctccaaacgattagagggattccaaaattgtctgtttggcctaatttccataagctggcaattacgttttgcaggaatatcaaaaattgcattcctaattgcgagtgttaattgttcaatcgaaatattttgggccatatatgataatatttttaaagtgtgccagttcaatgaatatatttttgtttaaattcaaaatctgaactcatatatcttaaaaaaacaatgaataaatatttaatagagcaaacacttgaccgacaaattcaattacctcaggttgcccttatttgttgcatatttaatgtgattgcaaatggcttcaaacatgccacttgttgttgtcacataccgacagtcaaagacctgcaaaatacagtgtatgaataatagaaatatcagcttgacaataacgaatcacttttccgatgaacatgtataaatttccacctcgaggggtgaaaaaaaaaaaacacaattcccgccgagctaaaattacctaaaatattcaaatgcttgtagctggaaactagaaaaaatcaacagcacttgcagacagaaaactaaaagtgtaaacaattgtttttacatgaattttagttgccagcccacaagctatgccacacatttacattcccctttttattcgcctcgtccaacggggcgtatgataaatgtgacataaatttctgtgtaacttctatatttgttttatttgcggcatagggtcgcataagagagttgttcgcaacttgttcacaccgaaacccgaaacccattttcaattatttcgcttcaatgaattttttgcaatatttctgtttaagtgtcgaacttgcacacccttaattttacctctgttatctggctccatacaattgttttttttttttccacacctgttttgtgggtttccatgtgtttttgggtctaggccagattgaagttggctttatgggatttctatgtttaagccactcgaaactgaaattcattcccgcccaaggaaagcccttttcattcgattttctgctgtgttgggttttgttcgggttttttttttctgtgtcgtagggcgaaccgatgtacaacgagtttcctaattaagtttgcaaagcgcacaaaactgaaccctttttaagtgcttatgccacacatacttcatttaatttaaagcaaagttctccgcttttttttttgttttgtctcgccgagtggtattggatagctttggaaaactttttacatgtaatcaaaagtcagtactaaaaatgaaattaacatggaaaatatttaaagtactttgtatctgtttgttataacttttggtttaacataacatttggatgtggatatggttatgttattatgtgccaactcatcatttccataagtttgttataaatagatttatttaatttgaaagcagaatacgaaactgacattcgtctgcaaatgcaaagtacatttgtttggcatggcgctgaaggtgggactacctgtctttggaaatcagatttgccttctcgagttctcgcctaacaaacatacgtaaatcattcaggcggaaatgcaaatcggtttacactttgctaggcacacacacacacacagagagtatgtgccatttggtgtgccaactagtgatcattataatttgtgatttcgggtgcatgtgaataaatcttcgcctcgggcgccatttctttttcgagtaaattaaaatttacgaggatttgcatttcaaatttcagctttgtctttgtctatttccattttgactctgtcttgaaacacgcataaatctagaataatgtggcccagacaaaaggcacatcgtacatattatatattcgtctgtgatttgtgctctgacaaatttggctgactactccggcgggtgtattgcccatataatttttttttttggaattgcatacgtttaagcctaatgtggcttgatgaattgttgtcatattttgtggccgatgaaagctgatttcgagttctgcatgacctcttcggtcatgaatcactgataaatccatctaatccttatgaattacggttgtgtgtagctttgccaaataaaacttaaagacgtttatctgatatatcgcacttgccataagtatttctttaataatttcgatttatatcgcataaatttgcattcgtagcacccacctgcaacttcgaccattgtattcggccaatgcaacgtgaagaattgcgccaggccaatttggcaccataaattagttccgtttcggttagctgataatgtccagtggtctcaatgctctggcgcacctgtttccatcgcgtctcgtgggcggtagatgatgtactgcaatcgagatagaaaataagatatgttaattttaagtataatatatcaaaggtataatattaaatctcaaatgcggtttattttatatgttatgttatcgaatgctcaccgctttatcgatgtaaagtactgctcgaggaagtccttggcgtgttcgaggatcagatcggatttcctggcctccaccgccgcattgccaatgttcataatgctgctcgtacaggtggccttcgagcaggaaagaatctgatgggaatagaaaagggagcccaacaaataagtcatcaagtcggaatgaatacagtctgtgcgtcatgttttgacagcttttaattaaacaagtgtaattgctcattttggtaattaaatttttattggcacttgcccctgcagcgacaaatggcaatggaagtggcagtcggaaaagcgaactggtgacagttgagaaacaagtggagagtaacaatggtacgaaaattaaattgataagaaagatgaggaaaagcaaaggtccttttggaatccgccccagtttagtgagcagcgtttaaaaagcatttcaccgtcaattgcggatgtcgcttttccttcacgtcgttttcctcacgcacttttcctcaacttaagcccgctactcggtgtgatttttttttttatgatgcgtgtcgttgtaattttcatttccactccggcagctcacctcggattcctgccagcagagcactttcctccacctttctacttctcagtttatttttgcccgacggtttaatttactcaacgacacgacttcagtctgtctgtctattgctccgtggaaaaagcagccgcaatccgcccaagacacccgcggtcataattagtttgtttttccaggcagttgagctctcgaattggcttggcaaagtgtggcataaaaactgctcaagtgtcgcaagtgtctaactaaaatatttcatgcggctatgctcgctacaattacgtcaatcatacgcagcgtatgccgcggtaaaagcagcttcttcaagcttacgagcaagtttagtgggtaagaatggtaaaggacacattaactgctgaaataaaggagcgatttagggcattaaactgtaaagtgaatagatataaactaagccaattaaagaacccttgagtaactcgttgaaaagtcaatttgaaacgaaaattattttcagcaacgtctcaaatagaatccaaaaagggtctgctgatttttgatgtaaaatgcaaaacaaatagatattaatatacgtaataaaaataattggattcaattagattcacctatttcaaagattttcaactgtgagtctttcctttttcataagtcttttgagctatttccttttgaataggaaatacttacttaaataagtagtaagtggtacatttgcatagttgcatgctacaataactcaagaatctgaatcggttgttaaaatgtaataccattcgaacatcatggcgttcaaccagttgttgaggtaataaaagtggtagagctagtaaacgtggtaatggcagtaaaagttgaaaagcaatacccgtcaaagtatcacagttggcgaaatgtcgggacggggaaattcaaaggattagtttgtgaacgtacttcaatgttgagctgcgatttccacaaaggcacattaattttagaactctcttgtttgcaaccgctttgcccacaataaagtgcagttgcaacttaaaggcaaaccacatactttgccatgtatgcacatggcaaaaatgcaattcctcctgcctctcccttctgcccgcccacataaactttggcaattttcactcagatgcacaagacaaatttatgcacaatgcaaacagcaacagcgagcccggcaaccgaaaacatcaaccaaaaaccagcgacacacatgacgcaagtacgttagttagatagcaacttgaaggatttattatcctaataagccggaatcgggcgcgtctggttaagtggctaaattattacctttccgtgggcgagaacctcttaagctaaacaagacgtcataaaagcgctggcttttcattttcatttccatctgcagcggagcaaattaattttttggtggatgggtgggaatgcaaataattgccagcgcgggactggttagcactcaaagttttccaaaattgttttatgtaaatataaacaggaggaggagcggcatttgcagcggaaccggaaattgttgcagctgccgaaataaatacgaaggaaacgatggcaggatttcccgcccacccacacacacacacacaaacacatttacgaggcgaggagcttaaagtttggcgtgtaagtttggttttccttgggccacgtgccgcccaactccactgggtggcatctccccgagaaactgcactttctccagaagaggagcactacttgcccgccaaaaatggttattttttcacttctcctcgtgtttgcagcagaattatgccctgcggcgcgggaaagtgaaagaagtgctgccgttttcattcgccttgggacacgcttccctagacaacaacgaattgtggataccctcgcatggattacactgaataaaacagcgcaaatccaaagcggattgcatttatacgcttatagcaggtgctttaagttagcaaactgccattcttatactgtatatcctcttaaaaagtccatagttaaacattaagtacaaataagcttatttaaaagttgtatgcgtaggtgtttccaactttttatgccaaatgtcaacaaaaagttaaccaaaagccaaccaataaaaaaagttattggcaacacgacaagtgctctcacggaaacatccggagaaaaaaaaaaacattttccagccaattgaatttccggccaagccattgccataagtttcccgagacgctagttttcttccggagcaaaaacataaccatggaggaattcaaatattaactgcattctgcggcagttaagtttgtttttgccacattttggcccaccttttggccatgaaattcaaattgtacggcaactggcacacaaattaaatgaaaatgctgtcagtggtaatgaaaaatgcaacgaaaatatttgctcaaagtttcggtagtcgagtgcatgatataaaccgagctaagtagcaaagtcactcatgaggggagttgaagccaacaatccaggatacggattaaccgaaaagtgtgcggcaataaagtttcattaactcgtaaggattaaagacccttttcacatgctcaagtcactaaatcccgagtgttaaatgccacgatgtaaacttaatgtttgcaacttaaatggccggtccatcgtttaagctgagctccattataattacctgggtgtcggaagtgggagtccttgggagcaatttgcatgttgtagcatggagtgcttaaataaaatggcacagtggctcatataaatttgtgcattgcataattttcgagcgcattaaaacggcggcggaagggaaatgaaatttgattgtgagaaaggattcgttgcgccatttccgctgttggcgttgatgctgacttaattagcatagaaagtgtagctgcagctgcaactgccactctggacttttgggggtgccgcagtaattggggttaggtgtcccaactttaagccgacttctgacaccgccgacttgccacttcgcttatgcaatttgcactttgctcctgccgcctccactcgactaaatgagtttcgaaccaatggagcggcggtggctgaatccgttttggccaactctgagtgttcggccaaattaaattatgcagattgtggcggcaacaatgctgaaaggtatccaaagacatttgcctaatgagcatagcgagttttgagcactgacagttacaagtagttgaatttaagtcaacaaaattataacattttcctctgagtaaactcacataattttcttcccaacacacaagtttattttgcacttcacaaatacctcatttctataaaaggctgaaagaatttggtcttatttttcgatttgctatgaaatgtagtaattgttttcagctggcaagacaaaaaagcttattccgcccaattttgtcgtttgtcatagctcaaaatgttcagaaaaaaagaagcacatttaccacattagcccaaaaatagtatataatttaacacccacaaagcaaggaaaaaatgtagaaaaatgagccaacttcgtgccactttattacgatgggaaaagttttgtggactggcaccaaaaaaaaaaaagagcaacagcagggtcctttatttaatccgccatccagcctgggcacgcactctaccaacttttgcataacaaaactgttgtaaaatgctccaattgcaaacaaagcgacaggagccacgtacacacatatgcaggctgcacccacacactcaaacatacatactcatacacacgcagaaaaatgaagaaacaggcagtaacacaaacaattacatggcaggccaacattaaaggaactcctgcaagtatgaaatgtttgttgcgctcgttggccaactcacttttaacgcattccaccgactgaaactttcagctcttagtccgagaattgttttactgcccttttatggtacactcgctcgtgcatggagcggcagtggcttcttccacggccacgtgcactggctaattatagccaagatgccagctccccaccggcaaatcctggacgtgactcacctcgcgacccttgcagtgcagcgtgtcgtagacctccggcctgccctcgatgttcttcagtctcatcggcttgcgcatcagcagactgcgtccctcgtcgtccaggtgcataaaactgcaatttggaaagtgatttcagattcagttgtgggtagaaagtacggaaaagtaagtgctaagccagcgaatctgagagccatttggccactaagcttcgcacattaatcgcgcattttgtctagaggctgcgtagtcttttctttcaggccactcatcttggagtaattaaatatgaatgttttttataaacgttttaaaaacaataagcttttgaattcgtaaaaaaaacaaatttgattctctggattattggtaaaaacttaaagccaatttaaggtaacattctcaatttgtacgctttaaatgcaaggaaagttcataactaaaagaataataagaatagcctagtcgtctatgcctatggctaaatggttaaaaatgcattttgcttaactgcctagcagtgaaatagaaatgtttttcttatttttgaaactcaatttccccccggcaaatgctatttaccagcatcacctagaaaacccatctagttcccaaacgcaactaattcagcttagtcctgccgccatcctgtggctgccccaaaccatttatcagtcatgccagcagtggtgtgctccacatatctgtgataaatgcaatccttacctgccggcacgcgaccgataatcctgtgacatctttctgggctgctgttggtttttcggcgacggcgatagttcccgcgaactttttccggacgcagtgcagctgcccgagggaggacaacccgcaccctgaccaacgccaacgccaccaccgccactcccactcccgctgccactgccatccagttcgaccacgatgctggtgttggtgccacgccgttcgcggattggaggcgatgctgtggagatactggcgcgcttgtggtgcctcaatggcgtgccacttgaagatggcaagcctcctgctgcttgagctccttgtgctccacccggatggtccacttcatggctgggcgaggagtcaccgcctccgccatttggattgccgctcaagagcccattgccattcaacgttggcgttgcttgagttttgatttttctgctattttgttgctgtgtctgtgccttctgttgctgcagctgctgctgctgctgctgcagttgctgttgctgctgctgctgttgctgttgcgcatttgtcgaacgtttgatggtcacgaatcgcaggttctcaaatatcgatgtgaaatgctgcgacatcttgtccggggaacgtggagcagctcctctgcgctgattgtttgcctcgttgatttaaaatgcagccaacaggtgaaccacttggacaatttaccctccaagtttttgattaaattctgttcgcaaactttctgcggctctctttttcgggccgcactcaattgcttcactgaggattgaaaagttttcggaaaagttgtattacttcgcttggtcggaacgaataaaggaacttaaaaacatactggtgtaatgagaggtttaatgagcaaaatcggcaggataaagtttgcttttgattttctattgtgttagacttaagtatatgcatgtctttaagtaggctataattgtaatatatttgtagtgtaataactttaataacacactattaatactacttaagaataatcctttatcctttagttatttgattgactgtgtagtggtatcccccagtttgtgcacttgaatgaatccatacctttgacttaaggctcctgcctcgaatgtcatcagacatcatcgagttgtccagctttctgatccttcggctccactcaaaatgcctgagagcgacgaaaggaaaacaatagatggacaaaggctggcttttagctataaaaatagacttatgcactcaaagccagccggccagctaattgattgattgattgataagccaaagcaaaagggcgtaacggcacgtactgtatgtgcgtgtgtgcgaatggaaaaataacatccagtgaaacaaaataaaccaaaatttgcggtcattattttgatttgcctaagcaattttccaaagccgtcattaaacaaaacagcaaaaacaagtgcgcacaaacaatgggcgagtaattggaaagcgatagcatttcattggacattctgtgtgactcagtgcgtgagtgccctcaaagtgaatgattcggcatttgatttcgaatttaaatgcgcgtgggtgcccattgaacttcatcgatggaatggattcccccaggtcagcagtggtcagcagcttcccatgtcaaatgcagccacaagcggaggttaatcaatggcagcggctcatcggtttcgcatttcatgtggcccaagtacacaatagccacctgtctattacgaaaaaggatatttcaaactggattttaaacagagttatc

SEQ ID NO: 14651 - DNA, 4469 bp, DROSOPHILA
tgaagcaattgagtgcggcccgaaaaagagagccgcagaaagtttgcgaacagaatttaatcaaaaacttggagggtaaattgtccaagtggttcacctgttggctgcattttaaatcaacgaggcaaacaatcagcgcagaggagctgctccacgttccccggacaagatgtcgcagcatttcacatcgatatttgagaacctgcgattcgtgaccatcaaacgttcgacaaatgcgcaacagcaacagcagcagcagcaacagcaactgcagcagcagcagcagcagctgcagcaacagaaggcacagacacagcaacaaaatagcagaaaaatcaaaactcaagcaacgccaacgttgaatggcaatgggctcttgagcggcaatccaaatggcggaggcggtgactcctcgcccagccatgaagtggaccatccgggtggagcacaaggagctcaagcagcaggaggcttgccatcttcaagtggcacgccattgaggcaccacaagcgcgccagtatctccacagcatcgcctccaatccgcgaacggcgtggcaccaacaccagcatcgtggtcgaactggatggcagtggcagcgggagtgggagtggcggtggtggcgttggcgttggtcagggtgcgggttgtcctccctcgggcagctgcactgcgtccggaaaaagttcgcgggaactatcgccgtcgccgaaaaaccaacagcagcccagaaagatgtcacaggattatcggtcgcgtgccggcagttttatgcacctggacgacgagggacgcagtctgctgatgcgcaagccgatgagactgaagaacatcgagggcaggccggaggtctacgacacgctgcactgcaagggtcgcgagattctttcctgctcgaaggccacctgtacgagcagcattatgaacattggcaatgcggcggtggaggccaggaaatccgatctgatcctcgaacacgccaaggacttcctcgagcagtactttacatcgataaagcgtacatcatctaccgcccacgagacgcgatggaaacaggtgcgccagagcattgagaccactggacattatcagctaaccgaaacggaactaatttatggtgccaaattggcctggcgcaattcttcacgttgcattggccgaatacaatggtcgaagttgcaggtctttgactgtcggtatgtgacaacaacaagtggcatgtttgaagccatttgcaatcacattaaatatgcaacaaataagggcaacctgagatcggccatcacgatatttccacaacgcacagatgccaagcatgattatcgcatttggaataaccaattaatatcttatgccggctacaagcaggcggatgggaaaatcattggcgatcccatgaatgtggagtttacagaggtctgcaccaagctgggctggaagagcaagggcagcgagtgggacatactgccattggtggtctcggccaatggtcacgatccggactactttgattacccgcccgaattgatactggaagttccgctgacccatccaaaattcgaatggttctcggatctgggactgcgatggtacgccctgcccgccgtatccagtatgctgttcgatgtgggcggcattcagtttacggccaccacattcagtggttggtacatgtcgacagagattggcagccggaatttatgcgacacaaatcgccgcaatatgctggagacggtggcgctgaagatgcaactggacacccgtacgcccacatccttgtggaaggacaaggctgtggtggagatgaacattgccgtgctccactcctaccagagtcgcaacgtgaccattgtggatcaccacacggccagcgagagctttatgaagcatttcgagaacgagtccaagctcaggaatgggtgtcccgctgattggatttggatcgtgccgccgctgtcgggctccataacgccggtattccatcaggagatggctctgtactacctgaagccctcgttcgagtaccaggatcccgcctggcgaacccacgtgtggaagaaggggcgtggcgagagcaagggcaagaagccaagacgtaaattcaattttaaacaaatcgctagggctgtgaaatttacatcgaaactatttggacgcgccttatcgaaacgcataaaggcaacagttctatatgccaccgaaactggcaaatcggagcaatatgcgaagcaactttgtgaactcctagggcacgcattcaatgcacagatatattgcatgtccgactacgatatatcctccattgagcacgaggcattgttaattgttgtggcctccacctttggcaacggtgatccgcccgaaaacggcgagcttttctcccaggaattgtatgcgatgcgtgtccaggagtcttccgagcatggattgcaggactccagcattggctcgtcaaagtccttcatgaaggccagctcgcggcaggagttcatgaagctgccactgcaacaggtgaagagaatcgaccgctgggactcgctgcggggctccacctcggacaccttcaccgaggagacctttggccccctctccaatgtccggttcgccgtttttgccctcggctcctcggcctatccaaatttctgcgccttcggtcagtatgtggacaacattctgggcgagctgggcggcgaacgcctgctgagggtggcctacggcgacgagatgtgcggacaggagcagtcgttccggaagtgggcgcccgaggtattcaagttggcctgcgagaccttctgcctggatccagaggagagcctttcggatgcctcgctagccctgcagaacgattcgctgactgtgaatacggtgcgcctggtgccgtcggcgaataagggatccctggacagcagtttatccaagtaccacaacaagaaggtgcactgctgcaaggcgaaggcgaagccccacaatttgacccgtttgagtgagggagccaagacaacgatgctgctggagatctgtgcacctggcttggagtacgagccgggtgatcatgtgggcatctttccggcgaatcgaacggaactggtcgacggactgctaaatcgactggtgggtgtggataatcccgacgaggtgctgcagttgcaattgctaaaggaaaagcagacatcgaatggtatattcaagtgctgggagccgcacgacaaaataccgccggatactctaaggaatcttctggcccgattctttgatctgaccactccgccatcgcgacagttgctcaccctgctggcaggattctgtgaggataccgcggacaaggagcggctggagttgctggtcaacgattcgtcggcctacgaggactggcggcactggcggctgccccatctgctggacgttctcgaggagttcccctcgtgccgaccaccggctccccttctgcttgcccaactaacgccgctgcagcctcgcttctattccatttcttcgtcgccgcgccgcgttagtgacgaaatccacctcacggtggccatcgtgaagtaccgctgtgaagatggccagggagacgagcggtatggcgtgtgctctaactatctatccggcttgcgggcagacgacgagctgttcatgttcgtgaggagcgccttgggcttccatttgcccagcgatcggagtcgtcccattattctgattggtcctggcacaggaatagctccattccgctccttttggcaggagttccaggtgctaagcgaccttgatcccacggccaaattgcccaagatgtggctcttctttggctgccgtaatcgggatgtcgatttgtacgccgaggagaaggcagagctacagaaggatcaaatcctagaccgagtttttctcgctctgtccagggagcaggccattccgaagacatatgtgcaggacctgattgagcaggaattcgattcgttgtaccagttgattgtccaggagcggggccacatctacgtctgcggcgatgtcacaatggccgagcatgtgtaccagaccatcaggaagtgcattgccggcaaagagcagaaaagcgaggcggaagttgagacatttttgctaacactgcgggacgaaagtcgctaccacgaggacatctttggcatcacgctgcgaacggctgagatacacacaaagtcaagggccacggccaggatacgaatggcctcccagccataaggatagatattcgaagtaatcaaaataggagggtgacatatccaaattcaagaggaataccaagcacttgctcttttttttcttccatattcaaatgcaattaaatattgtcgctttgttcattacatattcgtatgaataacgtttaaataaattacattttattattgattctaatgtacaaatcaattgtgaaatcaaaatctaaatgttaaaatatatttcaaataaacgaatcgaaaaagaaatc

SEQ ID NO: 14652 - protein, 1349 aa, DROSOPHILA
MSQHFTSIFENLRFVTIKRSTNAQQQQQQQQQQLQQQQQQLQQQKAQTQQQNSRKIKTQATPTLNGNGLLSGNPNGGGGDSSPSHEVDHPGGAQGAQAAGGLPSSSGTPLRHHKRASISTASPPIRERRGTNTSIVVELDGSGSGSGSGGGGVGVGQGAGCPPSGSCTASGKSSRELSPSPKNQQQPRKMSQDYRSRAGSFMHLDDEGRSLLMRKPMRLKNIEGRPEVYDTLHCKGREILSCSKATCTSSIMNIGNAAVEARKSDLILEHAKDFLEQYFTSIKRTSSTAHETRWKQVRQSIETTGHYQLTETELIYGAKLAWRNSSRCIGRIQWSKLQVFDCRYVTTTSGMFEAICNHIKYATNKGNLRSAITIFPQRTDAKHDYRIWNNQLISYAGYKQADGKIIGDPMNVEFTEVCTKLGWKSKGSEWDILPLVVSANGHDPDYFDYPPELILEVPLTHPKFEWFSDLGLRWYALPAVSSMLFDVGGIQFTATTFSGWYMSTEIGSRNLCDTNRRNMLETVALKMQLDTRTPTSLWKDKAVVEMNIAVLHSYQSRNVTIVDHHTASESFMKHFENESKLRNGCPADWIWIVPPLSGSITPVFHQEMALYYLKPSFEYQDPAWRTHVWKKGRGESKGKKPRRKFNFKQIARAVKFTSKLFGRALSKRIKATVLYATETGKSEQYAKQLCELLGHAFNAQIYCMSDYDISSIEHEALLIVVASTFGNGDPPENGELFSQELYAMRVQESSEHGLQDSSIGSSKSFMKASSRQEFMKLPLQQVKRIDRWDSLRGSTSDTFTEETFGPLSNVRFAVFALGSSAYPNFCAFGQYVDNILGELGGERLLRVAYGDEMCGQEQSFRKWAPEVFKLACETFCLDPEESLSDASLALQNDSLTVNTVRLVPSANKGSLDSSLSKYHNKKVHCCKAKAKPHNLTRLSEGAKTTMLLEICAPGLEYEPGDHVGIFPANRTELVDGLLNRLVGVDNPDEVLQLQLLKEKQTSNGIFKCWEPHDKIPPDTLRNLLARFFDLTTPPSRQLLTLLAGFCEDTADKERLELLVNDSSAYEDWRHWRLPHLLDVLEEFPSCRPPAPLLLAQLTPLQPRFYSISSSPRRVSDEIHLTVAIVKYRCEDGQGDERYGVCSNYLSGLRADDELFMFVRSALGFHLPSDRSRPIILIGPGTGIAPFRSFWQEFQVLSDLDPTAKLPKMWLFFGCRNRDVDLYAEEKAELQKDQILDRVFLALSREQAIPKTYVQDLIEQEFDSLYQLIVQERGHIYVCGDVTMAEHVYQTIRKCIAGKEQKSEAEVETFLLTLRDESRYHEDIFGITLRTAEIHTKSRATARIRMASQP

SEQ ID NO: 14653 - DNA, 3232 bp, DROSOPHILA
cccagtggcgatattccgccgctgccccaggatcccgaccagatcatggccggtttcaaaaagatggccgaagcggcagcgctcaccttgagcggcgaaaattcggccaccgacgaggatgtctccaagtattctgatagcatttcccaggctctcaagggtctgcaagagggctccgagaacctggctgctcccgcctcggagaacgacatagccagcatgtttggttcactgaatcttgaaggggtatgcatcctgaaaatgaaatatgaattctccttgctcaatcattaaacaatccccgtttgacaggctggcgagggtgatggaaacatgttcctaccattcatggagggcatgatgcagagcctgctctcggcggagattctgttgcccagcatccgggagctgctggagaagtaccccaagtacctcgaggagaacgacgccaagctctccgctgaggacaaggaaaggtatgctcgaaatcaactcgcaataagatacttttattgagaaaccaatacatacaggtaccagaagcagatggagctgtacaaggtgattgaggggcatttacagagcgagaagaccgaggattcggccgccgtgaagcgagagaagttccgcgtcgtgctggacgacatgcgcaaactgcaagactacggccagccgccgccagagattctggccgagacgggcggcgacttgcccttcggcgatcccactgccggcgtagcagccggcggtcccggtccccagtgcccaaccatgtagtggctgacggagcacgatagtctcgtggtgtgccaattggttaactgttgagtgttgcacattttttaggctaaggcaaatttgtattttattttatcaccgacaaaacaatacggcggtcgctaatggttatcacctctctcttcaatcaagctattattttcgtattaactgttggtttattaagtagttctatacctaaatacaatgcctcgaaatacacctagaggaagaagcgacgtcgcgactccatggcgtgccgtttgttgctgattatccaggcatagtcaccggtcttgctgtcgaatgtgccctcctgcagggaacgtagtttcagggtgaaccgcggccccagttcgcgcagctttacgcgttttccctctttggtgaactcgtagcggtggtgacggaagaatatgtaatctcgctgattgtggaacgtcaccgctcggcggccgcggaactcgggatcgtgatggaagagggcacccagcatgcggcccacggtcagacccaaacgtgtggtaaaattgttcaggatcacttcgggcctgtgcttggttatctccttgtgatcgcgctttatgtccgaggtgagcttcacgttggacagcttgaagtgggcagtgggaccattgggcagatgaatgaccagcagcccattgggctttctgcgatcttcgttaacgatcacgacgtctgtgaactcctcgcgctcggcgcttttgcatatcttcttcaccgacgacttgttgcgaatcttaaccagggcgttggggaatatgcgcgaaagctccagtccaaacttacgcgtcttggtcaccggattgtcagcaaaagtgatcagcacctttggctcgtacgaacgttcgaagtacgagctgaaatcgtccagttggagttccttttgcaactcctcgttgtcggaatcgttcagattggccacctctgtttggtccttctctcgcaggctctctatggtgtgaccaggattggcgggtacaccagccttccgtcgggcacggcgctcctgcatttttttcttgtgcttctccttcttcatttttttgtacaacgccaaacgctgctccttgttgcgcatccagctgaggggattcaaaacaggaattcgtgtcttcttgtcgtcgtcgtcgtcatcatcctcttcttcgtcgtcgtcgtcattctcctcctcatcgtcgtcatcatcctcttcctttaaatcctcactggcttccccttgtttggccgtttttttgctgctggaggcggcttcttcatcgctgctatcagtgactggcccctcctggacttccaaatcctgtggctcctcctcgtcaaagctggaatcgctgtccgagtcctgttccacgggcggaggggctgtttttcgcttaatttttatcattattccgagagaatcacgaattcacaaaaatgcgagcggcacgtgttgatattcttcttcttataccaatcacacggaaacgcagacaatctgctgtgtggggcagtgttggaaaacgtgccactcacaacgtgtagtttgtaaacaaaaatatatttaattaaaatggtatttcgggtcttagaactatttagtggcattggcggcatgcattatgcctttaattgtgagttcgtcgatcatgatacatgcgaaactaatatatacttttgaagatgcccaattggatggacaaatagttgccgccttggatgtcaacaccgtggccaatgcggtttatgcgcacaattacggcagtaatttggtgaaaactaggaatattcaaagcctgagtgtaaaggaagtcacaaagcttcaggccaacatgctgctgatgtccccgccatgtcagccccacactcgccagggattgcaaagggacacggaagacaagcgatcggatgcacttactcatctgtgtggactgatcccagagtgccaggaactggagtacatactcatggaaaacgtcaagggtttcgagagctcacaggcgcgaaatcagtttattgaatcgctggagcggtcgggattccattggcgggagtttattctaacgccaacgcaattcaatgtgccaaatactcgatatcgctactattgcatcgcccgcaagggtgcagactttccatttgccggtggaaagatctgggaagaaatgccgggtgctatagcccagaatcagggtctttcacaaattgccgagattgtggaggaaaatgtatcacccgatttcctggtgcccgacgatgtcttgaccaaaagagtgctggtcatggacataatacatcctgctcaaagtagatccatgtgctttacaaagggctacacccattacaccgagggcacgggctctgcatacacaccgctttcggaggacgaatcccaccgcatcttcgagttggtcaaggaaattgacacaagtaatcaggatgcatcgaagtcgga

SEQ ID NO: 14654 - DNA, 1232 bp, DROSOPHILA
aacacgtgccgctcgcatttttgtgaattcgtgattctctcggaataatgataaaaattaagcgaaaaacagcccctccgcccgtggaacaggactcggacagcgattccagctttgacgaggaggagccacaggatttggaagtccaggaggggccagtcactgatagcagcgatgaagaagccgcctccagcagcaaaaaaacggccaaacaaggggaagccagtgaggatttaaaggaagaggatgatgacgacgatgaggaggagaatgacgacgacgacgaagaagaggatgatgacgacgacgacgacaagaagacacgaattcctgttttgaatcccctcagctggatgcgcaacaaggagcagcgtttggcgttgtacaaaaaaatgaagaaggagaagcacaagaaaaaaatgcaggagcgccgtgcccgacggaaggctggtgtacccgccaatcctggtcacaccatagagagcctgcgagagaaggaccaaacagaggtggccaatctgaacgattccgacaacgaggagttgcaaaaggaactccaactggacgatttcagctcgtacttcgaacgttcgtacgagccaaaggtgctgatcacttttgctgacaatccggtgaccaagacgcgtaagtttggactggagctttcgcgcatattccccaacgccctggttaagattcgcaacaagtcgtcggtgaagaagatatgcaaaagcgccgagcgcgaggagttcacagacgtcgtgatcgttaacgaagatcgcagaaagcccaatgggctgctggtcattcatctgcccaatggtcccactgcccacttcaagctgtccaacgtgaagctcacctcggacataaagcgcgatcacaaggagataaccaagcacaggcccgaagtgatcctgaacaattttaccacacgtttgggtctgaccgtgggccgcatgctgggtgccctcttccatcacgatcccgagttccgcggccgccgagcggtgacgttccacaatcagcgagattacatattcttccgtcaccaccgctacgagttcaccaaagagggaaaacgcgtaaagctgcgcgaactggggccgcggttcaccctgaaactacgttccctgcaggagggcacattcgacagcaagaccggtgactatgcctggataatcagcaacaaacggcacgccatggagtcgcgacgtcgcttcttcctctag

SEQ ID NO: 14655 - protein, 394 aa, DROSOPHILA
MIKIKRKTAPPPVEQDSDSDSSFDEEEPQDLEVQEGPVTDSSDEEAASSSKKTAKQGEASEDLKEEDDDDDEEENDDDDEEEDDDDDDDKKTRIPVLNPLSWMRNKEQRLALYKKMKKEKHKKKMQERRARRKAGVPANPGHTIESLREKDQTEVANLNDSDNEELQKELQLDDFSSYFERSYEPKVLITFADNPVTKTRKFGLELSRIFPNALVKIRNKSSVKKICKSAEREEFTDVVIVNEDRRKPNGLLVIHLPNGPTAHFKLSNVKLTSDIKRDHKEITKHRPEVILNNFTTRLGLTVGRMLGALFHHDPEFRGRRAVTFHNQRDYIFFRHHRYEFTKEGKRVKLRELGPRFTLKLRSLQEGTFDSKTGDYAWIISNKRHAMESRRRFFL

SEQ ID NO: 14656 - DNA, 3300 bp, DROSOPHILA
caatctaaatagatacagatagtttagtatgttcatatacatttagaaatatttctatacaatcgtatagcttaggatcaagaataagcttaatatttctttgttaaactttatatttatttattaaacataattttttcctgtctataggaaggggtaagaaggggtctgtgggtgccggcacgcaacacccgcgacactcgacgacataaatcaggctcaaagaaaaacctagtgaaagagttgggggcgactgtaaggcgagacacttgcattttggttcgtcgttttttgaggggtttgaggcaaacatgtccaagctgtcgcttgtatgcccctctttatcggccccccatttgccacaaacatatgcagcacccccttcgactcacccaaatacgcgaaaatgtgcgtaacgtaacacaggcagccacgaagcacgcaaacttcgatctacacggaaaaaaatgtattctattttaatttaataattgttgtcaaaaactttatttctctatacttcaaaaactaatgaaatttattcaaacaggccataaaagtgaattactgaatcattaaagacgataaagatttaaattaatacgtcttaattgatttgtcattataaactttttttaaaacaaattttataaattaaaaaagattatgattgataattttatcagtgcacgtttgagctggatctgacgttggagttgcagaaggagtctcagactgagttgaagactgaaactagcgaacatatttcattccacggacatgagacacgagaccgcggctttaattgacatgtgttcattagatgaaccagtagtatcggattcgtgaaatgcaacgcatagagttcggaagtatgtctaatggggagctgtgtcttcaggcgttcttaattaaattaccatcaataatatatttatatttatatatttatatttccttacggtctgctaatatgcgtttagtctgaagccgctctcagaatgaaatacttgtgtaagcggtcaacgaaatcgtattttactctgcaacaattcagtctaattcccttagatcttcttttgttggccacctcagtagagagcgggttttgggaggacttttatcgaattctagcatcgcagaatgcaaaaaggaacctcatttattcgccgatatctgctgagattattatgagcatggtttatatggcatcaggtggaaaaacgttcgaagagcttagaaacgttttgaaattttctgagaacaaaacacttgtggcaaacaactatcgtagccttttaagcgatcttaagcgccgcgaaacgtttattatcctgcatatggcaaaccggatatatgtgaacaagaaatattgccttgtaccggaatttaaccagttggcacgaaaggccttcaaggccaaagccaagtcgatccgtctagacgatccagtcagtgcgtctgcgatagtcaatagctggatattaaatcgaacgcgtggcatgatccggaacatagttttacctaaggactttaattcggatacaagtgcgtttctggtgaatgcaatctacttcaagggccagtggctgtataacttcaaggccgaccaaactcatatagccgacttctatgtatcagctaacgaaattattccggtgaagatgatgactttgtctgcatccctactatcaggatacatcgatgacattgatgcaaagattatcgaactaccctactggaactcaactctttctatgcgcatcattctgcccaatagtgttgatggtcttagaaaactgaaagagaaagttggttttattgactatcatttggaaaaaaaatccgtaaatgttaaactgcccaagttcaaaatcgaatctaaagcacaactaaagggaatttttgaaaatgttagtatattgctaaatataaatgataccttttatttatacctttcctcagttaggcattctagatgtatttaagccctcagctgacttaaatgggctcgtcctagaatctggtgctaagatcgataaaattgtgcaaaaggcctttctgaagatcgatgaaaagggtggcgaagcttctgcggcaacaggtgagtaataacaattcccccaggattcgtagcatttacgtaatatcttttaggtgttcttactcgccgaaagaagtccattgacaatttaatacagcctccaatggagtttatagctgatcatccgtttttctacgtaattcatgacaacaaagtcatttactttcagggtcacatcgttgaaccacgctggtaatcaaatgccagcaaaattcgactaactttttaaaggtcaaaaaagaaaatataaaaaatataaacaatttaaaatacctattaaataatttcaaaatcttataaggaaatgttaaatggaaacgtgtacaaagttaatgaatatttaatcaatcattccgtgattaagaaatttagggactatagacttatctaaacgctgtgaagaggccgcaatcaatatcagtttaaagacttttttcttccaccgattgcacattttttaggtcgtctagttttgtttttcgagccatgtgtgcccggtcagatgggcttaaccttttgccttatcctccattcgatataactgctaattgaccctcgacgacagccaagggaatgacgtccgaagagtccgaccaacacagctgtttgaccttttggccttagcaaaaaaaaggcaaagacaacgacgtcgataaaagttataggcgcccataaattaaaatgcaaattaaaagacggcagaacgggatagaaacatctaattgtacgaaggaaaaaggaatgtactgcgtcgatggttggagaggcaggctaataattatcactgtcattttttatcgccttaattatgaccaatatttggccaataaaaaaattcggcgattcagcaaagcgaaaggtcgaagacaagttgcgtcatcattctaatccaagccaaaaaagttttaattaaaaaaattgttaactctaatacggatagaaaaagaagcaaattgcgaaaatatacgtgaaaattcagctggtttttgctggacacgcgacaaattggacattggacatgtctgtcagatggactttcagttctccttttccggctcttaatccctgccagagttttcccttactgaaccaagaggtaaatccaaaatcagcttaaattaaatttttgcgctttactttttggttagaaggaatatcgctggataaagaaggacaccggaagtgacgccagtagc

SEQ ID NO: 14657 - DNA, 1195 bp, DROSOPHILA
aatgaaatacttgtgtaagcggtcaacgaaatcgtattttactctgcaacaattcagtctaattcccttagatcttcttttgttggccacctcagtagagagcgggttttgggaggacttttatcgaattctagcatcgcagaatgcaaaaaggaacctcatttattcgccgatatctgctgagattattatgagcatggtttatatggcatcaggtggaaaaacgttcgaagagcttagaaacgttttgaaattttctgagaacaaaacacttgtggcaaacaactatcgtagccttttaagcgatcttaagcgccgcgaaacgtttattatcctgcatatggcaaaccggatatatgtgaacaagaaatattgccttgtaccggaatttaaccagttggcacgaaaggccttcaaggccaaagccaagtcgatccgtctagacgatccagtcagtgcgtctgcgatagtcaatagctggatattaaatcgaacgcgtggcatgatccggaacatagttttacctaaggactttaattcggatacaagtgcgtttctggtgaatgcaatctacttcaagggccagtggctgtataacttcaaggccgaccaaactcatatagccgacttctatgtatcagctaacgaaattattccggtgaagatgatgactttgtctgcatccctactatcaggatacatcgatgacattgatgcaaagattatcgaactaccctactggaactcaactctttctatgcgcatcattctgcccaatagtgttgatggtcttagaaaactgaaagagaaagttggttttattgactatcatttggaaaaaaaatccgtaaatgttaaactgcccaagttcaaaatcgaatctaaagcacaactaaagggaatttttgaaaatttaggcattctagatgtatttaagccctcagctgacttaaatgggctcgtcctagaatctggtgctaagatcgataaaattgtgcaaaaggcctttctgaagatcgatgaaaagggtggcgaagcttctgcggcaacaggtgttcttactcgccgaaagaagtccattgacaatttaatacagcctccaatggagtttatagctgatcatccgtttttctacgtaattcatgacaacaaagtcatttactttcagggtcacatcgttgaaccacgctggtaa

SEQ ID NO: 14658 - protein, 397 aa, DROSOPHILA
MKYLCKRSTKSYFTLQQFSLIPLDLLLLATSVESGFWEDFYRILASQNAKRNLIYSPISAEIIMSMVYMASGGKTFEELRNVLKFSENKTLVANNYRSLLSDLKRRETFIILHMANRIYVNKKYCLVPEFNQLARKAFKAKAKSIRLDDPVSASAIVNSWILNRTRGMIRNIVLPKDFNSDTSAFLVNAIYFKGQWLYNFKADQTHIADFYVSANEIIPVKMMTLSASLLSGYIDDIDAKIIELPYWNSTLSMRIILPNSVDGLRKLKEKVGFIDYHLEKKSVNVKLPKFKIESKAQLKGIFENLGILDVFKPSADLNGLVLESGAKIDKIVQKAFLKIDEKGGEASAATGVLTRRKKSIDNLIQPPMEFIADHPFFYVIHDNKVIYFQGHIVEPRW

SEQ ID NO: 14659 - DNA, 4216 bp, DROSOPHILA
tttgccaatctacctgtttaagccatttgccaattccgattcctaagtcgattgtaaagtcaatatttacttttcacctcgatggccagagcgatagagcaaatagcgattaggagttttttctagattaaaataatagagccagtgtgcgttaggctgtctgagctgtctggaggtgaggattcaaggataatgacttcattaattgccatcgctcggacacgtagaatatggttgggtaggcagatccccgaggatgaggtgtgaatttgaggtaagtccgaacgagggcaattactccatttacttcgtagtcccatagggaccaacactctctattcgatggaatcgagggggcaattaacaccttggttggagttgtcttcgctattttggacgttccaaatcatcatcttgcatttcgggagttttctcttctttttttccggaaactatgcgacccgctcacagctggatctgaagttccgagagcagcaatcggaatcggtatctcacccggggcgagtgttgagatctccagccaggtccgtggaatgcgcagctactaaaaggctctaatggcccagaggatttcccatttcccgctgcgtacggaagcgtgtcaaggctgctgaatggccagcgtttcgagtgaaagatcattggagtacgttgtaaattagcatagatatatttttttatttaagagcacttgctacttaggctaatcatcttaaactctaatcctaagtcggtactattttctaggcttacatctacgaattggaactaatacatatgtttattgtttaggagcgagtctgtcagcggttttcccaaacggaaaatgtctgtactgctccaccacaaataaaatgttatttatattttcgtcccctgctctatgggtatgtacatctttggcgacttgtaccatggatctggtgacacctgctcctgctcctggaggagtaggtggtggatccgtgtccctttgattctagtaccatgagggatagaacggctgtggcggcatcgttgtgtagttgaccttcgagggcgaaggaaaggcggcggcattgaagttctggggcatgaagtgcgccgacgaactgggcggcggatagtgcggatgtgcgcctgcgtactgcggatgcggatgtgcgtgcggatgcggcgcatggggatgtccgtgatgcgaatgggcgtggcctggtgccggataggatgcatactgcggcgtatgctgatacggatggaacatctggtgggcggtgacatccagagcctggctggtcgagctggtggagttcagcgagtcctccggcgaaagtggcgcattggggcgcagtgcctgcatggagctccatccgccgtacaactgcgactgactggccgcgatcaggtccaccgattccactttcagggcagccgatagctcctcacttccagcactggcattggccagcgactgcgagggatcggctcccgagttggccccactggaggaggtcacaccagctccactcaccaccgcggaaaggctgttgggtgtgggtggcagttgcccgaaggcggaggacacggactcgttggggctctcgttgcgtggcatagtctggtgggtttccgtttcggtgccgtaaactgaacccaactgagtctcatagctggagacgatgatgttcccggtgggtgtggtgttgccattctcacccggcattatgtagctggctgtgttagcgctgggattgtagaactgatggtggtgcggtggcgtggttgtaattccgggcgatagattactactggccattggagctgcggcggatacggaaatgttggcgtgactgccgtagaaatcgtattgctgctggtacacagtggctggatccagggatcccggcatcatggccagcggagccatgctgggcacacttgataccacactgggcaaagagctggacgcggcgacatggctcactgaggcagctgctccgccaggtgctccgcccgagaccgaggtgtgctgcttgcggagacgagcacgccgattgctgaaccacacctgaatgcgtgcctccgtgagattggtgcgctgggccagctcctcacgggtgtagatatcagggtattgggtgcgctcgaaggcgcgttccagttcgtccaactgggaagcggaaaaggtggtcctgcagcggcgctgtttgcgcttcaaggcgattcccggctcactttcacagtcagagatgtcctcatcggagggcttgccgttgttgtgatggccacctgagacatcggagccgcaggaactcgatgctttggtgccatcacccgccggagatccagaggcagaagacatatcattgtccaatggagcatctcggccgcgcaccaggcgcgatatggcggacacagatggtgctgtgctcctgtcgcagacaccctcgcggatcagcttctccctgatctcccacgagaacatgcccgggctactgcgcttgtactcctcaattcggttctcgatttcgggcgtggctatcctcggcttggagccaccaattacgcctggtctaatggagccagtctcctggtagcgattcaggatcttcgatacgcagccatgggacacacgtagctgtctggagatcacacagggccgaatgccatcggcggccatctcgacgattttaagacgaatattgttgggcaaaggacgaccgttgatgaaaactccacctagttgattgacgcgcccctggccgctgttcatgtctggaatgaggaagatgagaaaatggaaattttagaggcttttccaatactagctaggtagagcggagcgcgtgtcacttgatttacgacaccttcgaccggagttgacttcccgggaagacgggaaactcggagctaaggtcgaaggtcagaggcgcgcgactctcccgccgggcaactaatggccattagagagtagccgacggccttggcccaaactgagatctttagcgggatcttgagccgtcggtttagaaatgaagatatatggaaatgatcaactaggctttgatatttagtaagtacattgtgaaagtgacttatattccaaagtgacttttgctggatgttgtatataagcgatagacactcaccttgcatggtagaatatccattgaagaagggtctgtgcattgcggcagcaaaggcggttacggtcatagtttctggaggagctccaagatgcgtaagcttgtcccggcacaaaaccggtgttaactcagtctcgaagttcgtatatcacttgattatatcactttagttctggacaatgtctggacactttgtcaaagtcataagtaagcgttgcgaggtattgattaaccgattagttgcacttcgaatatctaagtatctgttagttcgcaatctcgatgggaaagatgaaacggaggcgaaggcgaagacgagaacgaggacgagatgcggtgtggctcgttgcgcagtctgtgcctgactgacttcaccatccgaacgtcggccaagatcgttgcctttctgtgaagccacggcccagacgtcggccatatcccacagtcacttggcaggtaaccactacgcggaccaatcgcagcgctctccacaacggcatctcgctctggctcactcgacccatttagcaaccgtctcgctcgccgccagggggcgtctcagctgtgaaaagcaccgtggaatgggagaagagcagagaactttggattggggggtatacgagtacaagggaaccacaatacttctgctccagatcctgggcattccatccattcaaatcctatgcatagtttcgactttcactggtttccggaaattaattaatgccgtaagtagcacgatacaatttaagcgttacatatcctttatggataccttgttataaggataagggaatactggacttgagagatcagtctgcctggcgtttgcttttcactcttcacttgagatattctttggggttccacttggccccggaaatcaaattagatattcactggaacccataatgcaatcgagtacgcgtttaacactctttacaagcgtaatatatcctttattgatacctaattatggctttcgtttatattgccactcgagtagcctcttttctctcagttatttattgctttcggaaacggtgaacaaagttcttcatttcaaattg

SEQ ID NO: 14660 - DNA, 2078 bp, DROSOPHILA
atgaccgtaaccgcctttgctgccgcaatgcacagacccttcttcaatggatattctaccatgcaagaaagcctagttgatcatttccatatatcttcatttctaaaccgacggctcaagatcccgctaaagatctcagtttgggccaaggccgtcggctactctctaatggccattagttgcccggcgggagagtcgcgcgcctctgaccttcgaccttagctccgagtttcccgtcttcccgggaagtcaactccggtcgaaggtgtcgtaaatcaagtgacacgcgctccgctctacctaacatgaacagcggccaggggcgcgtcaatcaactaggtggagttttcatcaacggtcgtcctttgcccaacaatattcgtcttaaaatcgtcgagatggccgccgatggcattcggccctgtgtgatctccagacagctacgtgtgtcccatggctgcgtatcgaagatcctgaatcgctaccaggagactggctccattagaccaggcgtaattggtggctccaagccgaggatagccacgcccgaaatcgagaaccgaattgaggagtacaagcgcagtagcccgggcatgttctcgtgggagatcagggagaagctgatccgcgagggtgtctgcgacaggagcacagcaccatctgtgtccgccatatcgcgcctggtgcgcggccgagatgctccattggacaatgatatgtcttctgcctctggatctccggcgggtgatggcaccaaagcatcgagttcctgcggctccgatgtctcaggtggccatcacaacaacggcaagccctccgatgaggacatctctgactgtgaaagtgagccgggaatcgccttgaagcgcaaacagcgccgctgcaggaccaccttttccgcttcccagttggacgaactggaacgcgccttcgagcgcacccaataccctgatatctacacccgtgaggagctggcccagcgcaccaatctcacggaggcacgcattcaggtgtggttcagcaatcggcgtgctcgtctccgcaagcagcacacctcggtctcgggcggagcacctggcggagcagctgcctcagtgagccatgtcgccgcgtccagctctttgcccagtgtggtatcaagtgtgcccagcatggctccgctggccatgatgccgggatccctggatccagccactgtgtaccagcagcaatacgatttctacggcagtcacgccaacatttccgtatccgccgcagctccaatggccagtagtaatctatcgcccggaattacaaccacgccaccgcaccaccatcagttctacaatcccagcgctaacacagccagctacataatgccgggtgagaatggcaacaccacacccaccgggaacatcatcgtctccagctatgagactcagttgggttcagtttacggcaccgaaacggaaacccaccagactatgccacgcaacgagagccccaacgagtccgtgtcctccgccttcgggcaactgccacccacacccaacagcctttccgcggtggtgagtggagctggtgtgacctcctccagtggggccaactcgggagccgatccctcgcagtcgctggccaatgccagtgctggaagtgaggagctatcggctgccctgaaagtggaatcggtggacctgatcgcggccagtcagtcgcagttgtacggcggatggagctccatgcaggcactgcgccccaatgcgccactttcgccggaggactcgctgaactccaccagctcgaccagccaggctctggatgtcaccgcccaccagatgttccatccgtatcagcatacgccgcagtatgcatcctatccggcaccaggccacgcccattcgcatcacggacatccccatgcgccgcatccgcacgcacatccgcatccgcagtacgcaggcgcacatccgcactatccgccgcccagttcgtcggcgcacttcatgccccagaacttcaatgccgccgcctttccttcgccctcgaaggtcaactacacaacgatgccgccacagccgttctatccctcatggtactag

SEQ ID NO: 14661 - protein, 590 aa, DROSOPHILA
MNSGQGRVNQLGGVFINGRPLPNNIRLKIVEMAADGIRPCVISRQLRVSHGCVSKILNRYQETGSIRPGVIGGSKPRIATPEIENRIEEYKRSSPGMFSWEIREKLIREGVCDRSTAPSVSAISRLVRGRDAPLDNDMSSASGSPAGDGTKASSSCGSDVSGGHHNNGKPSDEDISDCESEPGIALKRKQRRCRTTFSASQLDELERAFERTQYPDIYTREELAQRTNLTEARIQVWFSNRRARLRKQHTSVSGGAPGGAAASVSHVAASSSLPSVVSSVPSMAPLAMMPGSLDPATVYQQQYDFYGSHANISVSAAAPMASSNLSPGITTTPPHHHQFYNPSANTASYIMPGENGNTTPTGNIIVSSYETQLGSVYGTETETHQTMPRNESPNESVSSAFGQLPPTPNSLSAVVSGAGVTSSSGANSGADPSQSLANASAGSEELSAALKVESVDLIAASQSQLYGGWSSMQALRPNAPLSPEDSLNSTSSTSQALDVTAHQMFHPYQHTPQYASYPAPGHAHSHHGHPHAPHPHAHPHPQYAGAHPHYPPPSSSAHFMPQNFNAAAFPSPSKVNYTTMPPQPFYPSWY

SEQ ID NO: 14662 - DNA, 5498 bp, DROSOPHILA
ccctgggtgcgagtattaacgtagttgctggaattgcgattattgtagtagccaccgcgagtggtgccaccaccacgtggaatgaatccgccgcgtccacgcatctttaattccaatctcttcctgtttgcagcacaaggaaatactgtaaggttgcgttgaaaagattacaaaattcgatccgcatggcagactatatacatgtatgcacaaatgcgtgcaaaatatacataaggacagactgagcgttcagcgcagcaccccttaagtttttttttcttttcatggattatctctgcgccgccggtggcgtcgctcggtttgagaaaaaaagaatcgattttctgccggcccgagaatttttttgcgattttactgcaaattgatctaagccacttacctctgctctaacactattcactaatgggcacaatgaagcactgcttttctgtctgtttttcagttttaactgaacgtttaacttctgattttcaccttttctatcagctacttttttcgctcgaaacaattttttgtctagcaatggcgaacaaagtgaagtgtgaccgtgctctgtggaatcagtgcttaaaatcgattgttaagacttggctatatcgattgtcaacaatgtggcaatgctatttagctgaaataacattattaataacataataacataataacgaaataaaagaaaatttctttgctttcttcaaatattctcgaaaactatgtaaatttaatttaatttcttaaacaacatttctttaatgaaatcgaatttgtatcatttatttgcaagcccctaccattgggggtttgaactcgactagaaagtctagaaatatcgtttgatgcagtaccatcactgataaacggtgacatcgctaataaagctgcaaaaaatacagctcagttcttattttacatagcagaaattttaaattgttttatactggaattgtgcgataaggaaacctgaaatcagagcagtaaaatgttcaatggttagctaatactgttgccaataaaaaaaatcgcaaactgacccacagaacaataagcattttatgattgtcaccattgattacgtcgggcagcaacggatagcgggaaggcacgaaaaaacgggcagcattactgcaatgtagagccatcggatgatctgttcccttcccattggccaaagatgtgtactattgatttcttggcagcccatcgaaccactcgctcatcctcacccacacccgtgtaactaaccaactggccattgtttttctgtcaggctcaccgcatccacattagccagctcatccgatcagattggcccagttcaaagtacacattcagcatccgcagcagcaaattccgcacccttgagtcatggcgtggatggcgttaggggcactagcctccggtttcggtattcacccccctttcaatcattactgctcttcctcctcctgttcatgttcatgtcgtgtcaccgtttagtagactagttgagaatgtattaatgtgtcttatgaccaacgcattcgccttatctaatgacattgcctttcaattttgtacgactacagttctacagcgcctgctgggtgtcgatcagccggccaataaggtcgtggaaattaagagcgaagcgctggggacacttcaagtcctggcccgcgatgacgccatgctcctctttgcaccgcccttcaacagcagcaatgaaaaacgagccgtctatgagatcattttgcagcgacccacctcggattccaataccacatccttcagtctgtaccggtcgccggtgcagcaggaagccgaggaacgcttcaatgcctttctgcaaaggctgcccgttttcgtcagcattgtgaaagaggtttgagagaggactacaaagcaatgcgaagcaatgtatttaactctatatttttcagtactacaatgtaaatgggctgcagaaagcttgcgatgccttggctgataatccctcctggacgctgtcccatttgattgcctacttcaatctggtggactacattagcaatcccaagatgctccagtgcgtggaccaagcagatgccgccaccctaatgtcgcccttccagttggccatcaaacagggtcacatggagatggtgaaggctctgctgccgctgagcaagctggaacacttggatataaacagcaattcggtgtttcattacgccgccagcaccaccaaagagattatcaatgtaagccagaaatccatatatagttcaaacaaattttaaactttattttcccagcttatcatcgataaaagcacggtaaatctgaatcatctcaactccgatgggtacacaccacttcatgtcgcctgcctcgccgacaagccagagaatgtgaaggcactgttgctggctggggccaatgtcaatctcaatgccaaggacatccgcaaagtgtacaagacatccgcaccgaccacggtttcctcgtttctgcgcaccaatgttagcaagctgtacacacaggacatgaaatatggcggcactcctctgcactggtgttcctcccgtgaaaccctgcatgcgctgatcatggagggttgtgatgtcaacgccacgaactttgatggacggacagcactgcacgtgatggtggccaggaatcggttcgagtgcgttgtcacactactggcccacgatgcggagatcgatgtgctggacaaagacggaaatgcagctttgcacattgccattgagaagaaactagtgccgatcgtccaatgtctggtggtctttgggtgtgacatcaatctgaagaacaaggatggcaaaacgccacgtcacatggttggcaatgatgctagtggcaataaggatgatgaaatcctatacattctgcactctgtgggggctaagcgctgcaaggatactggttcaaagtgcccgcctggttgcaatgccaaaggtaactacaacggcattccgccagaggcaccggaatccgtggagcagcgcgagcatatagagcacatgctggccaccaccagtcgacaaatgatgggtggttttttgaacgcagcggccaatggaatattggagaagcaacaaccggcacagtatgtaaatcaactattcgtgaactacaattaaaatagtcttctcttattccagaaaaccagtcgtggtcgatacggagaaagaattaaaaggccaaagtataatggatgccctgcttggcatgtttacaaccaaagtgaatgcggacgagatgaagaaggagaactcgtcggatagtttggccagtggctcgcaaaaatccgctgtgtctagtccggagcagctgccttcacccacctcgcccattgccgctgaaataggcgataaaccctacggacgcggacgtctgctctgcttggatggtggtggcattcgtggtctagtcctggtacagatgctactcgaaatagaaaagctttctcgcactcctattatccatatgttcgactggattgccggcaccagtactggcggaattctagctttggcgctgggttgcggcaaaacgatgcgtcaatgcatgggcctctatttgcgcatgaaggagcagtgttttgtgggctcacggccctataacagcgagtttttcgagtccattttgaaggacaatctgggcgagtttaacgtgatgacggatattaagcacccgaagatcatggtcactggtgtgatggcggatcgcaagccggtcgatctacatctattccgcaactatacgagcgccagtgacattttgggcattgtgactccaattagtaagtgagatatcaaccaattatcgagatagctctctaattttattttaatcttttagacaaccgaagaattcctcctcctcagccttcggaacaattggtatggcgtgctgctcgggctactggagctgcgccctcatatttccgcgcatttggtcgctttctggacggcggcttgattgccaacaacccgactctagacgccatgaccgagattcacgagtacaatatggccttgcgtagcgctggacgcgaatcagaggccatacctgtatccgtggtgatgtcgctgggcacgggtcatattccggtgactgaacttaaggacattgatgtcttccggccggagagcatctgggatacggccaaactggcctacggaatctctaccattggtaaggcaccttatctataatatactcgtgtgctttcttaatcaaatgcatatccttgctaggcaatctgctagtggaccaggccacctgctccgatggaagagtagtggacagagctcgcgcctggtgcagcacgattggcataccctacttcaggttcaatcctcagctgagcgaggacatcgccatggacgaaaaggacgaccaaaaactgatcaatatgctgtggcacactaaggcgtatatgcacgccaatcggaataagataatcgagatgatcaatttcctaaaatagcatgcaagacggatttagaccgcatttgctgtagagatctctcattcgagggatcctttcgattcatgtccgtgtactttagactcgtttaaccctcttcgtttttattaagcaccttttctgaggtctaaatcagctcactcgctgggacttccactctcaatagcaccgatatcctcccaccacttggctacaaaacagaatctgtgtgattatccttaatttttccaattccgaggcttcatctccaggattagcaaacgaaatacgctttgtatattgtgttattggacttaagagggtaccatatcagcacattaatttcgaaaatcttttatttaatgtattataatcggccatgtattttattgtacgtaaccctccaattgagtcgtttaattgataaaaacattccgtgcctctgttagaaaatgaatgtgtatgtagtatgtcgagcacgaattttgaataaaactttttaagtgtttaaacctgtttttaatgaattcccattaaaatagttgtagtactggtccagaagctaacatacattaaattatagatcttgagattgcaggttataagattaattggtttaattacttaatgggtttagttgttgaatactaaatttaacttcatggcagagaaatgaaaagctgaaaacattaaaatatttttttaagactacaatactggatgttaaaaaatgttataattgttttttaaaatatttttatgtttaaatatttagcctaccagggctggctaatcgcgatagtgtcctcgccagaagttccattcttccaatcgatagctagcacactagacatatgtatgtatcgataggccaaaacaaatacaaacaatacagacgagccaagaatttttgctctgcgtcccaacacataaaaatccataacaaagtgagtcaaagtgttttaaaacgaggactacgaacgcaatagatgaagataaaccattgcagatcaagattaat

SEQ ID NO: 14663 - DNA, 2634 bp, DROSOPHILA
atgttcaatgttctacagcgcctgctgggtgtcgatcagccggccaataaggtcgtggaaattaagagcgaagcgctggggacacttcaagtcctggcccgcgatgacgccatgctcctctttgcaccgcccttcaacagcagcaatgaaaaacgagccgtctatgagatcattttgcagcgacccacctcggattccaataccacatccttcagtctgtaccggtcgccggtgcagcaggaagccgaggaacgcttcaatgcctttctgcaaaggctgcccgttttcgtcagcattgtgaaagagtactacaatgtaaatgggctgcagaaagcttgcgatgccttggctgataatccctcctggacgctgtcccatttgattgcctacttcaatctggtggactacattagcaatcccaagatgctccagtgcgtggaccaagcagatgccgccaccctaatgtcgcccttccagttggccatcaaacagggtcacatggagatggtgaaggctctgctgccgctgagcaagctggaacacttggatataaacagcaattcggtgtttcattacgccgccagcaccaccaaagagattatcaatcttatcatcgataaaagcacggtaaatctgaatcatctcaactccgatgggtacacaccacttcatgtcgcctgcctcgccgacaagccagagaatgtgaaggcactgttgctggctggggccaatgtcaatctcaatgccaaggacatccgcaaagtgtacaagacatccgcaccgaccacggtttcctcgtttctgcgcaccaatgttagcaagctgtacacacaggacatgaaatatggcggcactcctctgcactggtgttcctcccgtgaaaccctgcatgcgctgatcatggagggttgtgatgtcaacgccacgaactttgatggacggacagcactgcacgtgatggtggccaggaatcggttcgagtgcgttgtcacactactggcccacgatgcggagatcgatgtgctggacaaagacggaaatgcagctttgcacattgccattgagaagaaactagtgccgatcgtccaatgtctggtggtctttgggtgtgacatcaatctgaagaacaaggatggcaaaacgccacgtcacatggttggcaatgatgctagtggcaataaggatgatgaaatcctatacattctgcactctgtgggggctaagcgctgcaaggatactggttcaaagtgcccgcctggttgcaatgccaaaggtaactacaacggcattccgccagaggcaccggaatccgtggagcagcgcgagcatatagagcacatgctggccaccaccagtcgacaaatgatgggtggttttttgaacgcagcggccaatggaatattggagaagcaacaaccggcacaaaaaccagtcgtggtcgatacggagaaagaattaaaaggccaaagtataatggatgccctgcttggcatgtttacaaccaaagtgaatgcggacgagatgaagaaggagaactcgtcggatagtttggccagtggctcgcaaaaatccgctgtgtctagtccggagcagctgccttcacccacctcgcccattgccgctgaaataggcgataaaccctacggacgcggacgtctgctctgcttggatggtggtggcattcgtggtctagtcctggtacagatgctactcgaaatagaaaagctttctcgcactcctattatccatatgttcgactggattgccggcaccagtactggcggaattctagctttggcgctgggttgcggcaaaacgatgcgtcaatgcatgggcctctatttgcgcatgaaggagcagtgttttgtgggctcacggccctataacagcgagtttttcgagtccattttgaaggacaatctgggcgagtttaacgtgatgacggatattaagcacccgaagatcatggtcactggtgtgatggcggatcgcaagccggtcgatctacatctattccgcaactatacgagcgccagtgacattttgggcattgtgactccaattaacaaccgaagaattcctcctcctcagccttcggaacaattggtatggcgtgctgctcgggctactggagctgcgccctcatatttccgcgcatttggtcgctttctggacggcggcttgattgccaacaacccgactctagacgccatgaccgagattcacgagtacaatatggccttgcgtagcgctggacgcgaatcagaggccatacctgtatccgtggtgatgtcgctgggcacgggtcatattccggtgactgaacttaaggacattgatgtcttccggccggagagcatctgggatacggccaaactggcctacggaatctctaccattggcaatctgctagtggaccaggccacctgctccgatggaagagtagtggacagagctcgcgcctggtgcagcacgattggcataccctacttcaggttcaatcctcagctgagcgaggacatcgccatggacgaaaaggacgaccaaaaactgatcaatatgctgtggcacactaaggcgtatatgcacgccaatcggaataagataatcgagatgatcaatttcctaaaatag

SEQ ID NO: 14664 - protein, 877 aa, DROSOPHILA
MFNVLQRLLGVDQPANKVVEIKSEALGTLQVLARDDAMLLFAPPFNSSNEKRAVYEIILQRPTSDSNTTSFSLYRSPVQQEAEERFNAFLQRLPVFVSIVKEYYNVNGLQKACDALADNPSWTLSHLIAYFNLVDYISNPKMLQCVDQADAATLMSPFQLAIKQGHMEMVKALLPLSKLEHLDINSNSVFHYAASTTKEIINLIIDKSTVNLNHLNSDGYTPLHVACLADKPENVKALLLAGANVNLNAKDIRKVYKTSAPTTVSSFLRTNVSKLYTQDMKYGGTPLHWCSSRETLHALIMEGCDVNATNFDGRTALHVMVARNRFECVVTLLAHDAEIDVLDKDGNAALHIAIEKKLVPIVQCLVVFGCDINLKNKDGKTPRHMVGNDASGNKDDEILYILHSVGAKRCKDTGSKCPPGCNAKGNYNGIPPEAPESVEQREHIEHMLATTSRQMMGGFLNAAANGILEKQQPAQKPVVVDTEKELKGQSIMDALLGMFTTKVNADEMKKENSSDSLASGSQKSAVSSPEQLPSPTSPIAAEIGDKPYGRGRLLCLDGGGIRGLVLVQMLLEIEKLSRTPIIHMFDWIAGTSTGGILALALGCGKTMRQCMGLYLRMKEQCFVGSRPYNSEFFESILKDNLGEFNVMTDIKHPKIMVTGVMADRKPVDLHLFRNYTSASDILGIVTPINNRRIPPPQPSEQLVWRAARATGAAPSYFRAFGRFLDGGLIANNPTLDAMTEIHEYNMALRSAGRESEAIPVSVVMSLGTGHIPVTELKDIDVFRPESIWDTAKLAYGISTIGNLLVDQATCSDGRVVDRARAWCSTIGIPYFRFNPQLSEDIAMDEKDDQKLINMLWHTKAYMHANRNKIIEMINFLK

SEQ ID NO: 14665 - DNA, 2798 bp, DROSOPHILA
acaatcactcactccccacctgccttctgtctcagattgagtctgcagagaagtggcggcgtcgccggtgccgcctttgcacgttgcctccacacgacaccagttctttgtgcggagcccctgaagaaaaagaagaaactggatccgcagattgtcaagcagcgcgaggatcgcaagaagaagaagatcgaaaagcagattcgccggctggagaagaatgcccgtcagctgaagcccgtggatgaactggaggttccactggagctcatcgacgaaaaggagtaggttctcatacgggtttccctcatatgctgagatgtaatgctatcctatcgttcagcaaacggcagcggaagctagctccactgaccatcgaccagttggaggaacgtgctctcctcaagaagcagtgggcgcactacaagcacgacgagcgcgtagcagactttcagatcatcgaccggctggtccaggcgcaaaacaaggcgctggcggaacttcggcgcgagtccgaggagctctaccaggcggccatcgatatcgatccccagctgctgcccgtcgccgtcaaaggacccgttgccacgccccccattaaggattacgtcagtcccgatggcgactacctgcaccaatccatgaagtgggaggtcaaatgaggcgtgtaagttccggatgttaaagatttgaaataaactgaaccctaatcctatgatttgtgaattcggctttactctcaatgaattgcgttcgccgtttattcggtttacatgcagttaaatgcccgtagccaaattaaaatattacattcctccggaataggcatctcgtttggagtcagcttgatgcgtttgtgtggcggttttattgctatcagtggagaacaagaataagccaggtggaatcgcctgccgagcccttgcggtgtactgtcgaaataaataagatgcgagtggctgctaccgatgttgatcttgggatgggatttgggtgggtctccttaggatggggtagtggcggtggtcttggtagcggcctgccgctttttcacgccccagttgtagacccgcgccatgttcacctccgtagttgtgatttgatccctaaaatatacatttataatacaataaaacaagtaacttgaataacagcactcgaactgacctcagaaaatcctgatcgtgctccacggactttaggttgcccacggccgatgtgatgttctggttcagcagagcctccgcctcgtctagcggatactccagcatcacgctggcccccagccagaggtatactgttttcgtgggcggcaccagtgtcttgatgaacacctggtcgctgagcaggaattgcgtctcgcgctcctcgtcctccttgcgaagcacattgaccatttccagggagcgctccaggtccggaatttgagacttcaacttgcgccgccgcgcctccagattgcaggccatgaatcgatacttgccgtgctgctcgtccagtcgctgcagcaccttttcgcaattttcgttctccggctgcgacatgaaggtgtcgatctcctcctgcaagggcccaagaaccacgaattagcctgcagtgtccagctgcaggtgcacgcttgtaggttaggaccactcaccaggaacactgcctccgggatgccggcgaaggtcttctggttttccggtaatttgggcatttccaccgagtccattattcctgtcatcctgttgccttcagccgtgccgtctacaaatgcaatttaattttcaggaggtcagcctgccgctgtaaaagtcgatgagtcaaaattgcgatggaacaatcgattgaatggctgtcatcgaaaggtggtggtcaacttcgtataaaaatgtaaaactaacttatattaaaataattatataaataaacgttgggataatataatatgttaaaaacattaaataatgtctaaataaatttaaatatatatcaattctcttcgtgactctcatccctagctcaatcgataacaacagcgacgataagcgcgcccgccttcttgtgaaattagcggaaagtcagatttttagcaatctaaagaagccgcataatgagcacctggaatccggagaacgatgtggacctgctgtctgggtccgaggacgaggaggatgtgtccatgaagcgggactaccatgggcgcgaggccattctgttcgtggtagacgccaatcttcagacagccggcgtggagcgcctgttggaggcactgaacatcatccggacggcctttatatccggacttctggttaacgacaaggacctcatcggactcatcttcgccaacaccaagcacagtccgccgccgctggaagccagtgcattggacaacatcgtaatgccggataactgcgcagtgttcttgccccttcgccaactaaccaaacccattgtggagcactatctggaattcatgggcggggtggagacgcagttcgccgatgtgtatggcctggcggaacccgatggtcgcggcaggtttgaccttatgatccggctctgcatcgagatgctggaaaagtgcggcaagaagctaaacaacgccaagatcgcctatgtcacggacgtcagggaacctcatccatcgaacagcaatcacttccaggctgccctgcaaaaggccagcgatctggagggcaaggagttcgagtttcatgtcattcccatggtcgatgactttgactacgagccgttttacaaggagttcatcacgttgtcaagaggtaagtcctttaagtctgctattcatttcttat

SEQ ID NO: 14666 - DNA, 660 bp, DROSOPHILA
tcgacttttacagcggcaggctgacctcctgaaaattaaattgcatttgtagacggcacggctgaaggcaacaggatgacaggaataatggactcggtggaaatgcccaaattaccggaaaaccagaagaccttcgccggcatcccggaggcagtgttcctggaggagatcgacaccttcatgtcgcagccggagaacgaaaattgcgaaaaggtgctgcagcgactggacgagcagcacggcaagtatcgattcatggcctgcaatctggaggcgcggcggcgcaagttgaagtctcaaattccggacctggagcgctccctggaaatggtcaatgtgcttcgcaaggaggacgaggagcgcgagacgcaattcctgctcagcgaccaggtgttcatcaagacactggtgccgcccacgaaaacagtatacctctggctgggggccagcgtgatgctggagtatccgctagacgaggcggaggctctgctgaaccagaacatcacatcggccgtgggcaacctaaagtccgtggagcacgatcaggattttctgagggatcaaatcacaactacggaggtgaacatggcgcgggtctacaactggggcgtgaaaaagcggcaggccgctaccaagaccaccgccactaccccatcctaa

SEQ ID NO: 14667 - protein, 194 aa, DROSOPHILA
MTGIMDSVEMPKLPENQKTFAGIPEAVFLEEIDTFMSQPENENCEKVLQRLDEQHGKYRFMACNLEARRRKLKSQIPDLERSLEMVNVLRKEDEERETQFLLSDQVFIKTLVPPTKTVYLWLGASVMLEYPLDEAEALLNQNITSAVGNLKSVEHDQDFLRDQITTTEVNMARVYNWGVKKRQAATKTTATTPS

SEQ ID NO: 14668 - DNA, 3740 bp, DROSOPHILA
atggccagtggagtcggcaattatacgcgaatcttggacggggcttccccagggtccttgacctggttttccacccagtttgtgcccctttatgatgacaggggtttgctttttttcgcacaaacgcacgcatttctattgagcagcggccattttggcaaacccccgacagtaaaaagtgggttttgcatgggattcgttgtcaggccagtggatgctggacaggattaggtgatagctggacaagcatttgcccccaaagtttcgagagcatgtgctggatgccgcaaaaaatcaatcagcagacatttgcaaaatgccgccgccgacggcggaggatgatgatgacggtgctgactccgccgcctgcagctcgattgcacaatttcgcggaatttggacgctgattaggtggggtctatcttgggaccagcccgtgaagcactatacacacctcactattgcagtttctttcacttttttctatcacaacacttgcgaaaatgattctccctgtgtcgcctgctgccctctcgctcgcactctcgcgcacacggccttcgcagtggatgcacggctgttccgctggcgtccttggtgggtggcagtgtcggcgctccaaactcctcggcggctcacggtcgcgatcgttgttatttcgctaaattacagttggcaaattacgaggcgacgcagagccgactttatctttgttagaaactcgataatttgtatgtttgtagccagctatcggtccgggtccgtctctaggtgctcgcgctgtccgctcatccttagcgaactatcgatgttcggcttctggcaaccgttttttgccttttctagcactgtggcaactcggaagcggataccataaaaataatattcaagtattgaaatctaactatttcgtaaatgaaataaaaaacaagaatatttacaccatgtataatacactttgaatacctctctgcttcacccacttcgataatttaagtgtaacaccccagatgtaaaatctttcaatatttactttaaagtttaaactagttttgtatttataaaaagtttacaagttttgggattacttcgtctccgcttcttccgctagcgccttgcgagatttgaatacgcgcaccgtgttgtcgacaccaccagatacaatgtacttgggattggaccagtcgatgtccaggaccttttcaccgtgacccagaagatcgtacagtggggccttgggactcctgcagtcccacagcttgttctggttgtcataagcgccggagacaaataggaactcctccgtggtggaccacatgacggtctgcacccaggcattgtgtcccagataggtattccttaccactgatccctctgaaagatccgaattatattggttaggtggaagttccattgttgatattggagtattagatcttacggtttgtcctaggatcatagagccgcagattcttgtccgccgaagcagtcagtatcagccgattcagctttgagtagctcgcatcgaatatggacttgttggtggatatttcggtcttgatgccctcaagactcagatcccacaccttgagtgtgtgatcccagctgccagttagcagagtggtagcatccatccactgcacggctgatacgctctcacgatgtccctgcagcgtaattttgggggtctgaaaggaattgtaaagctgattacaagtctaattataaatggcaagactactcactctcacaccgctctctttcatccgctttgagctgccctcgactgcatcgtccagctctgctgaccacaccttcaacatcgtgtcccaagagcccgtggcaaatctcagaccatccggactcacgctgacactgtcgacgcctcgctcgtggcccttgcacacggagacacattccaccgagttggagcccacgttccactgccacagcatggcggtctgatcctgcgatgtggacacaaaacgtcccgtctcctcgtccagcgatatccagtccaccgccttgatgggcgccgtgtgaccagaaatagtgagaatgtgcttgcctttgttggtccacaaattcagggtgttgtcgtagcacccggagaggatccactttcctctagccttcaccgcggacacccagtcgtcgtgcagcaggcaatcctgtggctctggcgccgggaaccgctccacatactcgatctcgatggcgtcctcgaaactgatggctttctcgcgcaggtgatcgcacagccggccacgcaggtactcatcgaacaccaggaagtcgaagtccgtgtcggaagagccatctttttgacgcaacagtgcgttcacgaatgtgtttagctccacggtggtgacggtgccatcgatggcatagggcacatcaggcacggcatagctgaaatagggtatcttgattaaaatcttctactgatagagattctagatggacactcactgctcctgcttggtcttcaggtgcacctgcacctgcccctcgccgttatccacatccatctcctggcccacgtgcgtttctttttggctggattgggattggggtgttcccgcgtgtgtttgctacggttatgacttaactcctgcaggtggtacaaggtgttgaccactaaactagaggttcttccttcgggagatcgttgtgtaaaattaaattgaaaagaagcgtgtttttaaacgaacgatggtaaatgcaacaaatacatgcaaaaacactaaaaaacgccgaagcgcatgccggaataagagttatcgcattgctatcgctgtgctcttatcgaaatgccttatcgtcttgttatcacccgttactactaagcggagtttttaaattcaaattttttggtgcgttaaaactatgcataattataatagcttgcttaagtgtaatttgccgattactttaacaaataaaaagatattaatagagtgtatggtatttctaatcactttgattttgtttctctaaaatattactcatcaaattcgaaaaaccgctgattgcataaccactgctttgtcgtttctccttttttttattacaaaaaaatcttacagagatacgagccaattcgcaatactgataattaaatattttttgcaagcaaatcaggcgcagatgatttgctgtaatttagccactaactgcttctcttccttttgatcgtcttacgcaaaatggaaaaataagaaaccaaaaaatgcacagccgcggcggcaatttgtaaatgactcttcaatcttcaaagactggtaattgttaatattttacgttcaggctattaatatgaaccagatagcacctgaaagaccactttgcggccgagtgttcactggaaggttaaatgccacttgacatttctgaagtggcgcttaaccttcgcatcaaaattggacaaatgcccaagaaaataaaaaatttccaataaaaaatgtattcaccttaatgggtcgatggggatattaagctgggaagtaataacactttttttcggtactactactttgtgccaccattttggctttacaaaaaaccagaaacgaagcgaaatgaaagagttaaagctttccagattttcggggcttccagcggcgcagctcagcttataaaacgggcattgcgcctgcgcagccgaaacattacaacaaacgacgcgcgcaaggtaagaccataaccaaatccagtccgcatcgagcgccactgaatcc

SEQ ID NO: 14669 - DNA, 1556 bp, DROSOPHILA
tgcatgtatttgttgcatttaccatcgttcgtttaaaaacacgcttcttttcaatttaattttacacaacgatctcccgaaggaagaacctctagtttagtggtcaacaccttgtaccacctgcaggagttaagtcataaccgtagcaaacacacgcgggaacaccccaatcccaatccagccaaaaagaaacgcacgtgggccaggagatggatgtggataacggcgaggggcaggtgcaggtgcacctgaagaccaagcaggagcactatgccgtgcctgatgtgccctatgccatcgatggcaccgtcaccaccgtggagctaaacacattcgtgaacgcactgttgcgtcaaaaagatggctcttccgacacggacttcgacttcctggtgttcgatgagtacctgcgtggccggctgtgcgatcacctgcgcgagaaagccatcagtttcgaggacgccatcgagatcgagtatgtggagcggttcccggcgccagagccacaggattgcctgctgcacgacgactgggtgtccgcggtgaaggctagaggaaagtggatcctctccgggtgctacgacaacaccctgaatttgtggaccaacaaaggcaagcacattctcactatttctggtcacacggcgcccatcaaggcggtggactggatatcgctggacgaggagacgggacgttttgtgtccacatcgcaggatcagaccgccatgctgtggcagtggaacgtgggctccaactcggtggaatgtgtctccgtgtgcaagggccacgagcgaggcgtcgacagtgtcagcgtgagtccggatggtctgagatttgccacgggctcttgggacacgatgttgaaggtgtggtcagcagagctggacgatgcagtcgagggcagctcaaagcggatgaaagagagcggtgtgagaacccccaaaattacgctgcagggacatcgtgagagcgtatcagccgtgcagtggatggatgctaccactctgctaactggcagctgggatcacacactcaaggtgtgggatctgagtcttgagggcatcaagaccgaaatatccaccaacaagtccatattcgatgcgagctactcaaagctgaatcggctgatactgactgcttcggcggacaagaatctgcggctctatgatcctaggacaaaccagggatcagtggtaaggaatacctatctgggacacaatgcctgggtgcagaccgtcatgtggtccaccacggaggagttcctatttgtctccggcgcttatgacaaccagaacaagctgtgggactgcaggagtcccaaggccccactgtacgatcttctgggtcacggtgaaaaggtcctggacatcgactggtccaatcccaagtacattgtatctggtggtgtcgacaacacggtgcgcgtattcaaatctcgcaaggcgctagcggaagaagcggagacgaagtaatcccaaaacttgtaaactttttataaatacaaaactagtttaaactttaaagtaaatattgaaagattttacatctggggtgtt

SEQ ID NO: 14670 - protein, 420 aa, DROSOPHILA
MDVDNGEGQVQVHLKTKQEHYAVPDVPYAIDGTVTTVELNTFVNALLRQKDGSSDTDFDFLVFDEYLRGRLCDHLREKAISFEDAIEIEYVERFPAPEPQDCLLHDDWVSAVKARGKWILSGCYDNTLNLWTNKGKHILTISGHTAPIKAVDWISLDEETGRFVSTSQDQTAMLWQWNVGSNSVECVSVCKGHERGVDSVSVSPDGLRFATGSWDTMLKVWSAELDDAVEGSSKRMKESGVRTPKITLQGHRESVSAVQWMDATTLLTGSWDHTLKVWDLSLEGIKTEISTNKSIFDASYSKLNRLILTASADKNLRLYDPRTNQGSVVRNTYLGHNAWVQTVMWSTTEEFLFVSGAYDNQNKLWDCRSPKAPLYDLLGHGEKVLDIDWSNPKYIVSGGVDNTVRVFKSRKALAEEAETK

SEQ ID NO: 14671 - DNA, 4059 bp, DROSOPHILA
tatatatttacgattaattgtgtaatgaaaaacgtattttatataaacaaagatatatcaaataaaactaaaacttaaacatagcgatcgccttacctgtggaccgattaatgagtcgaaaagtaattttataatattttttatttaagttcctttccatttgcgatttcagttttgttttggttacgaaaaaaacttacaattactttgttacgaaatcttgttctcagtttttttttcaatgaagtgacgacgatgactggtttagtcattaaaactacaaaatagtaggaagttggtttttatttatattctttttttcttttcttttcctttatatatcagcactatactcgtaattgcctttctttaaaataacaaatttcgctgtggtggagcctttttaatgttcaagtctaaaatcattattagtgaaaggtagtatttgaccaaaaaaacaaatttcgaacgcttaaaaatatcacattaaaaaatcaaaccgaatccgatttcatatataaataacacaaatttatttaattttgttttggaatttggaataggttgtcttaagttttgtatacatagatttatttcgtttttcgtttaccacttcatttttagtcttttgttgttgagaattttccttgctgtggccagtttttttttttttttttgaatgaaaatcatcttttacgaagtttactgccctgacattggttgcattaatattacgcattacgcattaaaataggcttttctctttactcgtttagctccattttcacttaacactgtacacatataatgtaaactaattgtatttatatttattatgcagttgaatagtttatagtttaatatgtcaatgtgcaattcatgatgcagtttttcatcgaatgtgactcgttacaatgttttcggttgctaagcgaattaaaaacaaaactagtttccgaaaaatacaactcaagaaatctccaaatgtttttttttttttacaacttctgtattaacgtgatataaatatagactgaatttagattggattggatcgactggctgttggcggttgcttttcgtgttacggtagttgttactgttaatttagtagttatcgtactttaatatatatttataaaatagactttctccgttgcaagatgcgaattttcgtttctgttgttgcagttttcggtttgtggtacatgcacgttgccaaaacttacgcatcatgttgcgtacctaaaagacaagcacacagattactaagtttgtttactcgcttttccagcgacaactcacctttttgtccagagacgcgcaattcgatcgtgctcctcacgattctgcaaatattgcgtggcaatgctgcccaccagcggatcggctgtaaagacacatgatataaacatgagatcatatttactacagtcctaggaaaagttaaatcaaagtggagaacacgacactgtatatcaaagtctaaaaaaaataagtctcacctggattacagtctgtgagcagggagcaaattgacagcaagacctttgatatggtcagcgccggcgaccagttgtccttgagtatgtccaggcaaatgacgccctggctgttgatgttgcagtgatagatgcgcgtgcggaacgtgactttgggtggcttgaagggatactccggcgagaagtgtatgtcgaggaagaagacgccgccctcgtagacggatccgggtggtcccagtatggtggatacccactcgtacaggttgtcgcccttgggcccggcactgcagttgggcggtgggtccagtgtgatctcagccagctccttctgtatgcgcttggccgaggtgcccagcgccctggatatcctgggcgttgttttggcttcctttcgcggctcatctccgccaccggcattgctcccggaggcaccaccgttggcgttgctgcccctgccgccacgtgcctgcggagttccggcagtcgtcggctggctggtattgctcacgttgctggccgttgtgctgggtgcactgggcgcatttgaggtggcactggaggtggccacctcggcggcactgcccgctgctggggttgaagacatttttggtctcgtttcttcgaactgaaatgagtattttgatgtttggttagataatggtttatgtaaacgatccactatgttcagcagggaatttccatagaaaactggtgaaatatgaagccaaagcctacttgggattcacatttatttttaaagggaaatcccttcttgcctgcactttgtgcgtacgaatgtagttgatgtgaaaagtatggccagtggagtcggcaattatacgcgaatcttggacggggcttccccagggtccttgacctggttttccacccagtttgtgcccctttatgatgacaggggtttgctttttttcgcacaaacgcacgcatttctattgagcagcggccattttggcaaacccccgacagtaaaaagtgggttttgcatgggattcgttgtcaggccagtggatgctggacaggattaggtgatagctggacaagcatttgcccccaaagtttcgagagcatgtgctggatgccgcaaaaaatcaatcagcagacatttgcaaaatgccgccgccgacggcggaggatgatgatgacggtgctgactccgccgcctgcagctcgattgcacaatttcgcggaatttggacgctgattaggtggggtctatcttgggaccagcccgtgaagcactatacacacctcactattgcagtttctttcacttttttctatcacaacacttgcgaaaatgattctccctgtgtcgcctgctgccctctcgctcgcactctcgcgcacacggccttcgcagtggatgcacggctgttccgctggcgtccttggtgggtggcagtgtcggcgctccaaactcctcggcggctcacggtcgcgatcgttgttatttcgctaaattacagttggcaaattacgaggcgacgcagagccgactttatctttgttagaaactcgataatttgtatgtttgtagccagctatcggtccgggtccgtctctaggtgctcgcgctgtccgctcatccttagcgaactatcgatgttcggcttctggcaaccgttttttgccttttctagcactgtggcaactcggaagcggataccataaaaataatattcaagtattgaaatctaactatttcgtaaatgaaataaaaaacaagaatatttacaccatgtataatacactttgaatacctctctgcttcacccacttcgataatttaagtgtaacaccccagatgtaaaatctttcaatatttactttaaagtttaaactagttttgtatttataaaaagtttacaagttttgggattacttcgtctccgcttcttccgctagcgccttgcgagatttgaatacgcgcaccgtgttgtcgacaccaccagatacaatgtacttgggattggaccagtcgatgtccaggaccttttcaccgtgacccagaagatcgtacagtggggccttgggactcctgcagtcccacagcttgttctggttgtcataagcgccggagacaaataggaactcctccgtggtggaccacatgacggtctgcacccaggcattgtgtcccagataggtattccttaccactgatccctctgaaagatccgaattatattggttaggtggaagttccattgttgatattggagtattagatcttacggtttgtcctaggatcatagagccgcagattcttgtccgccgaagcagtcagtatcagccgattcagctttgagtagctcgcatcgaatatggacttgttggtggatatttcggtcttgatgccctcaagactcagatcccacaccttgagtgtgtgatcccagctgccagttagcagagtggtagcatccatccactgcacggctgatacgctctcacgatgtccctgcagcgtaattttgggggtctgaaaggaattgtaaagctgattacaagtctaattataaatggcaagactact

SEQ ID NO: 14672 - DNA, 1240 bp, DROSOPHILA
tacaaacatacaaattatcgagtttctaacaaagataaagtcggctctgcgtcgcctcgtaatttgccaactgtaatttagcgaaataacaacgatcgcgaccgtgagccgccgaggagtttggagcgccgacactgccacccaccaaggacgccagcggaacagccgtgcatccactgcgaaggccgtgtgcgcgagagtgcgagcgagagggcagcaggcgacacagggagaatcattttcgcaagtgttgtgatagaaaaaagtgaaagaaactgcaatagtgagttcgaagaaacgagaccaaaaatgtcttcaaccccagcagcgggcagtgccgccgaggtggccacctccagtgccacctcaaatgcgcccagtgcacccagcacaacggccagcaacgtgagcaataccagccagccgacgactgccggaactccgcaggcacgtggcggcaggggcagcaacgccaacggtggtgcctccgggagcaatgccggtggcggagatgagccgcgaaaggaagccaaaacaacgcccaggatatccagggcgctgggcacctcggccaagcgcatacagaaggagctggctgagatcacactggacccaccgcccaactgcagtgccgggcccaagggcgacaacctgtacgagtgggtatccaccatactgggaccacccggatccgtctacgagggcggcgtcttcttcctcgacatacacttctcgccggagtatcccttcaagccacccaaagtcacgttccgcacgcgcatctatcactgcaacatcaacagccagggcgtcatttgcctggacatactcaaggacaactggtcgccggcgctgaccatatcaaaggtcttgctgtcaatttgctccctgctcacagactgtaatccagccgatccgctggtgggcagcattgccacgcaatatttgcagaatcgtgaggagcacgatcgaattgcgcgtctctggacaaaaaggtacgcaacatgatgcgtaagttttggcaacgtgcatgtaccacaaaccgaaaactgcaacaacagaaacgaaaattcgcatcttgcaacggagaaagtctattttataaatatatattaaagtacgataactactaaattaacagtaacaactaccgtaacacgaaaagcaaccgccaacagccagtcgatccaatccaatctaaattcagtctatatttatatcacgttaatacagaagttgt

SEQ ID NO: 14673 - protein, 232 aa, DROSOPHILA
MSSTPAAGSAAEVATSSATSNAPSAPSTTASNVSNTSQPTTAGTPQARGGRGSNANGGASGSNAGGGDEPRKEAKTTPRISRALGTSAKRIQKELAEITLDPPPNCSAGPKGDNLYEWVSTILGPPGSVYEGGVFFLDIHFSPEYPFKPPKVTFRTRIYHCNINSQGVICLDILKDNWSPALTISKVLLSICSLLTDCNPADPLVGSIATQYLQNREEHDRIARLWTKRYAT

SEQ ID NO: 14674 - DNA, 17464 bp, DROSOPHILA
aaaaacataagcggcgttgctgtccggatgccgtgtgaatttcacatttcactgccttgtttctgaatatttgtgtacttttaatgtacatatgtgtgtactatgtagttcctcgggttcctgtggactgtctgcgatccagaacgcccacgtaatgtgcgctacggtataaacagccgggcatttgatttttacttactttgctaagcataactagctattgatacatggttattggaatagatatgaatcttaaactggttgaatttaaaaataaacattgctttctgatataattccttaacgatcgatcataaacaaaacagggttttttattgctttgtaccgcccttcttaagtcgcatatgcctcgactttctctgccggcgatcttcggttgtttccgctgttggtggcgccggtgcaacatgtgtgtgtgtttaagtgtaggtgaccgctgctgcgtgtgtgcgttttcattcacaaaatttttgggaggtgcatgtgtacacttgccgcttggaaattttaattcagttccatttcggccgacctgcaacacgttcgtaattcggagtgtgtttcaaagttaagcaactaaaaaccaatcggaattaataaaaacatcaattaaacctcaagttaaaataaaaaaaaccaaaaattcagtgtttaataataatcaattttaaataaattacaaaatatataactgtttgttggagctaacgatatatattcgatagccagaactggtgaaatatcgaaattaaacttaaacatttttaatgaaaaccttactgttgtgcttaacttaataagcataagccgttgttgaataaaataaaaaaattattttaaaacatatctgcttcaaacaaattattaagcaaacattaatcatttgcgtttcccgtggtattttcggggcaccgtgctaaggtcacactaattcgttggagtcatacaaccgtctcgctacggtcactctagttctgattccgcttcgaaaggttgttcgcggatgcgtgtaaacccgcaaagcaaataaactcggagaaccaagtttttgcgattctgattcaagcaaccgaattactttccatacttcgataatataatcccacgtctgctagtgcgtgcaaaaaacagtttgtagttaaaacgaaatactaaaatcagtcgagccctgaagcaacagggaaagtgcatttcgtgagcggcaaatcgactcatattcccgtcacaccagctcaatgcacaatgcaacgctgcagcgagtgatgaaattcaaatgcaaatagccggctaataaacctgttaaagaaaaacaaataatttcgagttattaaagtttcgtgaagatcgagtgaaggagttagataaatttccaatcgcgtgttgcaagttccccagtgggtagctgacaaaaagctggctgctttaagcgcacaatgctgctgaagaagaagcgctatatgttcgacgagcgagacgacaataatattaactcgcccgtcgccgtcgagccaagcagcaacaacaacaaaatggccgatacacgcgaagtgcgcattgaagagcaattaaaagtgaaaattggtatgtaaatcgagtgcgaaatcgttcaaaaacatcaaaaatatgtcgaagaacatgcgtggcatgaacgttgagtgaaatacgcgcagcaacgtgcgttttttatgttccaaagtgtgctggaattttgacagcgtcgccgtttgccccgcggagcctcttccaagcagaaaacaacatagaatcgggagaatatgtctaaaagttttccaaaatgttgtgtaatctaatggcaaaccgaaatttgtgcgagttgaggcaaagaaagtcgattaattgagaaaacaaatgtgtttttgttctagaaatgcatattgcgttcaagtgtataagcatgctgtcccgctctgactcgcgtgttgctctgtgcgtgtgtgtttctgttgcctttttccctgtgtgtgtgtgtttttttttcgtgcagcagcagtgcaatacatttgttgttgctgccgtttgagaagtaatggatgaccaggctgaatgttacggcattcgcttcttgacccacccccagaaccgctcttcctccttcatcgcccagcacaccccccgcagttttgaatgcgcccctttttgtgaatgaatcggaaatcaagcatgtgtctgtgagacgctccagcgcatgctcacacacacgcgacaaacgcacacacacaagcggcagagagatcccagcaacaatgtgtgggtttttttatgaatggaattttcgaattcggtgtacttttctcaatacgaaggtgtctgttttatgaatgattatcaaaagcaacaagcgaaaagagcatcgattaatggcctactatatattggcaagaggtcaaatgaatgaatgacgctctctcacttttcctctccattctgccatccacttcattctgaagcgagagcgaagcagactgcaagagatagacgaaaaataaacttgcggttgttttttggtggttttacatttcctgttgaaacataaaaagtaaaacagaattatgaataaccactggctgtgtgtactgtgcggggagggggggggggggttcaaaagttcccgtgatctcattttcacacctgcacacgcatttatttttacctcttctgcttctcacattttcaatctcgcaactcataagcagcttttgctatgctttttcaacataaattatatgcaaagctgcaacaacattgttgccttgccgcttttgatttccgtttcccagcgcccagagtttcccttcgtgtgttgcggttttgtgttctttttctccggccataaaactcttgcttttttcagttgctcttctttttttccgtgtcttcccctcttcaactgctttttgcacgcttcaattgttttcgcatgcgcctctgtctttgtcgggatcttctcttcgcaccctcctctcctctcgacacttccttttgccacattcccttctttctccagctgctttaacccttttgggttctgcgaagaagatggcacaatattggttaaaaatgaattaaaacacgtttctgcgctgattgaagaacgaaagttatgcacttccttcgattatcgggttgttatggcaaattagctgtcacctttttacctccatttcattcgttcgcctttgtggttcatgtttaccctctttacctgcaaaaattccgttaaggatcgaccacagcttcccaagatacatatctgatctcattaaaaatcctgagtagttattacacaacaccatatctaaaggaattgccattcaaaaatgcctctaaaatgttaaaaaatgctgtgttatggatcgggaatacctatcgagcaggaaatttaaccatattctctagttttatagaagtattattgggaactcactattatttatttatagttttccctcttaaaaactctactaaagatatagaaatgcgatttcaaacggctcacgatcacgttttctaatgattgaagaatgaaagttattcatttcccataatcatcattgattatcgcatcattatagcacattagctgctgtgtcacctctattgcccatcaacagtcagcttctttcccatccgctttataacgtgatatatgtacgtatttatatatcgttataagcgctatacatatctatgtatgtatatgtatgtacaccctgcattcttctcccaagtatcatatttccacttcattatgctttgcatgcttaataataatacttccacatcgtgctcagtttcaattacacacggagtttcgcttttgttgctattgttgtgggggctttccatttccattttgttgctcgttgcgatttctacacgaaacgtccgtccaaaattggcgtaatacttttccacttaattaaaatgtttagcgcataacctaaatttcatttagaatgataacgagggtgtgactcactatcgatctccctttgaatatcaatgacattttaactgaggaattattactcactattcgccgcggaccacacgcaatacagatttcgttgaacttgaagacccagaacagagatatctagttaacatggactcgactttgttcagttcaattcagttcagttctgtgctgtttagagttctgtaacaacaataaatagtttggccaaaaaaggtaattaattaaaagccggttgtgtttgtacttgtggtgtgctgtgctgtgctttgctgtcttgttctccagttggttgccagttttccatctcgttttcctcgcctctcttcaaccgggccaaaactggttgcaattgaacgagccaaagatcgcatggaacatttctagatggttcgtactcggtggacgccaaggcgatgttgacaattagttctcgggtcgtgtctttaaatcatttttctaatacaagtttgtatatatacatatatatatatggtttagcttgagccacaattaaagtggaatattttcatttgaaaatatggccgggggaacaatgttaattagcccaaaggccggtggctcattcgccgaggtttgtttgtcccgacaactttgtttgccgctttcaaggaaccagcgtttttatgtaattagcgcattctaaaatactttttattcaggtcgaagtcggcgttcttgaggttataaggcacagcaaaaaaaatgagatcgttttggaaattatgtatgatctatattctaagtgaagagcagattcttctaaatagtggaagatcattagtacaagtacactttattcctagttaatattgaatgcatagagatctttaaatcaagcagtaaatctcttttttttctgtgtatcagtgggcaaaagggaatcacaatcgcaatgacaacgatgacgttgatgactctgcctgtgatgattaacatttatctgtggctttccacaatgaggcagcagcatgttataatgttatacatactcgcatttccccatttttccctttttaggggggggggggctttttttatgacttaacgcttgacctcctcgcatttactttgatgttgttgacttcatcaggggtcagaggcatctgtggaacaccgggtgggtcagttgtcgtccggatcgagtctaccgcctctcaaggctttgaacttcacgctgcaacttcaatttttctgtttttattgtggcgcttctttggagcttaactgatctaagtcgtgctcctctgctcagttccatcggacagtcagtctcttgtaatttgtaattaaaatgaattctgtttttttatatcactttttttcgggccgagctgcgttattaattttgagccacaatttgtgcgcttcgctggctcgtttcaagtgtcgtttattgtggttttagtggtggtttctcaaaaggtaacaccacagcggaaatgtcaggggccaagaattgtctaaggctggggacaagatttttaatgggaaacgagggatcgtttgacgtcgttagatgcgcctaaaccactcgagttgaagagtttttgggaggggttatatgtatgtatgtaaacccataaccacgtggaataatcacggggttaagtgctcctcataagtactcttattaatgtaaccttctatttggtcttttagtgtgttgcgtaattgcttgttaaaaccatagagcatatgaagatatttaagaaaaatattttaaaactatggaatattccgatacacgtgcttttagtattggtattaataagccaccttctctttaattgcatttcaatgttttgttcccacaataaaaaaaagcgttgtcaaccgctgatgatccttggctcatatattcaacatatcgccccatagaaaaccacttttggccaaggccaatttggcttggttgcttcgcagccgcctgccaaattgtgtgggcgccttacaaagtgtatttatcattattaaatttttatggcacacagtcaggcgagtttttgtgtcgtcgccagttgacttgcctctaatgagcggcatttgtagttttatttagtgtatttttgtagttgttattgttgttgtttgttgcttttgttgtgttgcagtaataggcgtctgcccaatttggccatttcgaaatggaagtcgtgcgttcgcgtcgctcacattgagtgatgtgattgaaggttaatagtgccaaaaaggtaaattggcaacacgaaaatttcagccaaagaaagcaatgacttagtatttaatttggactagcgatagcaatgacaattcgaatggaaattactcatctggatgtacatatgtattgtagataagtatacaatgctacataaacaatacacttgcgtacataaacaaagtacagatcgatgaggttgatgaaaagccagcccagccaataagacatgtccagaatttctggccgaagccaaacaaagttggccacaacaggaggagatcgtgagatgatcatgagatcatgagcgtaatcagaccggaaatcgatcagcacgtacagagaaaaacggaggggcaatgaatgggtataaactggtttctggttctcctttatttcttccaaatcaataaaatgcaatgcacaatctattaatataataggtaacctaatagtgccgcagataatagtatatgctaaaagaggaaaatgaaaatgtgctttacaaaaagccaattgatatttaagtaccagttccgaatcaatccacacttttttcgctgcaattgagcagggattggttttgggccagctaacctgtttttctggctaattgcgcaacacgttaggagagcagggccctttctggttacatggttttatggccaaaggaagtggcagcggaaaaggaagtgcacttaaagggtttataatgttgcagggctgcagaggggatatgcaacagaagacttcttgccaccacaaacttaccagctttccgccaaaagtgcaaacaatcattttggccgcaggaagctgccgtttaaacaaacagccagacagacacagacaaagagatcggtctgtgtaaatctcccttccgctggcaaaagcagctggaaaaaagcaagaaaaacacaagaatttatctctatttccgttcctttgcataaatgtctgcttctgagctggctgctttttgtttcatttgccttttttagaatttattacagcgctgtctgcttgtctgcttccttctttatattttttttccattcgtattttcctcctccttttttctcttttttttcttctttttttttgcagcactcggggagtaatcgcctcattaattcgcgcgcgtttcatgctgcactgaatcaatttgcatattgtgcagaatagcaaagtgggtgggggtgaaaaaaggaaaaggaaaggaaatctacttacaaagtctttaaatttaattttccgtctgcgaaggaaattcatgatttcagccatttaatgagaccctgtcgacccgatatatatcccaataatgatgggtgtggaaaaatgggatcgtgttgtcagtgttgtcaatgatgtcaatgttgtggaggagaaaaaagtggcggtgccgactttagaagttttcgattttcattttgggggctgcggcaatatagccatgtgccacatggcaggatgattctattttcggggacgacgggaaacgttgaaagaaacatgccgcatgtttatcatgatgtttgcctagggatctttatatacatatatatatatatccagtggattccagcgatctgcttaattgggcaggtcacccttattggcctctgggtaaacaatgtataattttgaaactttcgattgatagaataataatacctgatatgattaggtttctggggggaatggaaaatgctttgtaatttcaaaagtgatttcaacagcttccagttgatttgatatgccacacatgctggactttttccttgtgatataaagagatcgtgcgacttccgttctcagggtggtgcaaaaaaaaattccatagtgatcctccggccgaaatgtaaaaaaatcgatgagccaacttccgcttgactttatccatgcataaaccttctggcttttcccagttcatcgagctctggttccgtttatcgtgtttggcatatgtaagatgatatatatatacacccgatcctcctcctcatcccatcactgcgactgtgcatggtgtgtttggtttctcaatgcatctgaaggtcggatataggggacggactacgacgaaacgttggagcccggcgagaaattaattccatatctaagcgaaatggcaagttcgaaatatgatttcatcaccactcctggttgggggctcgttcgattccatggaattcgttttgcaattttcccctcttatcgcttctgtattcattcctttttatttcaatgaataagcgaaattccgccgattatgtcattaaatttagaaaagtttgcttgcctgtctgccggttttgcatggctgttcgctaaagatcggcaaataaagttaagctttttcaagccgaaagttttataccctttagaaaatgctttgactcacaagcaacgtgtggtatagtttgatatcagatattttacaaacgtgcggacaaagttattatacccaatgcaagggtattttaaacgaaaacgatttgagtaataaaaacattcagtgggacagccaatgacaaggcaaagccataaaaaaacacgcataaataaattatatacgtcacagaaaccaaaaatttcaacacttttttctggccgggtttcccccgttcaacttcctctttctaccatagatttactaccactattattttatgaatgaagtttactgttttttttttgctccaactctcttgtttttcgtcatttgccgttttgttgtttccgtttgtttgctttttgcctcttcgattgctttgctttaatttactttgcttataaaatgtgctactgtctgtggggtttttcattcatgaaaagaaataaaaacacacaggcgtatgtaggaaaaagaaaacgtatgtctttgttatcgcaaaaaggcaaaaagcgaagcgtgagtgtgaaactgtgcgattgtgattgtgaaaagtggcgttgttttgccaacacacatacgcaacgtataaccccattgataatagtcgcgaggtgatagccacatacacaaatggcgaatcgaagctatatagcctcacctcccactcatacacacacacacacacacgcggtacaccgcccagctgtgtcaacaggggcggaaaacgggcggggccatccggtcctcagcttagaaggtcttttttttaagctgcaattcattcttttcgatgctaggaagctctaccccaaatgtatcctaaaaagtgtaagattcgcagatttgaaatgggtatttgatagccgagccatatttcatgtttacagactaaccacaagtcagcactagagtaattcgctattaggaatgtagaagcgagctatttgaacatctgaaacgatcttgaatgtttttatagtatacaattttgtgatatttgcgtaaataaaccgaatgaatgaataaggtatgataaccaagttgctaatcatggaagtttgtgaatagcgggcaaacccaaatttggccacaacggatacaaatacagatacagatacagatacaaatacagatacagatacagatacagatacagatacagatacaaatacagttacagatacagatacaaatacagatacagatacagatttcggcttttacacacagatacggcacacgcacttcggcattggtgtgcgtgcacttattatatttccgcttgactgccgctaatttctttcattgagcaactttatagtacttgccttgtgggtaggccggcgccttcacccttttgcgcttatcaaggccttgccgtttattatcaacgccgcttacaatccactcggtctagccaagcgccagccacttgcgaactatatatgtacgtatgtatttgttgtgtcccccaggtggcggagcatccataaaccaatgccgtcgaccaccagccagccatcggttcacaatactaaacacatatgggctatatagactataggcattgaagcactcgcacaggaagtcacgtccgctgtccatccgtattcggaaatcaaaagagcccgctggaatatatatgtatggtgtaatgcgcgattgattgtgattgtgattttacatccccaaaccagcaaaagttggcaggtgtcaaggccaaacagctgctgatacgaaattggaggggataatcttatattaatttatgctaatgaatgcttgatagctgttaacagtatttccggttgggagaaagtgtgtgattgggccattagaaattctcgtaatgaggctattggctttcaatttttaaagccttctttcgccattaatagatggctacttcttctactgtttttggttagaaacttatctaggcgcaaatataaactgatttaaatgctttaatgcaagattaaaccgaatactactctaagaccacttgcgctaatcacttaatctttagttaattatattcaccttgaacaaagaccataatctaaacaaacaaacacacagaaaacggacgcgctttgctcgttaagcttgataaattgtgtatatgaatgtagtagccaatataaattagtgtactaatatacctttcttttcgtttaattccaggcgaggcaaagaatctgagcagtcgcaatgcggccaacactagctgcagcacacagggcactcgcgatgtctactgcacaattgcgttggaccaggaggagatctgccgcacacccaccatcgaacgcacactgacgccgttcttcggcgaggagcaccagttcaagattccgcgccgcttccgctacctgaccatctatctgtgggatcgtgatatgaagcaggataaacccattggcaagatagcgatcaagcgggaggagctgcacatgtacaatcacaaggatcactggttctcattgaggccagtcgaccaagactccgaggttcagggcatggttaatgtggaggtggcatttacggaagcccaacagacccagtcgctctccgagggcatagatctgggacagcacacattgcggcatcatcagaacctgccacaccacagccaccagcagcgggcgcatctaaacgattacaaggagaacagtgaactgagtaacatacagcgggcatcagcagctgcagcgagttcctcatcggcagccatgacactcaagacacgagcggccggtctatttggtcacgtgcatcatccgccatcgcagactcagcactttccgatcatcaataccacatccacgtcgtcggatcagttgtccaattggaaatcgcatgggagattcgttggtgtgaccatcaaagtaccagcctgcgtggacctggccaagaagcagggcacgtgcgatccatttgtggtctgtaccgcccactatagcaacaagcaccaggtgacgcgacgaactaagcagcgcaaaaagaccgtggatccggagtttgacgaggccatgtactttgatcttcacatcgatgcggatgcgggtagcacaaataccactggaagtaacaagagtgccggttccctggaatcatcagcgaacaagggctattctatatacccggtgggcggtgcggatctggtggagattgtggtgagcgtgtggcacgacgcacatggagccatgtccgataaagtgttccttggtgaagtgcggctaccaatgctcaataagcaggagcagcaggcagttaatccatcggcttggtactatctacagccccgctccatgacgcacagttcccgctcgctgaacgccacgccccgctcatgtgcgacgccgccgggaacgagattaagcgtggactcgaccattggatcactgcgcttaaatctaaactacaccgccgatcatgtcttcccgctggccacatacgacgatcttatgaatctgctcctggaatcggttgatcagcgacccatcaccgtgtcggctgtgtcgatcctaggcgagctggtctcgggcaagacggaggtggcccagccgctggtgcgactctttacgcacacggagcgcattgcgccgatcatcaaggcgctggctgaccacgagatctcccatctgacagatcccaccactatcttccggggtaacaccttggtctctaagatgatggatgaggcaatgcgattgtctggactgcactacctacatcagacattgcgtccggttttgtcgcagatcgttgccgaaaagaaaccatgtgagatcgatcccagcaagattaaagatcgctctgcggtggacacgaatctgcacaatctgcaagattatgtggagcgggtttttgaggcaatcaccaagagcgctgatcgctgtccgaaagttctgtgtcagatcttccacgaccttcgcgagtgtgcgggtgagcatttccccagcaatcgagaagtgcgctactccgtggtgtccggctttatcttcctgcgcttctttgcacccgctatcctgggaccaaagctcttcgatctgaccaccgagcgactggtaagttgattctgataaacgatttattcaaataaatcaataatcattccttcttttttcaggatgcccaaacgagtcgcacgctgactctcatctccaagacgatccaatcgctgggtaatctggtcagctcccggtcgtcgcaacagacttgcaaggaggagttcaccgtcgagctgtacaagaagttctgcacggaacagcacgtggatgcggttaagcactttctggaggtgatctcgacgcccagtcatgcgagcagcagcgttcatccggcggcggcggcggcaacgccactggaaccagttttacttaaagaggggtaagttaatgtttttacttttgatactctgtagatgcgcgatccccctgatttggttcgagaaacttgcccaatcagaggggatgccctgtagcctctagaaaatatcgattggtggactgtgcaatgctccctctatatacccacttttctatagatctggcatatcccacccaaggcatttggttgattacgcttcgttttattctaataccaaaactttctttgtctttctcttcttttccgcgcgctgcttttaccaaaaataaaaaaaaacatatatcaaataataaatcaaaaccaatccatcacgcccaacacatcacacatttatataccatcccatcacacaaaaatcacacttattcatcacacactaaatctatactaacgtctagcgaggggtaagagaaattacttataacattattgaacaattggctctgtttttgtcttggttgcatatactagcctgggacaagaacagagagatctgagtgcgagatatcgaaaagcagatgctaagaccccgctttctttgcttctctctcccccttcctcccgacagcctgatgaccaagtatccgacatcccggaagcgttttggccggcagttcaaacaacgccacttccgcctcaccacccactcgctcagctatgcgaagtcgaagggcaaacaacccatctgtgatataccgctccaggagatcgccagcgtggagcagctgaaggacaagagtttcaagatgcagaactgctttaaggtgagcattcattcgatgtgcttcgatttcaattggttcggctgtgatttgcatgtgttgcaacgaataatgcacacgagagcagtggtgtgccggaaacgtgcgatccacgccacatctataaataggcagccaaagcccacacacctccgggcagtgatggtaatttagctggtgttacatgctagatggttaggttgcgaacttgcaaagcattagatggagcttacatgtcagaaagaatagtaggagttatagttagtactctaactttccaagcgttaaacttctttagaaagcaaataaatcctatagccgcatagttctttctttttagtctatctataattaggtttcatttcgttctaaaaaaaaaacatcatcactgcctccggcggcaagctcatgactgaacgatgtgactctgtgtgggcgtagagcagtggctgctaatcgatggcggcagcaggcaggcccatcctcggcgacagtgaaaaccgaacctccagtcagttgcccgcgaaactttcactaatcactcacagagttttgtgtggcaaatgacaagttgcggcaattaaaaataattagcattattatgcagatgaactggcggagctccgctttgcgtacgctattgttattgccatttgaaggtagtaaggcaaaaaagggaaatttcaaaacctagaaaccaatgcagccgacgcagaagagaatcgtcaacgtgggtgcgatttcttggcgttacgttttcttattttttaacgcagccaagatgtgggaattgtctcagccagcgatttcacttgggtgcgattgttttgcaattgcgccgcgcacagaatttatgttaattgcacaaagatgagactaagatttactttcgcctcttctcccacagattgtgcacaacgatcgctcgctgattgtgcagacaacgaactgcgtggaggagcgcgagtggttcgacctgctgcacaagatatgtctgatgaactccatccggatgcagtacttccatccctcggcctttgtaagtggattctacagctgctgcggccggtcggatgagaattcaccgggctgtaagaaggtgttggacaagacgatggactacttccagatggatttagtaacggcgctggatccagcgctcgatctgcagcgcatccacacgctgatcatgtctaacatgagtgtgctggagtcactgctagatccgctcacctatcaccagtctctgtcgcagacgcaacaccaacagcacaatcctctggtgccgctggccaccgatctgcagaagcattcaccacaggccttcgctgagttcaagcgaacgattgagaagctgagagagaaggcctatgccatcgatagagatcatcgggactacaagcagggcattacgcggcaactgaaatacggcagcagacaggcacccattggcgatgataactattggcatatgatgcgagccgccggccagttgaatcagcagcatcaccagcagcagcaacatcagcagcaacagcaacagcagcagcagcagcaacttcagcagttccagccgcagccagtgctgccgcaaatgcagaacgttcgggcgtatccttatcagccagctacgagcaacatgaacgcctactgtctgcacaacatgcagtatcagcagcagagattgccgttccatcagcagcaacagcagcaccatcagcagctccagcaacagcagtcgcagttccagcccctgcgcagccatcaactgcagcgccacaacaacaatttgaacaacaataactgcggcaatggatcctcctccagtccatcatcgaccacatcaagtgtggtggccgcaccgcccagcaccacatcgtcatcgcagccagctccaccgatttattagcgttcaaggctgtgcgtattcgctttgccgcgggccattatcacgaccaggtaaaggaatacgcatcgatgtggcaaacacaaccccctaccgctcctacgcaaccagaggatgctgctgtacaaaacgattaattgtgctaatttctaggctcttgtttttttttgtatcatttttacgagtttaacgttgtaaaggtctagactaagtttttttaattaacagtttttatacaccagatttttacggtaccgcctacaccagctacaacaacacgaggagaaaacaagaggaacggaaacgaaatctaaatatttataagcctatttatttttttgtatgtgctaacattatttttacacgaaaacaaaatacccaatatggaaagagcatttctatacttgtgtgagcgcaaagagggcagagaaccactgaaaactgataactttataagcctaaactactaaaaactcagaaactgctaagattttttaaagcctagcctaagttaagtatcggcgggatgatgagtagcgaaatgaaaatgaaaagatgtaaatagcagatacacgagtatatatatatcccacagtatgtatgtacatgtgtatgattaacttcattataccagttaatttaggcgtagcaaaaatttctaaaaaatcaactaaactaggcgttttgcccagaggcgacacacgcgaaaagcaaataattctaacgcaatctgaacgcgagaaaaatactgcgaaaagcatgaaaaaaacatacatttacatgtatatttactttatataactgtcatacagctaatgttaaacaacacacgatatgtattcggcaaattctagaatacaaacaaaaagcattgttaagaacaaatttacttccattttgcatatacaaacacatacgcacgcacacctatatttattaaatgcatttaatttcatattaaacttaaaacgaaaaacaagttaattgttacacaaacacgatttggttagcttcgacttacttccaccgatttgtttccaaagctcttccatattaattacacatgtaatttacatctagaactagaatgttaaataatctaatttttgccatatttagttcagtgttcatcaatcgcattgaaaagtgtcttccttcgccgcgttcaatcatattgccttttgtttatgcattccaatccaataatttgtgcatttcttaattctaatatctgcataatgtacatagagatacgaaacggagaaagaaacacgacgagatgttgctatgaatttaaattgtttggagtttccaacgtggttcatatacatataatttcacttgcattttaaggacacaattatagtttacttttaccatgcctagctgataagttgttggtacaaagaatcgaaaataaaaacatagatattttccaagggaaaaataaagcgtatcgccaatggataaattttgatttcgttttcttttgagtttattattgatagagctttcatattttattgtgataggattatacaagcaccttgtcaagtactattggattacctatttttctatataacatccaatatatatgtatttgatttggttcagaattcaaaaatatttagggggattatatttctattttctttctttctttagaaacaagttttttttttacgaggttgaatgaaatatacagaaagtttttctggctttgcttgtttgtggatacaatagaattttttaaacagta

SEQ ID NO: 14675 - DNA, 4705 bp, DROSOPHILA
tccgcttcgaaaggttgttcgcggatgcgtgtaaacccgcaaagcaaataaactcggagaaccaagtttttgcgattctgattcaagcaaccgaattactttccatacttcgataatataatcccacgtctgctagtgcgtgcaaaaaacagtttgtagttaaaacgaaatactaaaatcagtcgagccctgaagcaacagggaaagtgcatttcgtgagcggcaaatcgactcatattcccgtcacaccagctcaatgcacaatgcaacgctgcagcgagtgatgaaattcaaatgcaaatagccggctaataaacctgttaaagaaaaacaaataatttcgagttattaaagtttcgtgaagatcgagtgaaggagttagataaatttccaatcgcgtgttgcaagttccccagtgggtagctgacaaaaagctggctgctttaagcgcacaatgctgctgaagaagaagcgctatatgttcgacgagcgagacgacaataatattaactcgcccgtcgccgtcgagccaagcagcaacaacaacaaaatggccgatacacgcgaagtgcgcattgaagagcaattaaaagtgaaaattggcgaggcaaagaatctgagcagtcgcaatgcggccaacactagctgcagcacacagggcactcgcgatgtctactgcacaattgcgttggaccaggaggagatctgccgcacacccaccatcgaacgcacactgacgccgttcttcggcgaggagcaccagttcaagattccgcgccgcttccgctacctgaccatctatctgtgggatcgtgatatgaagcaggataaacccattggcaagatagcgatcaagcgggaggagctgcacatgtacaatcacaaggatcactggttctcattgaggccagtcgaccaagactccgaggttcagggcatggttaatgtggaggtggcatttacggaagcccaacagacccagtcgctctccgagggcatagatctgggacagcacacattgcggcatcatcagaacctgccacaccacagccaccagcagcgggcgcatctaaacgattacaaggagaacagtgaactgagtaacatacagcgggcatcagcagctgcagcgagttcctcatcggcagccatgacactcaagacacgagcggccggtctatttggtcacgtgcatcatccgccatcgcagactcagcactttccgatcatcaataccacatccacgtcgtcggatcagttgtccaattggaaatcgcatgggagattcgttggtgtgaccatcaaagtaccagcctgcgtggacctggccaagaagcagggcacgtgcgatccatttgtggtctgtaccgcccactatagcaacaagcaccaggtgacgcgacgaactaagcagcgcaaaaagaccgtggatccggagtttgacgaggccatgtactttgatcttcacatcgatgcggatgcgggtagcacaaataccactggaagtaacaagagtgccggttccctggaatcatcagcgaacaagggctattctatatacccggtgggcggtgcggatctggtggagattgtggtgagcgtgtggcacgacgcacatggagccatgtccgataaagtgttccttggtgaagtgcggctaccaatgctcaataagcaggagcagcaggcagttaatccatcggcttggtactatctacagccccgctccatgacgcacagttcccgctcgctgaacgccacgccccgctcatgtgcgacgccgccgggaacgagattaagcgtggactcgaccattggatcactgcgcttaaatctaaactacaccgccgatcatgtcttcccgctggccacatacgacgatcttatgaatctgctcctggaatcggttgatcagcgacccatcaccgtgtcggctgtgtcgatcctaggcgagctggtctcgggcaagacggaggtggcccagccgctggtgcgactctttacgcacacggagcgcattgcgccgatcatcaaggcgctggctgaccacgagatctcccatctgacagatcccaccactatcttccggggtaacaccttggtctctaagatgatggatgaggcaatgcgattgtctggactgcactacctacatcagacattgcgtccggttttgtcgcagatcgttgccgaaaagaaaccatgtgagatcgatcccagcaagattaaagatcgctctgcggtggacacgaatctgcacaatctgcaagattatgtggagcgggtttttgaggcaatcaccaagagcgctgatcgctgtccgaaagttctgtgtcagatcttccacgaccttcgcgagtgtgcgggtgagcatttccccagcaatcgagaagtgcgctactccgtggtgtccggctttatcttcctgcgcttctttgcacccgctatcctgggaccaaagctcttcgatctgaccaccgagcgactggatgcccaaacgagtcgcacgctgactctcatctccaagacgatccaatcgctgggtaatctggtcagctcccggtcgtcgcaacagacttgcaaggaggagttcaccgtcgagctgtacaagaagttctgcacggaacagcacgtggatgcggttaagcactttctggaggtgatctcgacgcccagtcatgcgagcagcagcgttcatccggcggcggcggcggcaacgccactggaaccagttttacttaaagagggcctgatgaccaagtatccgacatcccggaagcgttttggccggcagttcaaacaacgccacttccgcctcaccacccactcgctcagctatgcgaagtcgaagggcaaacaacccatctgtgatataccgctccaggagatcgccagcgtggagcagctgaaggacaagagtttcaagatgcagaactgctttaagattgtgcacaacgatcgctcgctgattgtgcagacaacgaactgcgtggaggagcgcgagtggttcgacctgctgcacaagatatgtctgatgaactccatccggatgcagtacttccatccctcggcctttgtaagtggattctacagctgctgcggccggtcggatgagaattcaccgggctgtaagaaggtgttggacaagacgatggactacttccagatggatttagtaacggcgctggatccagcgctcgatctgcagcgcatccacacgctgatcatgtctaacatgagtgtgctggagtcactgctagatccgctcacctatcaccagtctctgtcgcagacgcaacaccaacagcacaatcctctggtgccgctggccaccgatctgcagaagcattcaccacaggccttcgctgagttcaagcgaacgattgagaagctgagagagaaggcctatgccatcgatagagatcatcgggactacaagcagggcattacgcggcaactgaaatacggcagcagacaggcacccattggcgatgataactattggcatatgatgcgagccgccggccagttgaatcagcagcatcaccagcagcagcaacatcagcagcaacagcaacagcagcagcagcagcaacttcagcagttccagccgcagccagtgctgccgcaaatgcagaacgttcgggcgtatccttatcagccagctacgagcaacatgaacgcctactgtctgcacaacatgcagtatcagcagcagagattgccgttccatcagcagcaacagcagcaccatcagcagctccagcaacagcagtcgcagttccagcccctgcgcagccatcaactgcagcgccacaacaacaatttgaacaacaataactgcggcaatggatcctcctccagtccatcatcgaccacatcaagtgtggtggccgcaccgcccagcaccacatcgtcatcgcagccagctccaccgatttattagcgttcaaggctgtgcgtattcgctttgccgcgggccattatcacgaccaggtaaaggaatacgcatcgatgtggcaaacacaaccccctaccgctcctacgcaaccagaggatgctgctgtacaaaacgattaattgtgctaatttctaggctcttgtttttttttgtatcatttttacgagtttaacgttgtaaaggtctagactaagtttttttaattaacagtttttatacaccagatttttacggtaccgcctacaccagctacaacaacacgaggagaaaacaagaggaacggaaacgaaatctaaatatttataagcctatttatttttttgtatgtgctaacattatttttacacgaaaacaaaatacccaatatggaaagagcatttctatacttgtgtgagcgcaaagagggcagagaaccactgaaaactgataactttataagcctaaactactaaaaactcagaaactgctaagattttttaaagcctagcctaagttaagtatcggcgggatgatgagtagcgaaatgaaaatgaaaagatgtaaatagcagatacacgagtatatatatatcccacagtatgtatgtacatgtgtatgattaacttcattataccagttaatttaggcgtagcaaaaatttctaaaaaatcaactaaactaggcgttttgcccagaggcgacacacgcgaaaagcaaataattctaacgcaatctgaacgcgagaaaaatactgcgaaaagcatg

SEQ ID NO: 14676 - protein, 1163 aa, DROSOPHILA
MLLKKKRYMFDERDDNNINSPVAVEPSSNNNKMADTREVRIEEQLKVKIGEAKNLSSRNAANTSCSTQGTRDVYCTIALDQEEICRTPTIERTLTPFFGEEHQFKIPRRFRYLTIYLWDRDMKQDKPIGKIAIKREELHMYNHKDHWFSLRPVDQDSEVQGMVNVEVAFTEAQQTQSLSEGIDLGQHTLRHHQNLPHHSHQQRAHLNDYKENSELSNIQRASAAAASSSSAAMTLKTRAAGLFGHVHHPPSQTQHFPIINTTSTSSDQLSNWKSHGRFVGVTIKVPACVDLAKKQGTCDPFVVCTAHYSNKHQVTRRTKQRKKTVDPEFDEAMYFDLHIDADAGSTNTTGSNKSAGSLESSANKGYSIYPVGGADLVEIVVSVWHDAHGAMSDKVFLGEVRLPMLNKQEQQAVNPSAWYYLQPRSMTHSSRSLNATPRSCATPPGTRLSVDSTIGSLRLNLNYTADHVFPLATYDDLMNLLLESVDQRPITVSAVSILGELVSGKTEVAQPLVRLFTHTERIAPIIKALADHEISHLTDPTTIFRGNTLVSKMMDEAMRLSGLHYLHQTLRPVLSQIVAEKKPCEIDPSKIKDRSAVDTNLHNLQDYVERVFEAITKSADRCPKVLCQIFHDLRECAGEHFPSNREVRYSVVSGFIFLRFFAPAILGPKLFDLTTERLDAQTSRTLTLISKTIQSLGNLVSSRSSQQTCKEEFTVELYKKFCTEQHVDAVKHFLEVISTPSHASSSVHPAAAAATPLEPVLLKEGLMTKYPTSRKRFGRQFKQRHFRLTTHSLSYAKSKGKQPICDIPLQEIASVEQLKDKSFKMQNCFKIVHNDRSLIVQTTNCVEEREWFDLLHKICLMNSIRMQYFHPSAFVSGFYSCCGRSDENSPGCKKVLDKTMDYFQMDLVTALDPALDLQRIHTLIMSNMSVLESLLDPLTYHQSLSQTQHQQHNPLVPLATDLQKHSPQAFAEFKRTIEKLREKAYAIDRDHRDYKQGITRQLKYGSRQAPIGDDNYWHMMRAAGQLNQQHHQQQQHQQQQQQQQQQQLQQFQPQPVLPQMQNVRAYPYQPATSNMNAYCLHNMQYQQQRLPFHQQQQQHHQQLQQQQSQFQPLRSHQLQRHNNNLNNNNCGNGSSSSPSSTTSSVVAAPPSTTSSSQPAPPIY

SEQ ID NO: 14677 - DNA, 3899 bp, DROSOPHILA
agatataattaacgtatgtattttatagaaactccaaaaagactccaaaaatgctttttccaaatcacgaccttcatattttcagttaattttttagcatttaaacaaaataagatagagtttcaaattcagagttttaaattcatgttgctccaacgaagaaaatacgaagtacttttcccaagtgcaagcagtgtggtttctccgtaggaattgcaattggctacggagtcgttcgggccaggccaattatggggcacttgtgcgcggacatgtgttgggggccaaatagccatggctccaagcagctgagtgggagtggggcagtttgtggggccaggatttgttgtccatatcagtatgccacatgttgatgccgcaaaatgcattgagcaatgcgttgaattttctctactatatttcttatttttgagtgacacgttgaaaaatcatttctattgtattttggtctaaggggtacggattactggcacatgcccttaagtaattgtgtaaagttattgaactaaattaatctttagtagtatttaaatatgttttaattaatacttataccagtaatttcagacttgcgtgtgtaatttaaatagataatcgtagttctcattccgtaaaatcaattattatttattattattaattgtgggtcagagtaatgtctctcgtaacagcactcagaaaaatagttacaaaatttttgagactttatttataatattattaaatatactttctgtctgattatttaacagaacagtaagtgaaataatatacttctatgagaaagccctatataattatttgaatttgtatattatatttaagtttcaaaacggatttgtgtttgtttaactaaaaactaaaactgtcgcttatatttttccgcgtgatatttgttgtataagactaaggtaatactagaaacagaatatattatcttcgcaattgatataaaaacgcagtctggatacaatagtggtgcattcaagaccaaccctgaatcgattcgccatcattcttgtaactatcgtaaagccgatttatccgtaagaataccgaatatgtggatattgttgggtatcgcagtgctgatcatgactttagtctgggataatagtcgcaaacaatggagagttaacacttttgaaaagtccaggattttgggaccttttacgatccctatagtgggcaatggactgcaggccttaactttgaggccagaaagtgagttgatattaaaagttatgtgatcagaatttctagaaaagaacccaaaatgaaatacgcattaccaaaaacaattttcaaatattttgtatccctaaagattttattcagaggtttggtgactacttcaataaatatggcaaaaccttccgcctgtggattctaggcgagtgtcttatttacacgaaggatctaaaatattttgaatccatactgagtagtagcacactgctcaaaaaagctcacctctaccgatttctgcgtgattttcttggcgatggacttcttttaagcacgggaaataagtggacttctcgcagaaaggttctcgcacctgcttttcacttcaaatgccttgaaaacttcgtcgagataatggatagaaatagtggaattatggtggagaaattgaaaaactatgctgatggcaaaacgtgcgtggacctattcaagtttgtttctctggaagccctggatgtgaccacaggtaagtgaaaacttacaacatcatttaaatattagtatttatttgtacaaatttattagagaccgccatgggtgtccaggtgaatgctcagaacgaaccaaatttcccctatacaaaagctcttaaaaggtaggtggtctatattctccatgtgggctatgctgcaataaaaatgatattgttttcagtgtggtttatatcgagtccaaacgattggcaagtgtctcgatgcggtataattggcttttcccgctggcggctcctttggtttatcgccgtttgcaaaaagacatagctataatgcaggactttactgacaaggtcattcgcgaacgacgagcgattctggagcgggccagggcggatggcacctacaagccgctgagtacgttaactgtaatccttacccttattattatattatataatataacctattttatagtaatgggagacgatgatatcggtggtaaagctaagatgactttgctggacattctgctgcaagccaccattgataacaagcccttaagcgatgtggatatccgcgaggaggtggacgtttttatattcgcaggagatgacactacaaccagtggagtgtcccatgcactacatgcgatatccagacatcccaaggttcaggagtgcatctacgaggaactagtgtctgttctgggaccagatcccgacgcttcagtgacccaaaccaagttgttggaactaaagtatctggactgcgtgatcaaggagacgatgcgtttgcatccaccagttccaattctcggaagatacattcccgaggacttgaaaattggcgaaataaccattcctggcaacacaagcatattactaatgccctactatgtctaccgagatccggaatactttccggatcctctagtcttcaagccggaacgatggatggatatgaaaaccacctcgaataccccacctttagcatatattccgtttagttcagggcccaagaactgtatagggcagaaattcgccaaccttcaaatgaaagcgcttattagtaaggtcattcggcattacgaacttctaccgcttggtgcggatcttaaagctacgtacacattcatattgagttcctctacgggaaataatgttggcctcaagccaagaacaagagttaaatgattgagtgatacatattgttaatagaatcaaatttacatttttttgtatttattttatgttacatgccaggagcaaacttaaactgaaaacttgaagtggaacagtggaaaagttgtcaacataaataatgttatcataagattaaattaaaaattgaatgttaaatttcaataaactactactgctagtgctacataaataataatgtatctcgatacaacttttgatttcttgctgtgcatcctgcgtagttttttcaaatggctctaccttttttggcattccatgactcatctgctgaatccacttaacccacttcgaagttgaagccgtcacccacatgtgcgaaatttccataagccaattgcagaaacctcagccccaacgatcccagaaaagctgtacaagaccgccaaccagtaacgacagttttttgttttttttgtcacaactccagcattaaaacattctttacagcccctgggcacgctccattccgcacacacatacgaaatcgtataaaagtcaggcgaaacgatctcatcataacttaaacgtcacgttgcaaagagccattaaagtattggctccaaagccaaaaataaaataaaggaaaaatcgctggcgacacagtgaaccaatgactcctaacgatcgaggggaaaaaaaagagtaaaactgcattttaagagtgttccaagctggttttaagagagaaacttgtggtgccggtgatttgagacccgatccgtggattgagctcgaaagcgaaatcaaatcgaaaccgaaagccaagccgagttgaggtgagcttcgtgttgggctctttcagaagaatccgaaagagaagctttgaatttttggcttcttcagccgaagtttttatctttcagtcggttttttggcagccgatcgcgcggatgtggctcaaaaaaagcggttttcaaaaatcttcaaaaattgccaacaagtgcaaagcgtgagttttttatcttgaggt

SEQ ID NO: 14678 - DNA, 1618 bp, DROSOPHILA
tgcattcaagaccaaccctgaatcgattcgccatcattcttgtaactatcgtaaagccgatttatccgtaagaataccgaatatgtggatattgttgggtatcgcagtgctgatcatgactttagtctgggataatagtcgcaaacaatggagagttaacacttttgaaaagtccaggattttgggaccttttacgatccctatagtgggcaatggactgcaggccttaactttgaggccagaaaattttattcagaggtttggtgactacttcaataaatatggcaaaaccttccgcctgtggattctaggcgagtgtcttatttacacgaaggatctaaaatattttgaatccatactgagtagtagcacactgctcaaaaaagctcacctctaccgatttctgcgtgattttcttggcgatggacttcttttaagcacgggaaataagtggacttctcgcagaaaggttctcgcacctgcttttcacttcaaatgccttgaaaacttcgtcgagataatggatagaaatagtggaattatggtggagaaattgaaaaactatgctgatggcaaaacgtgcgtggacctattcaagtttgtttctctggaagccctggatgtgaccacagagaccgccatgggtgtccaggtgaatgctcagaacgaaccaaatttcccctatacaaaagctcttaaaagtgtggtttatatcgagtccaaacgattggcaagtgtctcgatgcggtataattggcttttcccgctggcggctcctttggtttatcgccgtttgcaaaaagacatagctataatgcaggactttactgacaaggtcattcgcgaacgacgagcgattctggagcgggccagggcggatggcacctacaagccgctgataatgggagacgatgatatcggtggtaaagctaagatgactttgctggacattctgctgcaagccaccattgataacaagcccttaagcgatgtggatatccgcgaggaggtggacgtttttatattcgcaggagatgacactacaaccagtggagtgtcccatgcactacatgcgatatccagacatcccaaggttcaggagtgcatctacgaggaactagtgtctgttctgggaccagatcccgacgcttcagtgacccaaaccaagttgttggaactaaagtatctggactgcgtgatcaaggagacgatgcgtttgcatccaccagttccaattctcggaagatacattcccgaggacttgaaaattggcgaaataaccattcctggcaacacaagcatattactaatgccctactatgtctaccgagatccggaatactttccggatcctctagtcttcaagccggaacgatggatggatatgaaaaccacctcgaataccccacctttagcatatattccgtttagttcagggcccaagaactgtatagggcagaaattcgccaaccttcaaatgaaagcgcttattagtaaggtcattcggcattacgaacttctaccgcttggtgcggatcttaaagctacgtacacattcatattgagttcctctacgggaaataatgttggcctcaagccaagaacaagagttaaatga

SEQ ID NO: 14679 - protein, 511 aa, DROSOPHILA
MWILLGIAVLIMTLVWDNSRKQWRVNTFEKSRILGPFTIPIVGNGLQALTLRPENFIQRFGDYFNKYGKTFRLWILGECLIYTKDLKYFESILSSSTLLKKAHLYRFLRDFLGDGLLLSTGNKWTSRRKVLAPAFHFKCLENFVEIMDRNSGIMVEKLKNYADGKTCVDLFKFVSLEALDVTTETAMGVQVNAQNEPNFPYTKALKSVVYIESKRLASVSMRYNWLFPLAAPLVYRRLQKDIAIMQDFTDKVIRERRAILERARADGTYKPLIMGDDDIGGKAKMTLLDILLQATIDNKPLSDVDIREEVDVFIFAGDDTTTSGVSHALHAISRHPKVQECIYEELVSVLGPDPDASVTQTKLLELKYLDCVIKETMRLHPPVPILGRYIPEDLKIGEITIPGNTSILLMPYYVYRDPEYFPDPLVFKPERWMDMKTTSNTPPLAYIPFSSGPKNCIGQKFANLQMKALISKVIRHYELLPLGADLKATYTFILSSSTGNNVGLKPRTRVK

SEQ ID NO: 14680 - DNA, 4296 bp, DROSOPHILA
cctcacgcaaatggacgccgtactcaactttctgtccaccgttcccggacccaacggggagccagcgatgcagtttgtactcacaaactggctctcccgccagaactcctttttcggaaactatgagcgaaaggtgagtgaaattgagtttacaaactttgcattttaatataaactttggtttttacaggtcaccaccatggctctgtgcaagctgttcgagtatggtgttgccactcaggacaaccgtttgaccacaataacattcaaagaactggtggacgaccccaccgacacgcgcagacgtactcgatccgtggcagctacaacccagaagtgggtaacaattccggctctcgtcaagatcttcaaggttttgatctccgagtaccagcacttccaggagggcaagagcgacgaacctcttacggacagcgaagaggatggcgatgatgaggatgcgcccggaaatccggacaagccgcgttacatatccgatctgttcgaatctgacgaggataacgccgaggacgaacaactgttgcaagagctgctgaaggaaaccaactaccagggcgacatagccgacaacctgcagaagttccttaccaccttcacgcagaacgaacactttcccactttctatgaacacctcaccgagggtgaacgcctcatcctgctcagcaaggtccagcagaagtaggataacctctccttattcgtattgttcgtatttatgtattgttgctaacccttgaattgaatatacatttatattttttattaagaagtcagctattagtgggtatagtttacgaggcttttagaatgcaaaccagtaaagaaatcatcaagtgcttggttataaaaaatcaaaaattttagttatgtattttgaacttttaacattgcaatacggatgaaaatcgattgggttgaaatggaaacattaacccagctttggattcaggtgtagccagttacgattcggttcgcttgatcataaggccacctcgtcgttacggagcttgtgctgcagtggaatgtcgggcctgaaggcatcctgtgggattttatatatgtaaaatgattaaactactcgccaagttccattccactcaccatgtgcttctctgagccaaaggcaaagaactttcgtatgcagggcgtgagcagcacgggatccaccttgttaggattgtttttgccaaacacgaaggtgcctagcaatgccacgaaaatcgtaatggaggcaccgaacgtggtgtaccacatgtacgagatccgatagagcggaaaaatgtccctgtggattcgcagtatattaagacgtgttctagtatgtgaagattcgattcttactctgcagatgctcccagatgagttgtgttggccagactggtggtcacattaaagctgtagtcgcactgctccacgtttaacggcttcgttttgtaggtaatggctcctgaggcgatggcccactgtgcattgaggctcacccaggacatggctattactcccataacaccgcccaccaaagcgctctgaaaaaaaaagaatgatatattatagatctaccatatctattttggttgtaagaattcacatttccattgatccaaggcaggaaaagaccgatggtaaagatgccaaaaagtggcccgttcgtgatcgcctccaggctcatggtcagctggagaacagtgcccatgtgctccactacgtagactaggcacacgcagagaactcctactccgacgaccaccagtcgcatgatccagttaattgcggagctagagagcggctttttcacgtacggcttgacgaaatcctccagcaccacggcggacatggagttgaggcaggtggagagcgaactcagagcggcactgaagacgccggcaatgaagagtccagtcatgccgggaagttcacccagcgtcttcatcacaaagaggggcagaagctgatctcgggcctttgccagctggaatcgaacggttactccattaggtaaggaaaagaactgatgactgagcttaccttggtggtcaggggatcacagttctggtaggtggcgtatatcagcagaccattgtagccacatagcgccattaggatgagcacaccgacgcagaagatgcacagcgccttccgggcatcgccaagcgacggaagtgacaggtacctttggatcatgttttgtgacacggcgttggtctgcgtccagtagacgatccctccgaagaacaggcaccaaaacgtgtggcgcacagtgggatcgatgctgaggctatggcatacaaaaaaattacaaaaggattctccacttaaggaatatgaacttactctggtgcctccaggcgatcgctgctccaagctcgctccagcaccactccggcccctccaatgtcgcgtgtgcctttgatggccaccaggcaaagtgcacccagcatggagatggcctgcaccacgtccgtccagaccactgccttcaatccacccagactcgtgtagaagacgcagataatgcacacgatcggcgtgatcgtgtgtactccgattcccgtcacctggttgaaggccaatgcgggaacatagattacgatgggcagataggccacctgtaggattaatccgatcatcagtgaaggttccatcaatttaggtaagtaatttatccgtgaacaaaagagcagataagtgaataatgactcgccatctctggcatctactcacattcataatggcaaacatcacggatccgtaaaggcgtaacctccgatcaaaccgaacctccagatactatccggataaaatccataaaataactaggcaatagtttcttcaaatggaactcacctcgtacgtggaggtgatgtttaggtcgtgaaatacgggtaggtagaaaacacccataaccacgcccatgccgataacgccgcaggatacgtagagatattggatgccataggagtagacctccgtgggcaggccgagcagcgtgatgccggacacgaagctggccaccaacgagaaggcgatgggtatgaccaacatctttcgcccgcccagcatgtaatcgtcctcggacacggacttgttcatgaatccaaagtatatgccaataccgatgcagagcaggaacatcgaaacgaaggccacatagtccggccaggcgaagcgctgcagctcgcccagcacctcctcgatattcgacatgatgatcactagctacgttagtggtatgtagcggccgctggttgtgggatgtgtccgactctctggtcggtcggtggctcactgagcccagatttgggtgcctctgcttaggcggctgtgattcaattcaattccgctcaattatcaattgtgggctaatttagttcttgcggcggccagggggatgcgactatctttagttaggccggcaggcgggagaattactacacctacgtctccagttccgggaacgttccattgatcatcgctccacttggcggccgctggcacaattcccactgcgttggtaccagatccccttgtagacaattatgtcactgtcacccagtacgcaaactgatctttcaagcaaaaaatcgccaagagcaccggagcacctcaaactgggctccaatcacggccaaatcccggagcttgcccaccgcctgaaccggaagtgaaacgccttatttttactgatgttgcacaagaactgattgggagccatgcgcccgcccgaggtttaccacgtatatagtcattcacagaaccacctggcagagcgccaggagatcggacgtggggttcggagtgggatcaagtgcacgatcaccggcaaatcggtgggagctattatcgcaacactacaaaaaaccggaacatccaagaaagtatttcaaaactatattgatgactttattgaactctaaaataaaaatgaagaagctataagttacataaagccatcagatatatacagataacaatttgaattatatttttacatttatttgaaaaagtacttagctattgtgatacatttaattgctaactcctggttttgttcagtgcggttgtccctcaacttgaacgcatttgcatcaatctcgcagagaaattcattcatttcgaatcaccggcctgcagttcgctcttcagaatccaagaggcggctctcaacgcgatggccaccaccaccgagttgggatttcccgagatcggacggggtagtactttgaaaaatagtccacaaatataattagtaatgcatcaagaaactaactatgtttc

SEQ ID NO: 14681 - DNA, 1835 bp, DROSOPHILA
accgaccagagagtcggacacatcccacaaccagcggccgctacataccactaacgtagctagtgatcatcatgtcgaatatcgaggaggtgctgggcgagctgcagcgcttcgcctggccggactatgtggccttcgtttcgatgttcctgctctgcatcggtattggcatatactttggattcatgaacaagtccgtgtccgaggacgattacatgctgggcgggcgaaagatgttggtcatacccatcgccttctcgttggtggccagcttcgtgtccggcatcacgctgctcggcctgcccacggaggtctactcctatggcatccaatatctctacgtatcctgcggcgttatcggcatgggcgtggttatgggtgttttctacctacccgtatttcacgacctaaacatcacctccacgtacgagtatctggaggttcggtttgatcggaggttacgcctttacggatccgtgatgtttgccattatgaatgtggcctatctgcccatcgtaatctatgttcccgcattggccttcaaccaggtgacgggaatcggagtacacacgatcacgccgatcgtgtgcattatctgcgtcttctacacgagtctgggtggattgaaggcagtggtctggacggacgtggtgcaggccatctccatgctgggtgcactttgcctggtggccatcaaaggcacacgcgacattggaggggccggagtggtgctggagcgagcttggagcagcgatcgcctggaggcaccagacctcagcatcgatcccactgtgcgccacacgttttggtgcctgttcttcggagggatcgtctactggacgcagaccaacgccgtgtcacaaaacatgatccaaaggtacctgtcacttccgtcgcttggcgatgcccggaaggcgctgtgcatcttctgcgtcggtgtgctcatcctaatggcgctatgtggctacaatggtctgctgatatacgccacctaccagaactgtgatcccctgaccaccaagctggcaaaggcccgagatcagcttctgcccctctttgtgatgaagacgctgggtgaacttcccggcatgactggactcttcattgccggcgtcttcagtgccgctctgagttcgctctccacctgcctcaactccatgtccgccgtggtgctggaggatttcgtcaagccgtacgtgaaaaagccgctctctagctccgcaattaactggatcatgcgactggtggtcgtcggagtaggagttctctgcgtgtgcctagtctacgtagtggagcacatgggcactgttctccagctgaccatgagcctggaggcgatcacgaacgggccactttttggcatctttaccatcggtcttttcctgccttggatcaatggaaatagcgctttggtgggcggtgttatgggagtaatagccatgtcctgggtgagcctcaatgcacagtgggccatcgcctcaggagccattacctacaaaacgaagccgttaaacgtggagcagtgcgactacagctttaatgtgaccaccagtctggccaacacaactcatctgggagcatctgcagaggacatttttccgctctatcggatctcgtacatgtggtacaccacgttcggtgcctccattacgattttcgtggcattgctaggcaccttcgtgtttggcaaaaacaatcctaacaaggtggatcccgtgctgctcacgccctgcatacgaaagttctttgcctttggctcagagaagcacatggatgccttcaggcccgacattccactgcagcacaagctccgtaacgacgaggtggccttatga

SEQ ID NO: 14682 - protein, 587 aa, DROSOPHILA
MSNIEEVLGELQRFAWPDYVAFVSMFLLCIGIGIYFGFMNKSVSEDDYMLGGRKMLVIPIAFSLVASFVSGITLLGLPTEVYSYGIQYLYVSCGVIGMGVVMGVFYLPVFHDLNITSTYEYLEVRFDRRLRLYGSVMFAIMNVAYLPIVIYVPALAFNQVTGIGVHTITPIVCIICVFYTSLGGLKAVVWTDVVQAISMLGALCLVAIKGTRDIGGAGVVLERAWSSDRLEAPDLSIDPTVRHTFWCLFFGGIVYWTQTNAVSQNMIQRYLSLPSLGDARKALCIFCVGVLILMALCGYNGLLIYATYQNCDPLTTKLAKARDQLLPLFVMKTLGELPGMTGLFIAGVFSAALSSLSTCLNSMSAVVLEDFVKPYVKKPLSSSAINWIMRLVVVGVGVLCVCLVYVVEHMGTVLQLTMSLEAITNGPLFGIFTIGLFLPWINGNSALVGGVMGVIAMSWVSLNAQWAIASGAITYKTKPLNVEQCDYSFNVTTSLANTTHLGASAEDIFPLYRISYMWYTTFGASITIFVALLGTFVFGKNNPNKVDPVLLTPCIRKFFAFGSEKHMDAFRPDIPLQHKLRNDEVAL

SEQ ID NO: 14683 - DNA, 3365 bp, DROSOPHILA
cttgaaaatgttttgtggtcgcaagtgctgtctgttctgcctgttcatgagcgcctggggcttcttgatgctgaatctgctgggtatcttcttctacgtccagtcactgatgctcctggagtccctgcccttgccccaccacttccccagtcaggaggccttcaaggagcaggcggacgaggcctaccaggacgtgtccacacggtgctttgtagccgccgttttctatctgggattcgtcttcattgcgatagtggccattcgtcgggataacaagagaaggaagcgactctacaagcggggtcccggtcacttgcgattccgtcgttgatttgtatgattggttattgaataaacaatttattttcatggttccaattgcatttcacccactcagcgacgtccacccacttgttggttcgaaagatcgaaagaaccagtttgttgaccgcattctgcgattagccttaacttctttatcgccaagccacttttcgatttcaagtctggctgactgttgtccactccgcattatgcattcgtctcggaccaaccgatttttgacagcgcacgtgacaccttcaccgaggtgtgttctcttttgggcatcataaatttccgtgaaattctctttccgaaacatgctaatgggaatggggtgtgggttcccagttctggctattcccccccctttcacctctataccgtagtctagtctacaccggggttatgtatcttgttcttatcgaccgagcttttgtgtcttacacgaaaaccgttgtgtaaattatcgtacacgattttctagttgtacgcttgtgtatctggcttgttatcaccaccaaccaagtgcagtctgctgaaaactggttcactgcatttactcattttttcgggaactcgggttaactgatttggagatctggcaatacctgggaaatattctaaatttcctccatggatggtcttctatataattgtgccacccgagagaccgtacaatttcttatgcagatgtagaatcgtattttttacgaatctatgaaacacactcgtagaaaagtggttcaattcagaaacatttgatattgacatcaaattgagatttttaagtttgtgacgcgaaaaaaattttatattttgctaggcaaacacttggctaagaaaatcaaaggtctcttcccacagagaagggaagtgaagagcaagtaccatgtcccgatttttgatagctaccaaagagcgtctccagaggggatgtgagtgaaagaattatgtccagaagtttttcgcttcaaagtagaataaaaccttcctgaatccccagtgcgctttggccagatgttgattcataatacggtttctcagcgaatggccgctaaggccacgcctcctgggtcagctaaggcggtcaaggccactccaccgccacccccgtccaccaagccgccacccaaatgtcctggaggcgacaagaatatgaagcggaagccgggctactttgccagcggtggtcagcacgcggtgctcagtgattgcccaaagccggaaggcgactttatgaaagcctggtcagccaagaacagccgctataaccttatccttgtctccggtatcctggcagcagggggaacattgggctttgccttgtcgtcaggtaggattagccacttatatcgtatagcaattgcaccatttaatctcaggtgtcctctgtctaaattggaccattcccgagtatccctacaacgaggatgagatggaggaatttgagatcgaagaggagcgccgacgggaggagaaggaagcgcgtgaggagcgccatcaggacgcagtggaggccagggagctgggcatacgtcgacgccgtgccaaagaggccatggagagggaggtggatttgatgcaacgcgacatggatggcggcatcacagacgccgagttggatgaactacagcgcctggccgccgagcgcgaggccttcgagctgtgggagaaggacgaactgaagcggctcgaggagcaggagaaggagcgcgagaagattcggaaggagaaggccaaggtcaaggccgaaagggacaaggagcgcgaaaagaagcgaaaggagaaggaggcgcagctcgagaaggaggaggcggagcgcgagaaagcccgcgaaaaggcgcgcaaggaacgtgaaaaggctgagaaggagaagcaaaaggaaaaggagaaggccgacaaggaggccagaaaggccggctagtatgcacttatactgcactttaatttactttgccagcagtaacaacacaaaagcttggaaaattcattgatcgggcaaatacaaacatcaacaccctgcgaataaagcccccaaaaacactggatatactgttcaataaaaaatcaaaattcgttgctgttggcctgagatctgcattagataattcgcattttttttattgatgccatatataggtaggaatctttggagattttttaatctattctactgtttaccccatagacgctatagttttcttaactaaactagacttgaggcactcaagttttaatcatgcccagcccagatccctggcagaatctaattacatatttggattctgccactttatagactacttaacttgccacatgctggcatttctagtgcaattaagccagcgttctgtttcagccaaaatgaggtgcaataacaaaatgctggatggcccgaagaccgtccatgtacatacatacatacgtatgttgtatgcatttagagtcagtcgggcactctgttggctgtagaggaaatggctcattgcatgtaatcaaaagcagcaaaattgtatctcgtagatagcatacacatagagtgaattcaattgtggcttccattacgcgtcaaagagcgttccaatgttcgcataacaacgaccacttgttgttcgtcgcaataaagtaaggttctttctccgattcgcgtcggcttggtttggcagccccctaatctatttaatgaaaattcgctaccgatagatagatagatataaagcgtttccccagcgatgtatctgcatttgtatctgctgtgctaagtgtgccggcttgtgcgcacataatgaatcacaatcgtcgtcagttaagccaggcttatcattaatcaaattagctgcagcagcagcagtgggcactacaacaaaacacttgcttgtctgccaccgcgttgcagttgcatcttccaagtggcaatgcggcacagtgggccagatcggcgctgtaattaactattaacacgagtgctccgattgtgccacaaatgagcaattgccgagagcttatcaaatggagtagaacaatcaattaactgcaaaagg

SEQ ID NO: 14684 - DNA, 1248 bp, DROSOPHILA
aatttcttatgcagatgtagaatcgtattttttacgaatctatgaaacacactcgtagaaaagtggttcaattcagaaacatttgatattgacatcaaattgagatttttaagtttgtgacgcgaaaaaaattttatattttgctaggcaaacacttggctaagaaaatcaaaggtctcttcccacagagaagggaagtgaagagcaagtaccatgtcccgatttttgatagctaccaaagagcgtctccagaggggattgcgctttggccagatgttgattcataatacggtttctcagcgaatggccgctaaggccacgcctcctgggtcagctaaggcggtcaaggccactccaccgccacccccgtccaccaagccgccacccaaatgtcctggaggcgacaagaatatgaagcggaagccgggctactttgccagcggtggtcagcacgcggtgctcagtgattgcccaaagccggaaggcgactttatgaaagcctggtcagccaagaacagccgctataaccttatccttgtctccggtatcctggcagcagggggaacattgggctttgccttgtcgtcaggtgtcctctgtctaaattggaccattcccgagtatccctacaacgaggatgagatggaggaatttgagatcgaagaggagcgccgacgggaggagaaggaagcgcgtgaggagcgccatcaggacgcagtggaggccagggagctgggcatacgtcgacgccgtgccaaagaggccatggagagggaggtggatttgatgcaacgcgacatggatggcggcatcacagacgccgagttggatgaactacagcgcctggccgccgagcgcgaggccttcgagctgtgggagaaggacgaactgaagcggctcgaggagcaggagaaggagcgcgagaagattcggaaggagaaggccaaggtcaaggccgaaagggacaaggagcgcgaaaagaagcgaaaggagaaggaggcgcagctcgagaaggaggaggcggagcgcgagaaagcccgcgaaaaggcgcgcaaggaacgtgaaaaggctgagaaggagaagcaaaaggaaaaggagaaggccgacaaggaggccagaaaggccggctagtatgcacttatactgcactttaatttactttgccagcagtaacaacacaaaagcttggaaaattcattgatcgggcaaatacaaacatcaacaccctgcgaataaagcccccaaaaa

SEQ ID NO: 14685 - protein, 305 aa, DROSOPHILA
MSRFLIATKERLQRGLRFGQMLIHNTVSQRMAAKATPPGSAKAVKATPPPPPSTKPPPKCPGGDKNMKRKPGYFASGGQHAVLSDCPKPEGDFMKAWSAKNSRYNLILVSGILAAGGTLGFALSSGVLCLNWTIPEYPYNEDEMEEFEIEEERRREEKEAREERHQDAVEARELGIRRRRAKEAMEREVDLMQRDMDGGITDAELDELQRLAAEREAFELWEKDELKRLEEQEKEREKIRKEKAKVKAERDKEREKKRKEKEAQLEKEEAEREKAREKARKEREKAEKEKQKEKEKADKEARKAG

SEQ ID NO: 14686 - DNA, 3501 bp, DROSOPHILA
caaatcagagggctttggttttgtgtattttttttggcccaaccacctttttttctgtatgggaacaagcgtgaaatctaaatgcgaaactaacttttgacacactactgggacaacagacgcagtgcagcaaagtcggcaagtgcagcaggaacactattaatatgcgaaatttgaattggattcgagtggctgaaaggcccgaggaggggcaacttgtttacccggaagcccactgggcgtgtggtgcgaacgtgtgcagtgcatcttgattaacaaatcaactggaattggaatgcgattgcatgcgattcatcagtaatcggaaatcttggctgcgggccaaatggggtcaccatcaatccagcaatcctgcagtcctgttacccccaaagcaatgcgaagcaccttcgcctccatttaaggcaaataaatccatcagccagggggaatcccaagtaaatgagccttaaagtgggttcatatgtaccggaaagtgatggaagaatgttcaccaatacatggagtggaatccctaccaattgggatggtacagaaatagagttccactccttgtgctatgagctgcaaaattcagtttaatttataaataatgcagtacaagatagaaattactattaggggatgtctcttttgtaatcaattgaatttttgagtgctggatattaaattcatcaaattagtttctcatatagaaatgggaagacacgaatattattaatgacggaagcaattgttaactgcaagtcatttgtactgaaaagtagattagccatctaaaaagtaaacaaatgcgtaagataaaacagtttataggcagcaccgtatgataagaaattaggtttagttccttctcggatttattatcatgccctctctttcgctcgcttatcgctgatatttaaacgcgcgcttctctccacgatcgcacagtcgtcgtcgagccagtgttgcgaaaggtgtgttgtgtgtctgctctccgctgtggtgaagtgtcgatcagctgatttcagcaaacaatttaattgatttgttatcagccggctaattatttacattttatagagtgcaaaatgagtacagccaagtgggagaacaacgaggagattaagatctttcgcgaatatcttcgcataccaacggtgcatccaaatgtggattacagtgagttccaatgggcatgtatatctttatgaggctgcgataagagtaccctgatctttatgaccttgccataaaatgtgtctgctatttatagccgtttgcacggaattcttgaaacgccaggctgccagcttggacctgcccgtggaggttatctatccggtgaacgagcagaatcccgtggtggtgctaaaatggcagggttcccagccggaactgccctccatcattctcaattcgcacacggatgtagtgcccgtttttgaggagaagtggacacacggtccattcagcgcggatctagatgcagagggtcgcatctttgcgcgcggatcgcaggacatgaagtgcgtgggcacccaatatctgggagctgtgcgtgccctcaaggccagtggctatcaacccaagaggacgatctatctcacttatgttccggacgaggaggttggcggccacctgggcatgcgggagctggtaaagagcgactacttcaagaagctcaatgtgggattcagtttcgacgagggaatctctagtgcggatgaaacctacgctctgtactacgctgaacggactctttggcgtgagtaggattgactcatacaaacaatttaagctagccatgttttcctgcagatcttcgtttcaagatcagcggaactgctggtcacggatcactgttgctcccgaatactgctggcgagaagctgaactatgtggtaggcaaaatgatggagttccgcaaatcgcaagtgcaaaaactagctgacgactcatccctcgaaattggtgatgtgaccactgtgaatctcacccaactgaggggcggagtccagagcaacgtggttcccccattgctggaagctgtatttgatatccgcattgccgtcaccgtggatatccctgcctttgagaagcagattcgcgactggtgcgaggaggctggcggcggcattgaactggagtttgagatgaaaaacccctttgtggagccaacaaagattgactcgtcgaatgcctactggctggcctttaagaaagcactcgatgacctgtaaggatgagaagctctgacaaaaggcatggctctgatatcctttctccttgtttctttcagtggcctcaagacacgggttcgtgttttccccggcgccacggacagtcgttatattcgctacgcaggcattccagctctaggattctcgcccattaacaacacccccatcctgctgcacgaccacgatgaattcctgaaagccgatacctatttgcacggcattgaggtttacaagaagctcattcctgccgtagctgatgcttagcgaactcaattcaattatgaaataatgcatttaatgcttacttgtcgatgtttattgtaataactttaaacaagcaggcttataaaaacccatttaaataaacaatgtatgaataaataagccagtccatagtccataccattaatggtgagcaaaaaaaggaaatttaaatgaaaatgaataagtttatggtttactattatggctttgctagataacattaagctcttagcgcaaagatgaaaatccgcaaattgtgggctcttctaatcaagtagcttaaagtcaacaactgataatgccattaagtcaatccacactcagacttcaaaccaaacagcacggtggattacaagtcagttcctttagaaccacggggcattcaactcaaaatgtgcacttgcacggaacaatggaagaacgacgaggaaataatcattttccaggagtatttgcgcattccctcggtgcatccagacgtggactacagtaaggatttgtttttccgctccttggattttgttatccctatttcccttgcagctgcatgcgtggagttcctaaaacgccaggctaacaaacttaatctccgcgtggacgtggtgtatcctgttgtgccttcgaaaccggtggtgattatgaagtggctgggcaagcatcccgagctgaaatccattatattgaactcacacatggacgtggtgcccgtgtttcccgaaaagtggacccatgagccgtttggtgcccacatagacgcccaaggccggatttatgcacgcggtgcccaggacatgaagtccgtgggatgtcagtacatggctgcggtccgtgcactcaaagccagtggctatcagccaaaaaggaccgtatatttgacttttgtgcccgacgaggaaactggcggacacatgggcatggctgaattcgtcaagggtgattacttcaaagccatgaatgtgggctttagcctggacgagggcatcgccagtga

SEQ ID NO: 14687 - DNA, 1290 bp, DROSOPHILA
ccgctgtggtgaagtgtcgatcagctgatttcagcaaacaatttaattgatttgttatcagccggctaattatttacattttatagagtgcaaaatgagtacagccaagtgggagaacaacgaggagattaagatctttcgcgaatatcttcgcataccaacggtgcatccaaatgtggattacaccgtttgcacggaattcttgaaacgccaggctgccagcttggacctgcccgtggaggttatctatccggtgaacgagcagaatcccgtggtggtgctaaaatggcagggttcccagccggaactgccctccatcattctcaattcgcacacggatgtagtgcccgtttttgaggagaagtggacacacggtccattcagcgcggatctagatgcagagggtcgcatctttgcgcgcggatcgcaggacatgaagtgcgtgggcacccaatatctgggagctgtgcgtgccctcaaggccagtggctatcaacccaagaggacgatctatctcacttatgttccggacgaggaggttggcggccacctgggcatgcgggagctggtaaagagcgactacttcaagaagctcaatgtgggattcagtttcgacgagggaatctctagtgcggatgaaacctacgctctgtactacgctgaacggactctttggcatcttcgtttcaagatcagcggaactgctggtcacggatcactgttgctcccgaatactgctggcgagaagctgaactatgtggtaggcaaaatgatggagttccgcaaatcgcaagtgcaaaaactagctgacgactcatccctcgaaattggtgatgtgaccactgtgaatctcacccaactgaggggcggagtccagagcaacgtggttcccccattgctggaagctgtatttgatatccgcattgccgtcaccgtggatatccctgcctttgagaagcagattcgcgactggtgcgaggaggctggcggcggcattgaactggagtttgagatgaaaaacccctttgtggagccaacaaagattgactcgtcgaatgcctactggctggcctttaagaaagcactcgatgacctggcctcaagacacgggttcgtgttttccccggcgccacggacagtcgttatattcgctacgcaggcattccagctctaggattctcgcccattaacaacacccccatcctgctgcacgaccacgatgaattcctgaaagccgatacctatttgcacggcattgaggtttacaagaagctcattcctgccgtagct

SEQ ID NO: 14688 - protein, 359 aa, DROSOPHILA
MSTAKWENNEEIKIFREYLRIPTVHPNVDYTVCTEFLKRQAASLDLPVEVIYPVNEQNPVVVLKWQGSQPELPSIILNSHTDVVPVFEEKWTHGPFSADLDAEGRIFARGSQDMKCVGTQYLGAVRALKASGYQPKRTIYLTYVPDEEVGGHLGMRELVKSDYFKKLNVGFSFDEGISSADETYALYYAERTLWHLRFKISGTAGHGSLLLPNTAGEKLNYVVGKMMEFRKSQVQKLADDSSLEIGDVTTVNLTQLRGGVQSNVVPPLLEAVFDIRIAVTVDIPAFEKQIRDWCEEAGGGIELEFEMKNPFVEPTKIDSSNAYWLAFKKALDDLASRHGFVFSPAPRTVVIFATQAFQL

SEQ ID NO: 14689 - DNA, 8223 bp, DROSOPHILA
gtaaatcctcattgtaacaagcgcccagaatcattgcctcacgcacaagtcgccctgactccagacttcgaaaaagtgcaacgacaacaacagcagcagcagcacaacagaatgccaatgcaaaaaagttgccataaagaaacgacgacgacaacgacgtccccatctccgcatcaccatcgcccaaaaataaatgcaacgccttcgaacggacgatctcccagatacaccctcccccccccccccattccatacagaccctggagatcccaacccgtcggatgcaaggtccgttgttgctgggatgttgctgctgtgctgctgcgtttgctgctgctcccagcaggttcattggcccagctcaaggcgatgcgaaggcaaggaaatcgagcgaagagacacacagcgaaaattgaacgagcaaatcattcagattgcgtcccgcaaactggtttcgagggttacgactgcgatggacggtcgttatcgagtgtatgctacccatgatgcactgaatcatcttgcactcattatcaattcaaaatgagtattacataagcttgcgaatgccctattccttgcacagggataatatttgacttaaaaaagttatttgggttttacatttttattgttttcctgtatatctatataaatattttacctctttccagcttaagtagttacttttaaatacaattatgtcttctattgtaatggacatacataaatatataaatacatataaattgtggacctggaatgctttgattatgctagaagaaagtagctataaatgtgcgatcgtaattataataaataataatagcaatgcaagcgctacctcaatacattaatttattgggttaggcgggttaggtttcttgtcgatgtccaaccctcgttagttgcattaaaataatatttggtgccgttgaaaataaaaataaactagactataatatcatagtattgtacaaatggtgtgataccaaaaattctagcaaagcagggctatgtttccgctctcgtttcccgcgaggaaggctcgattcagtggcaacacggccagtgaggttagcacaccgcggaatgtctccgagcgaagtttggtgatggtgctgaaggcatgggagtgggccacatccgcatagacgcccacgcggttgccagtggttgcatagaccagagatgggccaacgctctgcaggaaatgggcgggttccggtggaggtctataaagaacataatactattagtaactttccatgattgatacgactttatctacgactcacttgagctggtagtgcatgataccatccagggcatgccaaacggccaggctatgatctaaggcggagctaaccaagaactgatcactcggagcggccagctgcagcagatcacattccattggtcgccacgagttgatcaccatgccagtgcgcgtatccagctggacgatgcatcctgacgagagtcccgctgccagccagttgccggaaggggccacagccaggcatctgacagttgcattgggcagagaagcattgcacacccgccactcgttcacgtactcacagctccgggcatccaccatcttgacagtggactccgctgtgccggcaattaccagcggtgaatgggagggcaaacatttgaccactgtgacagcactatgacgaggagcatccagtacggaaagcggtcttcctataaacggatcccacagatgaatgcccgaatcgcaggacaccacatatcgcaaggattccaggaagccaagcgagtttatggacttcttgtgcgccgtgtaagtaaattggcaggcgctcgtcttgcggccatctccttcgctgcgaagtgaccacagcttcacggtcttgtccttggaggcggaaatgaaactgttctcattatccagggcatatatagctctcactgagttcgtgtgtcctacaaacgactgcaggcgaatttgcttgagattaagtgtctgagtgtccttctcattgcgcgtcgtctcattgcgccagtaggccaaccagttgcctttcagatgacgagttttgggcatctggtccagtttatacgccaccatgtcgatgagttccacattgtttctggccacttgcaggcgatttcccacgatctgagtgccaaagctattggcggccagttcgcagcttgcatctacagagtccacatcttgcccagaactcacattggtcgctagttgaattttgctttgtccattgggttgctcgtgttcgtggcataaggttagcacaaaatccagattgctcagtgtcctcttcatgttggcctcgcccaagaagcgcaggaatgtaagataagcggtgtgcgccagctccggtccgaaaacatcccttagctcctccagagctcgttccggctgcgatgcaccaccaacgagcgagagattagcgagatcgcaggcaaagtcatttggcaatccaaaggccttgttgaaaatcaggaaaaatggattgagaagcggctgacacaggtgctcccgcgtcatatccgaacccaagcgaacgctcagagcgtagatcgcatccagaaacttgcgtgccaacagcgaacgtcccagataaccactgggcatcacaaggttggtggagctcaaaaggcgcaaaatgggcagaagtattgcgtctagcattatgtgctgtaggtgctccatgatactggcgtcggttagacacggaaccatgtatttaagcaattgtagcgaactgattatggctccctcgaggctgccagttattcgtttggagcatagactgatgagttcgctgatgtggggaaagtattgcaacagcaaaaagttttccccatagagagctagaaaggacaaagacaaattatgatatttcaatgtgattaagataactatagcttaactcacccgcaatggacatgaggcactccaggacgcgagctgcactccggtcgcccacgaccctcgcgttggcaatgctgaagtaattgagattggctgcatcgggactggaattgaaactggaaccaccatcgtccacctccggtagcaggttctcctgacccacatagcacagggatagcagcttgagcaggttcctggtgatgaatcgggaagtgagcaccggacccaaccgatgcgacagccacaccaaactctcggcactcatctcactgatgcgattgttctgcacggccttggcctccgacaaccgagagatgaccgatgcctgcagggagtccgatgcctccgcttctgactcctccgctggaggaggtagctgctccaccgcctggctgatcagatcaaagctgtccacactcttccgcgaaccaatatcgcagtcaatggcgcttagctgaaaactacgacgaatgccaccggcagtgggacccatgggaatctcaatggtgggcgatcgcggtcctatgggaggtggtaccaatgcgggtggtgtttgactctcctttaaagatagtttatctggcgatattcttgctccatagattagttcgttgatcaccagtttatctggggatccatccgattctcgagcttcctccgcactagccgcactggtgctgggacgcatgtcaaaggagtcaatcgacttgctgtcctgcgttgacgccctgtcgtggtcatcctcgaaggtgaacagctcctcaatgtcgggtttcatttctggtgccacttctgtctgatgaacttcattctctgaggcaaagttaagatttttactcgtccttctgcttccgccactgtgatagtgataaccattgccctgttccggttctttgtagccaccaacagcttcaatcagtggcgctatgaaatgatgcagaaaacagcggagtccaaaacgcacaattagacgaagcaggaaactgtggtgataaagcttcaccgatttccgggacttgaacgaactgctggccgagaaacgaagatggccaccactgttagtggagccattggagccaccgtcgtccggggaactgacactctccacatcgtacagcttgagcagtggttgtagcaaatgctgctgggtttgggatacgcccaatgcctgtgcaatgggatcgaacaggttccaggcagtcaatatcgatgtgcgttcatctctcaaaagatctatgatgtgcggtagcagcaactcaaccggagtaaattgctcataggcaaaggacatgggctctagaagcctctttacatgggcacaacacgacatcaccttgcactcggcgatctttcgttcgaaaagaactctctgccgatccatctccgtgtatctttcacattccctgcctcctttgcagctgaagtgagtttgcagctccagtaacactgcattagcctcaaaagcatgtagagatctgacaagagcgtagacagccatgtagtggctggggaatggaagcaacaaattgctaaacatgggctccaacagctgggcaggatttggcggctgtggcaagccttgatcctcctctccaggctgctccaattgaagcagcaggcgcactactcggcgcactggctttggcagctcctgacgatgcagctgagccaccgtccggcaggcggagagtcgggaatcaaaggttgcagtcaagccatttcccatcagaagaggtcgcaaacgttgcatggcgaagagttcaataatgagacatcccaagacgtggagatcccgctctttcctgacgttcagcagatgctgtagacaattccttttttctcttaagagattctttgacttcggtggtagctcatcaccactggcaaacagttgattcgtgaacgaatgttccgctgagttctgctcgaacatcaagtcactgctgatcatcttctcctcgggattggcagacgcgcgttgttgtgggaatgtgcgtgcgtaaaacgcctccagagtttccagattgtgtagcaaaagagctggattataattctccggcagttcaatgaaatttgtgattgcatagaaattggaagctgatgcggatgcagaactgctgtgaacagagccgcttgatccgtcatcaccaagacgcaaagataggtgagatgatccagttgcactctcagcctgtaggttttccgtacttttggctagacgttttgcaggactggcgtacagctggcttagcctgggtgcggttctactaaaccagggcgtcgcatatcgacgtggaggatgtgcgcttgcaaagagctggacgatgccgcgctggctgagattccggtgctgatccacaagagtaaggcagacattcttcgatttaactgccgctttgccactcagtttgtatctaacatggaatgggaaaattagtaaggactaaataaggtgtcgttcaaagtaaactcacccaaagttgagatcgatccagtgatgcagtcgttcgctcacgtactgcgactccaaggcctcgcggtgcttgcagatgaaatcctccggacaggtggcccaagcaggcagctcgagatccggcaggtcttcgtgaatgctcttgaatatcatgggatctgagtagaactcgggtatgcactcgtctggcgtccattcctggagtcgctgaatggacacaggatactcggcgggcacccagatgggacgcacatgggcgcagagaatggactggggcgttctcctcgccatatatacaaagtaggtgatctcggaaagaaagtcggagacgtgatgaggcgcctgatcaccgattgcttgataactaccgtctgcgctaccatgctggcttgcatgggcgtacatgagatccagatggacatcgcccttgttcaggcgatacttgctctttgtcaaatcccgccatgcgcctcctccgcgtccactaaagtcagtaacccagggcatgatgtggtggtaggcggcattggtcagactcctgccgcacgcattgttcaggatagtaaggtagtcgaagttggacaactgaccattgcaccacatctcggtatattcgcgcaagttgaagtgggcgggatcgtaggcgaatcgcaggtcgaacatggtgctgctggagggtagtgcttgctgcgcctccctagcctctcccaaatcctcgctgaccagcggcgtaaggggcgacatgtcctccccagccggatcatcgtccagcagattacactgcagccgtggaagcacttgcagccagagattttcgcgcagcacaatatcctgcagacgcagatcacccagaaaaagtccctgtccttggagatgctttgccagctgcagaatctggtagatcacaaacagtgtcttgttgtaattcttccccaacaatgccggactgaaggtgatgcaatcgtagaggctgcattccagagctggaggataaaagaagacgctgatgtgcgtggaggtctctatggccaccagggcgggcaagacgttggcatgacagctgcctgcggaacaagatgtagcattcgatgagtcactaactccgtcacgatctagctgacagtgcagcacggggcaacgatacacccgctggatgagctctttgagcaccacatcatgcggttgtagctggccttggccacttggtggcttcgtcgagggcgctgacggggttgatctgcacattcggacatgggcgccattgtacttcctgtaagcctcctcccatagctgcttgaagttgctgtgagccacaaaggatactgcctgcgagtaggagagtggcaattcggatgaaggcgcatccccagagatcctaggcagcgggtacacccttgactgcggctgcttcctatacgtctggaccaaaatcctcgtccacggatgctccaactgcccaatgggataggacctgcgatccagcagtggccaactgggaaagtgtgttagccgcctattgcgctccagcgattgcagccacgccttgtcgcagatcacttggaatctaccatcgccgcctgcctcacaaacatgttgcggatccactccgatttctggccaaatctgttcgctgtcgcccatttttcatatggggggtgctcgaaattggcaatcttgcgatttcaatccgctgctgcctgccaccgcggttcgatcacattttccgactggggcgaggttcgatcttattcagccatggctttttgggcttaagctcggcgatttgttgggtgtttcgataattttttcttatcttatcaaagaatgctactattttttttcgcgaacttgaggaatcagctgttgatcagtgtgaccagtcggagtgttgtgaaaaatattgcacataaagactgaatggtattttaggtcagttcagttttagaacattgggcgccaaaatttaaatttggcttttacagaaattattaaaaatgtatcaaattgaaataaaaacaaaatcgtctttttatagttctgatttatggaaatacatcaaatacgggaaacaaccaaaattatgacttattattataaaccgcgattttgtaaattgcgcaagtaaatgtatgaaaatcaagaaaaccataatttcaattgcttacagtgctcatatcttgtactatttatttattactactagaataatattcaaatattgttaaggaagcattcgaacaatatgctaaagtccacaaaaacgtgtgtttgtatttgccccgctgaacaaacatgctcattttcaaacgaagtcaacaacttgcatgtaagcttggcatgcgacgcatgtgcgaaacacttgaccgataataaacgcaaaagtaatcaaaggacgtgctattatcagcagttaacttttggaactcgaagaggcgaatatgcacaaatatattgattaaatcaatatgggcttgtatttggattagaacgagtctgctaaacaaatgtctgagcatttccatcgcttatggatttacttgaagttcgtttcagcagaaatgtttatttgttaactcatttaattgcagatttaaggcggattaagaaaaaaagagctgtagcgaagcgcacaactaagttaattttgtttaatgctcatttaaattggttaatcttttgtgtttgctgccctcgtggaaattcccacgctcctctgtccaaatattccgcattctcatccgaaatcctaatcttatcaatgagttgctcggttttgtaatttgccgccttctgcagagcgtctttccccatttct

SEQ ID NO: 14690 - DNA, 6036 bp, DROSOPHILA
agataagaaaaaattatcgaaacacccaacaaatcgccgagcttaagcccaaaaagccatggctgaataagatcgaacctcgccccagtcggaaaatgtgatcgaaccgcggtggcaggcagcagcggattgaaatcgcaagattgccaatttcgagcaccccccatatgaaaaatgggcgacagcgaacagatttggccagaaatcggagtggatccgcaacatgtttgtgaggcaggcggcgatggtagattccaagtgatctgcgacaaggcgtggctgcaatcgctggagcgcaataggcggctaacacactttcccagttggccactgctggatcgcaggtcctatcccattgggcagttggagcatccgtggacgaggattttggtccagacgtataggaagcagccgcagtcaagggtgtacccgctgcctaggatctctggggatgcgccttcatccgaattgccactctcctactcgcaggcagtatcctttgtggctcacagcaacttcaagcagctatgggaggaggcttacaggaagtacaatggcgcccatgtccgaatgtgcagatcaaccccgtcagcgccctcgacgaagccaccaagtggccaaggccagctacaaccgcatgatgtggtgctcaaagagctcatccagcgggtgtatcgttgccccgtgctgcactgtcagctagatcgtgacggagttagtgactcatcgaatgctacatcttgttccgcaggcagctgtcatgccaacgtcttgcccgccctggtggccatagagacctccacgcacatcagcgtcttcttttatcctccagctctggaatgcagcctctacgattgcatcaccttcagtccggcattgttggggaagaattacaacaagacactgtttgtgatctaccagattctgcagctggcaaagcatctccaaggacagggactttttctgggtgatctgcgtctgcaggatattgtgctgcgcgaaaatctctggctgcaagtgcttccacggctgcagtgtaatctgctggacgatgatccggctggggaggacatgtcgccccttacgccgctggtcagcgaggatttgggagaggctagggaggcgcagcaagcactaccctccagcagcaccatgttcgacctgcgattcgcctacgatcccgcccacttcaacttgcgcgaatataccgagatgtggtgcaatggtcagttgtccaacttcgactaccttactatcctgaacaatgcgtgcggcaggagtctgaccaatgccgcctaccaccacatcatgccctgggttactgactttagtggacgcggaggaggcgcatggcgggatttgacaaagagcaagtatcgcctgaacaagggcgatgtccatctggatctcatgtacgcccatgcaagccagcatggtagcgcagacggtagttatcaagcaatcggtgatcaggcgcctcatcacgtctccgactttctttccgagatcacctactttgtatatatggcgaggagaacgccccagtccattctctgcgcccatgtgcgtcccatctgggtgcccgccgagtatcctgtgtccattcagcgactccaggaatggacgccagacgagtgcatacccgagttctactcagatcccatgatattcaagagcattcacgaagacctgccggatctcgagctgcctgcttgggccacctgtccggaggatttcatctgcaagcaccgcgaggccttggagtcgcagtacgtgagcgaacgactgcatcactggatcgatctcaactttggatacaaactgagtggcaaagcggcagttaaatcgaagaatgtctgccttactcttgtggatcagcaccggaatctcagccagcgcggcatcgtccagctctttgcaagcgcacatcctccacgtcgatatgcgacgccctggtttagtagaaccgcacccaggctaagccagctgtacgccagtcctgcaaaacgtctagccaaaagtacggaaaacctacaggctgagagtgcaactggatcatctcacctatctttgcgtcttggtgatgacggatcaagcggctctgttcacagcagttctgcatccgcatcagcttccaatttctatgcaatcacaaatttcattgaactgccggagaattataatccagctcttttgctacacaatctggaaactctggaggcgttttacgcacgcacattcccacaacaacgcgcgtctgccaatcccgaggagaagatgatcagcagtgacttgatgttcgagcagaactcagcggaacattcgttcacgaatcaactgtttgccagtggtgatgagctaccaccgaagtcaaagaatctcttaagagaaaaaaggaattgtctacagcatctgctgaacgtcaggaaagagcgggatctccacgtcttgggatgtctcattattgaactcttcgccatgcaacgtttgcgacctcttctgatgggaaatggcttgactgcaacctttgattcccgactctccgcctgccggacggtggctcagctgcatcgtcaggagctgccaaagccagtgcgccgagtagtgcgcctgctgcttcaattggagcagcctggagaggaggatcaaggcttgccacagccgccaaatcctgcccagctgttggagcccatgtttagcaatttgttgcttccattccccagccactacatggctgtctacgctcttgtcagatctctacatgcttttgaggctaatgcagtgttactggagctgcaaactcacttcagctgcaaaggaggcagggaatgtgaaagatacacggagatggatcggcagagagttcttttcgaacgaaagatcgccgagtgcaaggtgatgtcgtgttgtgcccatgtaaagaggcttctagagcccatgtcctttgcctatgagcaatttactccggttgagttgctgctaccgcacatcatagatcttttgagagatgaacgcacatcgatattgactgcctggaacctgttcgatcccattgcacaggcattgggcgtatcccaaacccagcagcatttgctacaaccactgctcaagctgtacgatgtggagagtgtcagttccccggacgacggtggctccaatggctccactaacagtggtggccatcttcgtttctcggccagcagttcgttcaagtcccggaaatcggtgaagctttatcaccacagtttcctgcttcgtctaattgtgcgttttggactccgctgttttctgcatcatttcatagcgccactgattgaagctgttggtggctacaaagaaccggaacagggcaatggttatcactatcacagtggcggaagcagaaggacgagtaaaaatcttaactttgcctcagagaatgaagttcatcagacagaagtggcaccagaaatgaaacccgacattgaggagctgttcaccttcgaggatgaccacgacagggcgtcaacgcaggacagcaagtcgattgactcctttgacatgcgtcccagcaccagtgcggctagtgcggaggaagctcgagaatcggatggatccccagataaactggtgatcaacgaactaatctatggagcaagaatatcgccagataaactatctttaaaggagagtcaaacaccacccgcattggtaccacctcccataggaccgcgatcgcccaccattgagattcccatgggtcccactgccggtggcattcgtcgtagttttcagctaagcgccattgactgcgatattggttcgcggaagagtgtggacagctttgatctgatcagccaggcggtggagcagctacctcctccagcggaggagtcagaagcggaggcatcggactccctgcaggcatcggtcatctctcggttgtcggaggccaaggccgtgcagaacaatcgcatcagtgagatgagtgccgagagtttggtgtggctgtcgcatcggttgggtccggtgctcacttcccgattcatcaccaggaacctgctcaagctgctatccctgtgctatgtgggtcaggagaacctgctaccggaggtggacgatggtggttccagtttcaattccagtcccgatgcagccaatctcaattacttcagcattgccaacgcgagggtcgtgggcgaccggagtgcagctcgcgtcctggagtgcctcatgtccattgcggctctctatggggaaaactttttgctgttgcaatactttccccacatcagcgaactcatcagtctatgctccaaacgaataactggcagcctcgagggagccataatcagttcgctacaattgcttaaatacatggttccgtgtctaaccgacgccagtatcatggagcacctacagcacataatgctagacgcaatacttctgcccattttgcgccttttgagctccaccaaccttgtgatgcccagtggttatctgggacgttcgctgttggcacgcaagtttctggatgcgatctacgctctgagcgttcgcttgggttcggatatgacgcgggagcacctgtgtcagccgcttctcaatccatttttcctgattttcaacaaggcctttggattgccaaatgactttgcctgcgatctcgctaatctctcgctcgttggtggtgcatcgcagccggaacgagctctggaggagctaagggatgttttcggaccggagctggcgcacaccgcttatcttacattcctgcgcttcttgggcgaggccaacatgaagaggacactgagcaatctggattttgtgctaaccttatgccacgaacacgagcaacccaatggacaaagcaaaattcaactagcgaccaatgtgagttctgggcaagatgtggactctgtagatgcaagctgcgaactggccgccaatagctttggcactcagatcgtgggaaatcgcctgcaagtggccagaaacaatgtggaactcatcgacatggtggcgtataaactggaccagatgcccaaaactcgtcatctgaaaggcaactggttggcctactggcgcaatgagacgacgcgcaatgagaaggacactcagacacttaatctcaagcaaattcgcctgcagtcgtttgtaggacacacgaactcagtgagagctatatatgccctggataatgagaacagtttcatttccgcctccaaggacaagaccgtgaagctgtggtcacttcgcagcgaaggagatggccgcaagacgagcgcctgccaatttacttacacggcgcacaagaagtccataaactcgcttggcttcctggaatccttgcgatatgtggtgtcctgcgattcgggcattcatctgtgggatccgtttataggaagaccgctttccgtactggatgctcctcgtcatagtgctgtcacagtggtcaaatgtttgccctcccattcaccgctggtaattgccggcacagcggagtccactgtcaagatggtggatgcccggagctgtgagtacgtgaacgagtggcgggtgtgcaatgcttctctgcccaatgcaactgtcagatgcctggctgtggccccttccggcaactggctggcagcgggactctcgtcaggatgcatcgtccagctggatacgcgcactggcatggtgatcaactcgtggcgaccaatggaatgtgatctgctgcagctggccgctccgagtgatcagttcttggttagctccgccttagatcatagcctggccgtttggcatgccctggatggtatcatgcactaccagctcaaacctccaccggaacccgcccatttcctgcagagcgttggcccatctctggtctatgcaaccactggcaaccgcgtgggcgtctatgcggatgtggcccactcccatgccttcagcaccatcaccaaacttcgctcggagacattccgcggtgtgctaacctcactggccgtgttgccactgaatcgagccttcctcgcgggaaacgagagcggaaacatagccctgctttgctag

SEQ ID NO: 14691 - protein, 1953 aa, DROSOPHILA
MGDSEQIWPEIGVDPQHVCEAGGDGRFQVICDKAWLQSLERNRRLTHFPSWPLLDRRSYPIGQLEHPWTRILVQTYRKQPQSRVYPLPRISGDAPSSELPLSYSQAVSFVAHSNFKQLWEEAYRKYNGAHVRMCRSTPSAPSTKPPSGQGQLQPHDVVLKELIQRVYRCPVLHCQLDRDGVSDSSNATSCSAGSCHANVLPALVAIETSTHISVFFYPPALECSLYDCITFSPALLGKNYNKTLFVIYQILQLAKHLQGQGLFLGDLRLQDIVLRENLWLQVLPRLQCNLLDDDPAGEDMSPLTPLVSEDLGEAREAQQALPSSSTMFDLRFAYDPAHFNLREYTEMWCNGQLSNFDYLTILNNACGRSLTNAAYHHIMPWVTDFSGRGGGAWRDLTKSKYRLNKGDVHLDLMYAHASQHGSADGSYQAIGDQAPHHVSDFLSEITYFVYMARRTPQSILCAHVRPIWVPAEYPVSIQRLQEWTPDECIPEFYSDPMIFKSIHEDLPDLELPAWATCPEDFICKHREALESQYVSERLHHWIDLNFGYKLSGKAAVKSKNVCLTLVDQHRNLSQRGIVQLFASAHPPRRYATPWFSRTAPRLSQLYASPAKRLAKSTENLQAESATGSSHLSLRLGDDGSSGSVHSSSASASASNFYAITNFIELPENYNPALLLHNLETLEAFYARTFPQQRASANPEEKMISSDLMFEQNSAEHSFTNQLFASGDELPPKSKNLLREKRNCLQHLLNVRKERDLHVLGCLIIELFAMQRLRPLLMGNGLTATFDSRLSACRTVAQLHRQELPKPVRRVVRLLLQLEQPGEEDQGLPQPPNPAQLLEPMFSNLLLPFPSHYMAVYALVRSLHAFEANAVLLELQTHFSCKGGRECERYTEMDRQRVLFERKIAECKVMSCCAHVKRLLEPMSFAYEQFTPVELLLPHIIDLLRDERTSILTAWNLFDPIAQALGVSQTQQHLLQPLLKLYDVESVSSPDDGGSNGSTNSGGHLRFSASSSFKSRKSVKLYHHSFLLRLIVRFGLRCFLHHFIAPLIEAVGGYKEPEQGNGYHYHSGGSRRTSKNLNFASENEVHQTEVAPEMKPDIEELFTFEDDHDRASTQDSKSIDSFDMRPSTSAASAEEARESDGSPDKLVINELIYGARISPDKLSLKESQTPPALVPPPIGPRSPTIEIPMGPTAGGIRRSFQLSAIDCDIGSRKSVDSFDLISQAVEQLPPPAEESEAEASDSLQASVISRLSEAKAVQNNRISEMSAESLVWLSHRLGPVLTSRFITRNLLKLLSLCYVGQENLLPEVDDGGSSFNSSPDAANLNYFSIANARVVGDRSAARVLECLMSIAALYGENFLLLQYFPHISELISLCSKRITGSLEGAIISSLQLLKYMVPCLTDASIMEHLQHIMLDAILLPILRLLSSTNLVMPSGYLGRSLLARKFLDAIYALSVRLGSDMTREHLCQPLLNPFFLIFNKAFGLPNDFACDLANLSLVGGASQPERALEELRDVFGPELAHTAYLTFLRFLGEANMKRTLSNLDFVLTLCHEHEQPNGQSKIQLATNVSSGQDVDSVDASCELAANSFGTQIVGNRLQVARNNVELIDMVAYKLDQMPKTRHLKGNWLAYWRNETTRNEKDTQTLNLKQIRLQSFVGHTNSVRAIYALDNENSFISASKDKTVKLWSLRSEGDGRKTSACQFTYTAHKKSINSLGFLESLRYVVSCDSGIHLWDPFIGRPLSVLDAPRHSAVTVVKCLPSHSPLVIAGTAESTVKMVDARSCEYVNEWRVCNASLPNATVRCLAVAPSGNWLAAGLSSGCIVQLDTRTGMVINSWRPMECDLLQLAAPSDQFLVSSALDHSLAVWHALDGIMHYQLKPPPEPAHFLQSVGPSLVYATTGNRVGVYADVAHSHAFSTITKLRSETFRGVLTSLAVLPLNRAFLAGNESGNIALLC

SEQ ID NO: 14692 - DNA, 5001 bp, DROSOPHILA
accagaggagccggcggaggtgaaaacggaagtgctggcagcagaggacgctctcaccaatccgggctatcccattctcgggctgcaggaggaacagatcctgctagactctgacatgtactacgaggacttcggcgacatggacgtgggctgtcaggaggaggtgttcggcgactttgtcgtcaacgaggaggaggtttacaccgatgcgctcatctagatctaggtactaagatttggccatagtttacgaaagtaattcatatttacattgaaaggcacgacagttcttaactacgtttggatcacaaaatgtgctgaccgcactttttttatacacttaattttgtttaatgatgtcgtgtggtattacagagaagacatttgtcggaagtgttccaaaagtacttaactcacagtttatcgttgttaggttaccatgtaggattcccagagcacacaacaaaccttcaaagtttcaactcggtacgcgaaagatcagttacttatctattaaccatggaaccaccaagaaccttttttttttttactaatcataagatcaaaagcgattttgtgagcattcccagtacaacttgtggcacattttgggcaaccgaaagcgaaattccagttttgtatctcatatcacacgaagcccacacgactaaagaagattgtccaggaaatggacgtattgtatttgcatagtatcttacaaagatattacattttgttagtattaagccctactttatgctgctcattttacatcccaagggatatacccttacccaagttggagccacaacgactccaactattccacgtcgcgtatttcccagaatcgcctgaagagattacattaatcgttatatttaagcacgcagacttgtcttttttgggtaaggcttttgatttattcactgttctaacagtggaactctggtaagaggtacaggatcataatggtttttattgtattcatttgtgtggactcttaaatcctagtgaaatttcccgctgcagaagcgcccatcttgtcaggttcattcaaatccagtgtgggatccgtctccaccactccgaacatcccaggcagtagatagccaccggtcagcggatagcccggatccagttgctcgggcggagcgatgagcacatcgtcaccctggtagacgtagggcaatcggatgatccagtaggcgctctgtgagaggcgaggcggtactatgctgcccatggtgaaggtgtaccttcccacgcacaccttgggatccacgatgatgttgaccggcgccttgggcgtcaccacatggatgcgcatcagctgcgccagaaagttgttctgggatcggcagggacagggataatagagcggcatgttgttgtggactaccatgctgcaggtttcgcgttcgatgtctgctccaccgcgcagcacgcgatctggggcgcacatcatgaaccggtgtccgcgggagcactcgtactccatgccgacgaatattttgagcgaaagcctgtcgccctgcttcttccaccgctgctgcttctttccgtgatgctgctgctggtattgctgcttgggcgcgtgaactagacgcaactggacgtcccagggcagcaggaaattggcgccggacaagaagccgctctggaagtgctcctgcagcccggtattgtggctataaatggaactgggacccacgcaggccagggaccaacttgggaagagcggcagcaggccaaagttgctgacagtgtggaccaagcccggcagatactcagttgtggacgtggaaacggcatgggctggaccggcgtcttcgcgagcctccttcttcgctggctcctggagctcaaccacgagttcgttatccgtgtcggcgctggaggtgccactgcttgtggtattctgctcggaattcaacagttgctcggaactagcctgcgattccttcagtgatgctccaaatccggcaatggacatgtttagatcggacccaaaggtgggcgacaagggctgggagcagcagttgctggcggtattctgaagctgctcttccgtgggttgctcttgctcctgaccctcctcttcctccgcttcatcctcctccgcatcttcgtcttgcggcgcaccactttttccattgttcaacagaggaaatgcagcttcaaaggccgccgcccggtaatcactaaccgatggctcgaaaatggggaactggtactgcttgaccttaacgcacaagttgcacatttgagcaatgtgctcgtagaactcgtagttcgcttgccgcaggttgaacggatcctctcgacggccctgagtgcgaccgcaattgcagctggagatgtggatcactccgctgttgtgcttctcgtgtggcactttcttgggcagtgtgcagggatgggagcgcaggctaagctgctcgcactgctgacgtccatcctgccagtgcttgtggcaaatggatgccagcttcgccagtgccgcctgcgcctgtggaccgcgaccttcctcctcgaaggcaagggtggcctccgccagtagttgtcggtgcgtggcactgccatagttctcgggtgcagcgttcttgtaggcggcgatgcccttctttaggcccagttcgcagaggtgagcccaaaatctgcgatatagtaaagttaaagagcgcataagggtaagtactattaacatactttttctcatagttcaagctctcgtcgaagttcttcaagaagtttttctgtaaagagcagtcaatggtgaacaaggtgccactatagacgtactatgttactcacatattcctcattgctggtttctaggtttggatccttagtgttctccaccagcaacgtgtgcatcgtggccatgcagtcgtgccactctttgctatttaggagttggaacgtaccctgctgggcatgctgcttgaaggaacccgcttcaaagcaacccatcaaggcgtcctgaacgtggcgctccagaaagttccacacggtgtggtccttcttgtactgctgattatcccactccttctcatcgaccggcaaggcgaagggtttgacgaagccatcgaagggagccagcgccaagatctccaggtcttcctcctcctctttgagatccggcttgtacattgtctcattgaggcattcgacggccttcatcagcgtgtcctcacgcaactcttcgtgtgcgttgaagaagacgaactgtttgttattgggaagtgccacaagcgagttgctgctgctattggtcacgatgttgtggtggcgcaacaactcatagatgcagtcctccatctggaactcgtatgtagagacgcattcgcgtgtctttggctcgtcgctcggaaagttttcgaaaaggaagagaatcctgggagtgcaaagtcgtgtgcgctcgctcattctggcggcaggcgtttctctaagcatttgtggcaagaactgcatcaaatgctgttccctggcgaacttggccaattggaacacggtgattagtgtcggatcaaacgtctgcccagtttccacatacaccacaatgtggcaaacgtgcagggccagcagcatcatgcgcacgaagcgacatcgtatcccctcgaagaagctgtcgatgtcgaagggagtatccacatcctctatgcagacatctatcatctggccagcaatctccgcgtcgtaggtgctttcgaagtgcagcagcaggatggaggtacccggcttgtagtaacactgcatctggccgtccttgggtgtgtgctcactaggcggctccatgccgaaagccaccatcttgttggcctggtcgcaatccgaccggccaacgattccgaccactaccagcgaaccgttcagctgcagcagctcctgtctaggaaaagtcatgtatgagatgctctctgcagtttcttcttagacttacgccacattttcgggtatatccgggtaagtccaggtgtagtaatcatccaacattttcgctggaaattgtttacaagattctgcatcagctgtttgagttctgaccacgtacagtaaatatctggcagcactgtcttaaatgatatcgatagcgatgcttccgatatatttcagttacttggcgcgtttttttaaaattacgtcccttaccaatagctgaaatatacatttggtaataaaaatccaaataatttgttgtctaaagcaattaaatctttattgtaaacttttcttttgcgttttataaatattttccgctagcccttcattacagctctccgcactattttagcgtacgtttttgtgtgtgcttttcgatttgcttttaaatgagagttatgtgcatgattaggtgtgaatgctttaatgctaaactcgcttaaataatcgttttatgcgttctcttaatgttgcaatggaataatgcggtgattaatttgttgatactagtatgcaaatagcaatttttaagaagatactaatacgtttacgatctggtagagagaaatagggttcgatagtctaggtgtgctaaagctgaatcataatagcgtatcttttctcctccgcctttgttgagcacaattaaaatacttttacgttatgtttcgattgctacaaattgtttagacactactacaaagaggtgtagattccgtggagtgaagaagtgttgatgcttttcgtgggtatttacaaatttttgagaatcgagctgtatgggattcgttaattattttatttacaactatttcgtgtagtctgggttttctaaaatgcagctgtttcttataggttgtgaataatgttccttttaattcgagaacaaagttttttgatgtgtggttaaaattccgttttgccaggccgtactgtgcttctgtattccatatccgtttgtacttgttgactgcgcatacaagaccttcctcctccacgttttggcagtgaacctgagctttcatctttgacttggtgatcgcacactttacatacaaa

SEQ ID NO: 14693 - DNA, 2840 bp, DROSOPHILA
cgaaaatgttggatgattactacacctggacttacccggatatacccgaaaatgtggcacaggagctgctgcagctgaacggttcgctggtagtggtcggaatcgttggccggtcggattgcgaccaggccaacaagatggtggctttcggcatggagccgcctagtgagcacacacccaaggacggccagatgcagtgttactacaagccgggtacctccatcctgctgctgcacttcgaaagcacctacgacgcggagattgctggccagatgatagatgtctgcatagaggatgtggatactcccttcgacatcgacagcttcttcgaggggatacgatgtcgcttcgtgcgcatgatgctgctggccctgcacgtttgccacattgtggtgtatgtggaaactgggcagacgtttgatccgacactaatcaccgtgttccaattggccaagttcgccagggaacagcatttgatgcagttcttgccacaaatgcttagagaaacgcctgccgccagaatgagcgagcgcacacgactttgcactcccaggattctcttccttttcgaaaactttccgagcgacgagccaaagacacgcgaatgcgtctctacatacgagttccagatggaggactgcatctatgagttgttgcgccaccacaacatcgtgaccaatagcagcagcaactcgcttgtggcacttcccaataacaaacagttcgtcttcttcaacgcacacgaagagttgcgtgaggacacgctgatgaaggccgtcgaatgcctcaatgagacaatgtacaagccggatctcaaagaggaggaggaagacctggagatcttggcgctggctcccttcgatggcttcgtcaaacccttcgccttgccggtcgatgagaaggagtgggataatcagcagtacaagaaggaccacaccgtgtggaactttctggagcgccacgttcaggacgccttgatgggttgctttgaagcgggttccttcaagcagcatgcccagcagggtacgttccaactcctaaatagcaaagagtggcacgactgcatggccacgatgcacacgttgctggtggagaacactaaggatccaaacctagaaaccagcaatgaggaatataaaaacttcttgaagaacttcgacgagagcttgaactatgagaaaaaattttgggctcacctctgcgaactgggcctaaagaagggcatcgccgcctacaagaacgctgcacccgagaactatggcagtgccacgcaccgacaactactggcggaggccacccttgccttcgaggaggaaggtcgcggtccacaggcgcaggcggcactggcgaagctggcatccatttgccacaagcactggcaggatggacgtcagcagtgcgagcagcttagcctgcgctcccatccctgcacactgcccaagaaagtgccacacgagaagcacaacagcggagtgatccacatctccagctgcaattgcggtcgcactcagggccgtcgagaggatccgttcaacctgcggcaagcgaactacgagttctacgagcacattgctcaaatgtgcaacttgtgcgttaaggtcaagcagtaccagttccccattttcgagccatcggttagtgattaccgggcggcggcctttgaagctgcatttcctctgttgaacaatggaaaaagtggtgcgccgcaagacgaagatgcggaggaggatgaagcggaggaagaggagggtcaggagcaagagcaacccacggaagagcagcttcagaataccgccagcaactgctgctcccagcccttgtcgcccacctttgggtccgatctaaacatgtccattgccggatttggagcatcactgaaggaatcgcaggctagttccgagcaactgttgaattccgagcagaataccacaagcagtggcacctccagcgccgacacggataacgaactcgtggttgagctccaggagccagcgaagaaggaggctcgcgaagacgccggtccagcccatgccgtttccacgtccacaactgagtatctgccgggcttggtccacactgtcagcaactttggcctgctgccgctcttcccaagttggtccctggcctgcgtgggtcccagttccatttatagccacaataccgggctgcaggagcacttccagagcggcttcttgtccggcgccaatttcctgctgccctgggacgtccagttgcgtctagttcacgcgcccaagcagcaataccagcagcagcatcacggaaagaagcagcagcggtggaagaagcagggcgacaggctttcgctcaaaatattcgtcggcatggagtacgagtgctcccgcggacaccggttcatgatgtgcgccccagatcgcgtgctgcgcggtggagcagacatcgaacgcgaaacctgcagcatggtagtccacaacaacatgccgctctattatccctgtccctgccgatcccagaacaactttctggcgcagctgatgcgcatccatgtggtgacgcccaaggcgccggtcaacatcatcgtggatcccaaggtgtgcgtgggaaggtacaccttcaccatgggcagcatagtaccgcctcgcctctcacagagcgcctactggatcatccgattgccctacgtctaccagggtgacgatgtgctcatcgctccgcccgagcaactggatccgggctatccgctgaccggtggctatctactgcctgggatgttcggagtggtggagacggatcccacactggatttgaatgaacctgacaagatgggcgcttctgcagcgggaaatttcactaggatttaa

SEQ ID NO: 14694 - protein, 944 aa, DROSOPHILA
MLDDYYTWTYPDIPENVAQELLQLNGSLVVVGIVGRSDCDQANKMVAFGMEPPSEHTPKDGQMQCYYKPGTSILLLHFESTYDAEIAGQMIDVCIEDVDTPFDIDSFFEGIRCRFVRMMLLALHVCHIVVYVETGQTFDPTLITVFQLAKFAREQHLMQFLPQMLRETPAARMSERTRLCTPRILFLFENFPSDEPKTRECVSTYEFQMEDCIYELLRHHNIVTNSSSNSLVALPNNKQFVFFNAHEELREDTLMKAVECLNETMYKPDLKEEEEDLEILALAPFDGFVKPFALPVDEKEWDNQQYKKDHTVWNFLERHVQDALMGCFEAGSFKQHAQQGTFQLLNSKEWHDCMATMHTLLVENTKDPNLETSNEEYKNFLKNFDESLNYEKKFWAHLCELGLKKGIAAYKNAAPENYGSATHRQLLAEATLAFEEEGRGPQAQAALAKLASICHKHWQDGRQQCEQLSLRSHPCTLPKKVPHEKHNSGVIHISSCNCGRTQGRREDPFNLRQANYEFYEHIAQMCNLCVKVKQYQFPIFEPSVSDYRAAAFEAAFPLLNNGKSGAPQDEDAEEDEAEEEEGQEQEQPTEEQLQNTASNCCSQPLSPTFGSDLNMSIAGFGASLKESQASSEQLLNSEQNTTSSGTSSADTDNELVVELQEPAKKEAREDAGPAHAVSTSTTEYLPGLVHTVSNFGLLPLFPSWSLACVGPSSIYSHNTGLQEHFQSGFLSGANFLLPWDVQLRLVHAPKQQYQQQHHGKKQQRWKKQGDRLSLKIFVGMEYECSRGHRFMMCAPDRVLRGGADIERETCSMVVHNNMPLYYPCPCRSQNNFLAQLMRIHVVTPKAPVNIIVDPKVCVGRYTFTMGSIVPPRLSQSAYWIIRLPYVYQGDDVLIAPPEQLDPGYPLTGGYLLPGMFGVVETDPTLDLNEPDKMGASAAGNFTRI

SEQ ID NO: 14695 - DNA, 4175 bp, DROSOPHILA
caataccgatgcagagcaggaacatcgaaacgaaggccacatagtccggccaggcgaagcgctgcagctcgcccagcacctcctcgatattcgacatgatgatcactagctacgttagtggtatgtagcggccgctggttgtgggatgtgtccgactctctggtcggtcggtggctcactgagcccagatttgggtgcctctgcttaggcggctgtgattcaattcaattccgctcaattatcaattgtgggctaatttagttcttgcggcggccagggggatgcgactatctttagttaggccggcaggcgggagaattactacacctacgtctccagttccgggaacgttccattgatcatcgctccacttggcggccgctggcacaattcccactgcgttggtaccagatccccttgtagacaattatgtcactgtcacccagtacgcaaactgatctttcaagcaaaaaatcgccaagagcaccggagcacctcaaactgggctccaatcacggccaaatcccggagcttgcccaccgcctgaaccggaagtgaaacgccttatttttactgatgttgcacaagaactgattgggagccatgcgcccgcccgaggtttaccacgtatatagtcattcacagaaccacctggcagagcgccaggagatcggacgtggggttcggagtgggatcaagtgcacgatcaccggcaaatcggtgggagctattatcgcaacactacaaaaaaccggaacatccaagaaagtatttcaaaactatattgatgactttattgaactctaaaataaaaatgaagaagctataagttacataaagccatcagatatatacagataacaatttgaattatatttttacatttatttgaaaaagtacttagctattgtgatacatttaattgctaactcctggttttgttcagtgcggttgtccctcaacttgaacgcatttgcatcaatctcgcagagaaattcattcatttcgaatcaccggcctgcagttcgctcttcagaatccaagaggcggctctcaacgcgatggccaccaccaccgagttgggatttcccgagatcggacggggtagtactttgaaaaatagtccacaaatataattagtaatgcatcaagaaactaactatgtttctatgatccaactatttttgattacttgtgaattttataaacttttaattcatagttcaaaagaatttaaaataatgagaacttaccactagcatctaccacccgcacattggataccccttttaatctgcaaacaaagtgtatgccaatcaacctacatttgaaatcgggatcgcttttaccttaattgcgagtccacaacgctgccgagggcgcatgttccacccggatgatgggatcccaagccaacgtgccgcatcagacactccaggtattgatccgatggacggttgtcgaagaaatctcgctcgaagggaccaaagttggagcactcctgcacgcgcggccaatggatgcggggatgcagtgcagcaaaggcagtagagttgaccagctacaaaggaactgaactaaaaacggccttatggacatatttaatagcttacctcgactgcacttcgaatggcggaaatggtgcaggccacgtcctcttcgctgctaagatagtttggatctattaggggattccttcgcatgtgtctgttaaggagtcccacagatccacgcgactttggttgcaggcagctggagatgaccacgaatccctcctgcgaggaattgtaatagcgtggaaagagcgcccggaatgctggacctttgaaatttgatatggacatcagagcagactcgtcgatggcgccggctccaaagaaggtgatgccgtagggcggggctcccaatcctccatagctgactacatttcccagcactccaaagttccccaagggtcccgaaccagagctcaggtagttgatcaaggtcatgggattcaagagagtgttctggtttagtgtgggtccagtgactcccatcgatacgaaaagcggaagattaaagtggtcgtgcaggttgtggcccaccaaaggcaagctatgctgagcgggaataccaagtttcttcagggcggacacgtctccaattccagatgccatcaggagctgaggagtttggtaagcgccagcgcagaggattagctctcttcttacctcgatgctaaattctttctccctgttctcctcgtccttaatccccacgagaatcgaggtggcttggaggaacggacttggggcaagttgaatccgtttcaccaaagcatccggcagcaggcgcagattggagtgatgtatgaccgggttaaggaactgctgtaccaccgaatgacgcaaaccattcctaatattatacaatgagcgtctaaagatccaatccttgtaggcaaactgcgcctgcgcttcctccaaagcttcagttaatttggagtagcgacggggaatttcgagcatgtctgggttcttgggcttggcggcagccataaaagatctcatttgggcccagctccaatcgctaagattgtggtgatcccgccaggaatcaaaatccggtccatgaccatcgaagtgcagcatgtagttcagattggcggatccacccagtcctttgcccctcgggaggcactgccttcgttcaatgagacctctggaggagtgtttctgtggcacagaaaggaacgaccagtcattgatgcccttctgctgaaaggtggtcagcaagggaatccgactcaggaggccaaactgaccacctgcctcgatgagaagaacactcccattgctgtttttggccagtagcgaggtaagtgtgctgcctccagttccaccacccactggatggtatcagttcatatagtatagtatatgtacatatatagtaatgttacttccttatgcacatcaaccactcaccaatcacgtagtcaaatgcaaagtgccgctccactggtgccaagacattgggtacggagttcttaagcagcgtgccggccaggacaacgatgatggagaggaatcctattacaataccagccaaaaccaggatctctgcaaggaaaaaccctcaagatgcagttgtttacagcaccaggaagcttactttggaatttcatgcccatgctgttccctgcgatgacgaaatcggactagttagcatatgagaaccgactaccgtggacttggtctaatccaattaaagaattcatggggtgagatttggttgggcgccaagtttgaatttcagtgcacgtcggatagagatgagctgttggcgaaagatgggcgcttagtgatgcgtcaccttgaatggaaaaattaggaaaaaaaaatattgattttatttgtttttaattttgtttttaacatacttacacgaaaacttaatttgttaagagaaactattcagctattccacaccagctattctagctcttttccctccaaatcgcatgaactgcacttcgacttgcagattgctatcgatttgttctcatcactggcaaggcaaccgttcgccacctaaattctttgtttttgcagtcggctgctccgaagatcgacggagtcggattatttgatcgactccaagctctgcgagataatatgtgggcctcccttatcactcgccagtggaagccgaagcctgaagccagaacagctgctagtcggtcagcagtggaaacaaaaggcgagctgtaacacaatagatcccgataatcagcagtggaagatcacttggcggagagccccaattcagaacagagcagtctgaacaatgaactagcattagtaccagtgaatcagcagagattagaagaacgttgcactcccgaggagccacaggtgtcccacaatggaggaccagcaggaggagaatatgcagcagctgctaaacttgttgcccaaggatcagcggcagatctttgaggtaagctaaggtaaccaacaaatatccatatactaagatatgcattttttacagatctttatccagtggctcaatggcaagtcctccgggcccattcaattgcaccagaacgccctgctaaccgtgcttcaggcgtcgccctatcccgccctgcaactgctacagttgctccacgaacggtccaaactgca

SEQ ID NO: 14696 - DNA, 1794 bp, DROSOPHILA
atgggcatgaaattccaaaagatcctggttttggctggtattgtaataggattcctctccatcatcgttgtcctggccggcacgctgcttaagaactccgtacccaatgtcttggcaccagtggagcggcactttgcatttgactacgtgattgtgggtggtggaactggaggcagcacacttacctcgctactggccaaaaacagcaatgggagtgttcttctcatcgaggcaggtggtcagtttggcctcctgagtcggattcccttgctgaccacctttcagcagaagggcatcaatgactggtcgttcctttctgtgccacagaaacactcctccagaggtctcattgaacgaaggcagtgcctcccgaggggcaaaggactgggtggatccgccaatctgaactacatgctgcacttcgatggtcatggaccggattttgattcctggcgggatcaccacaatcttagcgattggagctgggcccaaatgagatcttttatggctgccgccaagcccaagaacccagacatgctcgaaattccccgtcgctactccaaattaactgaagctttggaggaagcgcaggcgcagtttgcctacaaggattggatctttagacgctcattgtataatattaggaatggtttgcgtcattcggtggtacagcagttccttaacccggtcatacatcactccaatctgcgcctgctgccggatgctttggtgaaacggattcaacttgccccaagtccgttcctccaagccacctcgattctcgtggggattaaggacgaggagaacagggagaaagaatttagcatcgaggtaagaagagagctaatcctctgcgctggcgcttaccaaactcctcagctcctgatggcatctggaattggagacgtgtccgccctgaagaaacttggtattcccgctcagcatagcttgcctttggtgggccacaacctgcacgaccactttaatcttccgcttttcgtatcgatgggagtcactggacccacactaaaccagaacactctcttgaatcccatgaccttgatcaactacctgagctctggttcgggacccttggggaactttggagtgctgggaaatgtagtcagctatggaggattgggagccccgccctacggcatcaccttctttggagccggcgccatcgacgagtctgctctgatgtccatatcaaatttcaaaggtccagcattccgggcgctctttccacgctattacaattcctcgcaggagggattcgtggtcatctccagctgcctgcaaccaaagtcgcgtggatctgtgggactccttaacagacacatgcgaaggaatcccctaatagatccaaactatcttagcagcgaagaggacgtggcctgcaccatttccgccattcgaagtgcagtcgagctggtcaactctactgcctttgctgcactgcatccccgcatccattggccgcgcgtgcaggagtgctccaactttggtcccttcgagcgagatttcttcgacaaccgtccatcggatcaatacctggagtgtctgatgcggcacgttggcttgggatcccatcatccgggtggaacatgcgccctcggcagcgttgtggactcgcaattaagattaaaaggggtatccaatgtgcgggtggtagatgctagtgtactaccccgtccgatctcgggaaatcccaactcggtggtggtggccatcgcgttgagagccgcctcttggattctgaagagcgaactgcaggccggtgattcgaaatga

SEQ ID NO: 14697 - protein, 597 aa, DROSOPHILA
MGMKFQKILVLAGIVIGFLSIIVVLAGTLLKNSVPNVLAPVERHFAFDYVIVGGGTGGSTLTSLLAKNSNGSVLLIEAGGQFGLLSRIPLLTTFQQKGINDWSFLSVPQKHSSRGLIERRQCLPRGKGLGGSANLNYMLHFDGHGPDFDSWRDHHNLSDWSWAQMRSFMAAAKPKNPDMLEIPRRYSKLTEALEEAQAQFAYKDWIFRRSLYNIRNGLRHSVVQQFLNPVIHHSNLRLLPDALVKRIQLAPSPFLQATSILVGIKDEENREKEFSIEVRRELILCAGAYQTPQLLMASGIGDVSALKKLGIPAQHSLPLVGHNLHDHFNLPLFVSMGVTGPTLNQNTLLNPMTLINYLSSGSGPLGNFGVLGNVVSYGGLGAPPYGITFFGAGAIDESALMSISNFKGPAFRALFPRYYNSSQEGFVVISSCLQPKSRGSVGLLNRHMRRNPLIDPNYLSSEEDVACTISAIRSAVELVNSTAFAALHPRIHWPRVQECSNFGPFERDFFDNRPSDQYLECLMRHVGLGSHHPGGTCALGSVVDSQLRLKGVSNVRVVDASVLPRPISGNPNSVVVAIALRAASWILKSELQAGDSK

SEQ ID NO: 14698 - DNA, 2537 bp, DROSOPHILA
ttggtatttaaaatctggccacaagattttaaataatttgattttgctaatatgctgatattatatatatagttaaagtaaattatttcatttaaagtaccataacacaagataagctgtatgtcataaccccaagtattttcgttaaaatcccgtgttacagaattgctttagcaatttttacggctattttattgtaaaacaatatatctctaaagtttttgactgccattcccagtgatattatagcaacaatgattatatggggaatttgaataatttcgtgctacagaatttatatattttcaagttatttttagtgcaaagaaagctgcttatgatatatgcctctcagttcctaaatatatctcttaaattgtagttcacttacatcgtcaggtgacggaagagttggcagataaaactgcaatatttacttttgtacatatatggcaatctacagattgcacagcttggcaggtaaaatttttctgaataagaagaaacattccgttttttatataaaatgtgcagttgataggagaaaggtgtagttaccggagaaattcaagtggattaagatgcgttatttaggaattattgctctcgtcgctttcctggccatttccactgtgatggcacatccatatgcgaacagtagcactgaagaaggatcaggatccagtaaccgatcgactattcgtcctgtccccagatggcctaagtggggtggaatcggtccagtcattttaaacactccccccactccgtgacaatgaactacggaaagaaattaattgtgaaaccccacaacgaacctttgttgttgtctaaaaaaaaaaatatctccaaaaatacgcttgtaaaactttccattgagacaattgttcaaataccaaagcgtaaataaagatttcgtagtagattctacgaatcggccaaaatttgcgagacttttcctataaatagctgaatgttgtacgaaatgggaaagcagttttcgcgataacttcttagactcaacttcaaaatgcgttccctgattcttgtcgctcttttggccttcttggctgttggctttgtggctgcccgtccagctgaggatgaggagtcctccgctgccgtggttgagaatgccgatgaggattcgactagcaatgatgcggagagcaccgaagccactgatgcggaggaatcttctgatgatgaggagacgactgaagagtctggtgatgccgctgacgaatccagcgatgatgccgatgaggatgagacaaccactgcagcttcggccaagaagcagatccgtcccttctggcccaggttcggaggtcatggtccagttgtgatcaggcgtcaccctagtcttgtctaggtcaaagccctatagtcttgattgcttaactattcctttctattttctaaataaaaaatgttatctttaactcaaactaaaaattcaaacttttctaccaattttctatacaactctatttttttcaaaacaaataaagtgaaatttcaaaaattaagaaaacattaaaagcagctgattcttttgtagcagcagccagtattgtttagaacgttgaagaaatgcgtactttgtgtgctctaagtttgatcgcttttatgggcataaccctaatatctacaaagccattagatgaatctatcaaaccgaaagttttaaggccactaaatcaagcggatttggataaaatgataaaaaacttgcagttgcttgaaaaattagccaatgagacatattattcaccagatcccaccaaaaaggagacatacttaacgcaagatcaaaaggcggaggaaactaaagagccaactggagaggaaaccgaggaaccttctggagaggaaactcacagtcctacgggagaggaaaccaaaagtcaaactggagaagatggcgagttcttcgaagatgaagaggaggaagatgaagcgactgtggataaaccaactgatgtcataccagttaattttctaaaatatcccgagcacgaagctgattttaagtcttatccaaggtttgcaatccttcgaaatggctatgtgcatcacatgaacttggacttttagcgtttacgcaatttcatcacaaattcgagctaatgacgtgttctcaagaacattgtcagttaatgtcgatagatggggaaattccgactacagtcaggtggtttgcacagctgtgactctgaataaaagttagatctgtggtacctatgtatgagtttgttttcctatagctatacctacaaacagtgtgctccgagccacacatttgagtagttttgtttttagttaccaaaatgcgtctctacgttgggttactatcggttttggcccttacttttatgattgccttaatcacgtgtgctgattcatcatctggaaagtcccggaatcgcgaagatcgatttgatctagaaaacgagagctttaataatcaaggaagtgacgagctaattgcgtcatgtgaaagtaaagagagtgtggaaatcaatagctgtcgt

SEQ ID NO: 14699 - DNA, 537 bp, DROSOPHILA
tcgcgataacttcttagactcaacttcaaaatgcgttccctgattcttgtcgctcttttggccttcttggctgttggctttgtggctgcccgtccagctgaggatgaggagtcctccgctgccgtggttgagaatgccgatgaggattcgactagcaatgatgcggagagcaccgaagccactgatgcggaggaatcttctgatgatgaggagacgactgaagagtctggtgatgccgctgacgaatccagcgatgatgccgatgaggatgagacaaccactgcagcttcggccaagaagcagatccgtcccttctggcccaggttcggaggtcatggtccagttgtgatcaggcgtcaccctagtcttgtctaggtcaaagccctatagtcttgattgcttaactattcctttctattttctaaataaaaaatgttatctttaactcaaactaaaaattcaaacttttctaccaattttctatacaactctatttttttcaaaacaaataaagtgaaatttcaaaaattaagaaaa

SEQ ID NO: 14700 - protein, 114 aa, DROSOPHILA
MRSLILVALLAFLAVGFVAARPAEDEESSAAVVENADEDSTSNDAESTEATDAEESSDDEETTEESGDAADESSDDADEDETTTAASAKKQIRPFWPRFGGHGPVVIRRHPSLV

SEQ ID NO: 14701 - DNA, 6750 bp, DROSOPHILA
atctcatagtgtatagaatagcttagataaagaatgtacctacgtgttacgtgtacccagactatagctagtcgaacagggctttaaaatttggcaattcagtgtctaagtatgcgaaaaatctgtaaaaactgttagcacccttgatgcctatgtgtattaaccaaaagatgttaaatttcttgacctctaaatatgacaataccaaccggaaatcaaactacaaatggaaaggcattttccgtacattttcatgaaaccacctgaggcagaaattgctcacacaataaactaaactaactataaatgtactataaaaagtctctatatatttgtagtagttgaatggttaagtagattttatgtgtagaatgaatatttttcaaagaaaatcggagctattttcttaaagttttaaataaagttccaactatttaattgatttcaatactgtgtaataaccaactgagtgtatacatgaaaaatatatttcactaaatagctgcgcaatatagcaatgttgaagtgttataactaaatcattttgttagtatattccaaagacactaaatggcttttatattcgctcattctttattaagagatcttaggttgacatttgtaaaactataaatcacaaagatttatacattttggtatttatttcaaaataaatgcattcactttgttttctattttaactaatggcgaaaaataatataaaagcatggcaaataaaactggcaaaatttaaatattgtgctacttaatatatttctgagttattatccgtttaatagctcattatttaaacttcttttcattgcactttcggcatatcacatctgaacttataatggcaagcataaaactcaaacaaaaattgtacgaaacgatacaagttaatgtacccaaatatatgtatatatatacacttaaagcataggagtttgactagatttggttgggctttccttgattgctatcggtgggtttttccttaggcccgctcgatcattggcgtctggactacatcgtcgttggaaaagatgaccgtaccgtccagagtctcaatggtttgtatagtggtcttacagtaaaagcacaccttggagttcatcatgtgctgcatgatgcagtcgctgcaggactgatgcttgcatggcgtgaaaacggcagtgatgggcttggcgcagcagatcggacacagggagtcctctgatggcagtgtaatgtcggaaagcagagtctgtttcactcgcaggctatcgataagcctgcggacattgtcgatttcttcagaggaaacatgggagggaactgtaaattgatttaaaacgttgatttacttataattattccattaccttttcaatatacttacaatcattaagggcaaacttcaggattggcggatcggcccgaatacgtttggaattattaggcaacggcacacgtacatcgtttgttagcggatcaatgtgcggcctggaagagggatcgaaattaccgcgtggtatattcttctgctccagcagtggcgttcggatttctcccagtgcaaattccagcgtggcaaattggaagctcggatcggtgagaaaagcccgggatacgcgcgttacaatctgaggtctcaaatcgctctccatctcttcctgcattagggctagcaaaatacccaaagcagcagtcacaataggatagtgggtgactgcatttaggtccgccgagcacatgtccaccacgaactggaaacatccgggtggcactgtaacccgcgaaagcacctggctaatcaactgacagatgcgattgagtagcagatcgctatttggacgagattcatcggtgacgatttcaggcgcagttgtgatgaccatttccagacatcgcatcagcgaaacagtcaattcaaagcacatggagcatatcttaagctgcttgggctcaaaaagagtgttttcctgcctctgagcagtgttttgtatctaagaatagtggttaaatatagtttatgtaattcgtattacttaaaccataatcactcacctcctgcagcaataaaataaattcggaaaaagcccagtttagttggctcaacaccgagttcagaaaggcggtggcgaaaggctcatcctccaacaatttggcgccgattaaacgttgaaaatgctttgagggattagcgggagcgacattgtgcagcaatcctgtatgcgtctcgtttctggaacgactgcgacacagtccctggtggaggggcagcgagccaccttgccacacagagggctggcgggaatccttgtaggcatatccctcgcccatccaaaagcgcaatagcagccaattgctctggccccaagctctgttctcataggggcgtagcaaggcacgaaccagactagcctgagacctcttcgaagtacgttccagagctcgtactccggacttgtggcaggtgagcgttcccaaagcttgcagcagtgagtctttgcatgaggcaagcacaatgcgaggatctgctgagtgaatgcctagaaactctgctgcagcgttcacgctgcattccgcatctgaggcctcgaattgagctttcaaatcatggtgactaaagtccattacggcgtccagcagaataggcagtgtattaacatacacctcaggtacaaatgagaacaaagaacccgtatttgaagcagtctgatggatggaaagaataagatcaataaaagataaaattacaaaaaaaaattgcgtaccgtcaaagttcgtaacattcgctctagtagccatatgagcagggatcgcctgtgattgttcagggccactcctcttagccaaacttgcttccttgccagggcaatagagcgtgtctgcaaataggaagaaacatattctaattgcttataaactacttaaataagaataaccaataggcaaactatcaactcacagcaaaaacattctgacgctgactgaacttagaccgtagctcgcccatcacatgctggtgattttcgttcatgcagacattggcatgctgctccaatgccccaagtttacgttcgatatcctcccggtagaacttcgtctccttaagtacttcatttagagctgcgatctcgtctcttaccgtggctatctttactatgtacttgtggcctgccgagtagtaaaagatgatacacaaatcaaggagttcgcacaggctggcctccatatccgcgttgcccggcgaggagtcggtgctgctattgggtcgtgtatttaggaaatgagtgtaggttgtattattggcgccctgagtgtgtcccactacgggcacattgtttatgttttcgcccaaaaggtaaagcgtagtatctgaaattgtgacaagttgtaattattttactgtatgcttcagcatttaaacaaaagttttcgcatacatacccacttcattgacccgcaagttttgcctatcatcttcataaatttgctgagttcgagctgatcccaacctagcatcgatgtcgccccgatgaacttttcttaaatgtgacaagacacctccaacgcgatcaaagtgcatgtagtcaaaggtaccatctatgaaataatcgctgttcacctccacgttctttgtgggcatttcatctttgaacatcgagcgcgtctgatcaataagaatgctagcaaatgcgagggccacaggcgcatcgagtggatgctgaatgctcgattgcataaagaaaaaggcgtggaagggctacatggaggttaaggatctattaaaaccgtgcaaaatcatcattgggcacacttaccctttgctccatgctgagatcgattacgtaacgacgcaatttgctcaaaaatattgagcggcttgacggactttcccttgatccgtccgagttgatcatcagcgtgcagagaagatccttttgcgctgtatacagtggctccgtaactttgcgcaccttctcgacaacattcagatatttttccttggggccatcgatgccctccgtccaggccatactgtcaggcagcagttcctccatgatgtagaactccagtggatgtatgtagaggaaaaatgcaagactaaatgaaaaaattattcgaatttaacactcaggattacacgagttttatcttttatccgtaccagtgctttttgaacagctttccttccagcagatactttctggtctgttcgtgcaggcaaaggcaatgcagcattccgagcgcctggcgatgcttctcatagtccaggccctgtatcgtatgcgtaaaagtacccagcaaagcgttcaccaacttccgcaacacaaacttgatctcgtcgccttccatgtagttccagaagagagataacaagccatggagtacgctgtaggagttttccttctcggacgctaaatttgtcatgctcgagatctttctgagcaggacatcttcgatgatatatggatcaaatatctcattggtgaacttctcaatcagcaaggtggcaaatatgcagtacacggtctttttagtggaaacgcgagcatctgcgccattcgttggtgccatcccagattgggcgttatacttggaaaatatgccagcgaggttgaccaagtagttcatcagcaggttggcccgttgcagcttaaggataggtcgagccattagcggctggaagcccgataccggatacataaagggacgattgccaaagttcgcctcgatgccctgcgtgtagcccaaggagatggctgcgaagaaggagatgcccggacccttttccaacttgttgaacgccacgcccatggaacggccatttcgataatattcgatcacttccttatccacgtcaatagtcacgccaataacgtcgccaatctgccatttgtcgccgtacctaggaaagcaattatatacatataaatcctgaatcaatgttgaataaatggatatcttactttttggtggatatatgccagatctgctgtttgctgccatcgtatccatagctggacttggtatctcccaccccgctgttttcgttaaactggcaggagttggaggcccaaccaatctgcattacgcccttagtgtggaggtggatctgtatataaatgacacgttcttagtacgcacgagcaacccacactcctcaatacgagtcaatgaccggtggtcaaccaccgtcgaatctaccactcattccccaatctttagctactcctcccactccatgtaatagcgattacctcatacatccagcgaccgccgtacacgcaacaattagcccggaccgtgttgaagctgccctgggagcgcagggctaggcgatccgaggatacccgcactgtagtcgtatagtccacatcgaatatggtaagatccgggccaatgcggctctctgtctccatgtacaggcgccgaatctcttcattgctgtcggtctggatttgttggaacttgtcatctagccaggttcgcactatgagcatctgcctaagggaaaggattgtccattgaaaagtttaacctcagcggctaaggacactcctacttggtaactgataaatcggcgagctttgcgggtctcggatccggaaccgtcgagcaattagcgccctccaagtcatcgtccagatccgaatacaggttatcgtggtccacctgctcgaatatatcctcgttgaatactttcacgaataattttgatatcgacattttggctctgtcatttcaatgccagctttctccagccacacaaattcgagtccgattccgagctcgaccgtcacaaaaaggaattctttagctttagggatggtaaactcagacactccttgtgaatctgcttaacggtggcaagtatcgggtcacgcgacaagccgatgattttttaacaaatttgaattttgacaaaatattatacagttttctttctggatatctgacctgtaacaatttgttgccaagctgtatcaaaattctgttatcatagaccgaattttaaaatttaaaaactaatgcaagtttcttgaaatatagatagttgtattaaataagtggaccttgtcattcaaattatgaatttgaatcaatattatgtgtacatacatacaaatttattataacgtaactattgtattgaccccgcaaaatatcgctcacatttgctcctccctaatacttccatcctgctctttggtacagtatgctccatctcgttctaaaggcgctaacaagcagctgttcaaattcaacatcgttgtgcagtactgctcgtcttcaagcgcttcctaacaccgagtgaaacgaaaagtacttctcgatatgtaaggacgtgttttctgtgctctgctagttaagctaattaaattacaagttggcgttgattcatgacaaatgagttaccaaaagaacaactctacgctgcttaaacgtgtgatatttgcgagcagtacagttacctttcggttaattgacaatttgctgtcgtcagcgaccgagtgtttctgatagtggtgtccgacaactagctagatctggcgggaaaaggcttaaaagtgaaacgcaatgaaaacaatgctcataatggcggctgttaaataaataaattagcaatcacacagttgaccttgtgccaataactttgcgtggagagtattaacaattaaatacgctgaaaataaaacagctaactggtcagcgatgcgaagtgaaaccgttaagattatttgttgttgttgcgtg

SEQ ID NO: 14702 - DNA, 4028 bp, DROSOPHILA
aaagctggcattgaaatgacagagccaaaatgtcgatatcaaaattattcgtgaaagtattcaacgaggatatattcgagcaggtggaccacgataacctgtattcggatctggacgatgacttggagggcgctaattgctcgacggttccggatccgagacccgcaaagctcgccgatttatcagttaccaagcagatgctcatagtgcgaacctggctagatgacaagttccaacaaatccagaccgacagcaatgaagagattcggcgcctgtacatggagacagagagccgcattggcccggatcttaccatattcgatgtggactatacgactacagtgcgggtatcctcggatcgcctagccctgcgctcccagggcagcttcaacacggtccgggctaattgttgcgtgtacggcggtcgctggatgtatgagatccacctccacactaagggcgtaatgcagattggttgggcctccaactcctgccagtttaacgaaaacagcggggtgggagataccaagtccagctatggatacgatggcagcaaacagcagatctggcatatatccaccaaaaagtacggcgacaaatggcagattggcgacgttattggcgtgactattgacgtggataaggaagtgatcgaatattatcgaaatggccgttccatgggcgtggcgttcaacaagttggaaaagggtccgggcatctccttcttcgcagccatctccttgggctacacgcagggcatcgaggcgaactttggcaatcgtccctttatgtatccggtatcgggcttccagccgctaatggctcgacctatccttaagctgcaacgggccaacctgctgatgaactacttggtcaacctcgctggcatattttccaagtataacgcccaatctgggatggcaccaacgaatggcgcagatgctcgcgtttccactaaaaagaccgtgtactgcatatttgccaccttgctgattgagaagttcaccaatgagatatttgatccatatatcatcgaagatgtcctgctcagaaagatctcgagcatgacaaatttagcgtccgagaaggaaaactcctacagcgtactccatggcttgttatctctcttctggaactacatggaaggcgacgagatcaagtttgtgttgcggaagttggtgaacgctttgctgggtacttttacgcatacgatacagggcctggactatgagaagcatcgccaggcgctcggaatgctgcattgcctttgcctgcacgaacagaccagaaagtatctgctggaaggaaagctgttcaaaaagcactgtcttgcatttttcctctacatacatccactggagttctacatcatggaggaactgctgcctgacagtatggcctggacggagggcatcgatggccccaaggaaaaatatctgaatgttgtcgagaaggtgcgcaaagttacggagccactgtatacagcgcaaaaggatcttctctgcacgctgatgatcaactcggacggatcaagggaaagtccgtcaagccgctcaatatttttgagcaaattgcgtcgttacgtaatcgatctcagcatggagcaaaggcccttccacgcctttttctttatgcaatcgagcattcagcatccactcgatgcgcctgtggccctcgcatttgctagcattcttattgatcagacgcgctcgatgttcaaagatgaaatgcccacaaagaacgtggaggtgaacagcgattatttcatagatggtacctttgactacatgcactttgatcgcgttggaggtgtcttgtcacatttaagaaaagttcatcggggcgacatcgatgctaggttgggatcagctcgaactcagcaaatttatgaagatgataggcaaaacttgcgggtcaatgaagtggatactacgctttaccttttgggcgaaaacataaacaatgtgcccgtagtgggacacactcagggcgccaataatacaacctacactcatttcctaaatacacgacccaatagcagcaccgactcctcgccgggcaacgcggatatggaggccagcctgtgcgaactccttgatttgtgtatcatcttttactactcggcaggccacaagtacatagtaaagatagccacggtaagagacgagatcgcagctctaaatgaagtacttaaggagacgaagttctaccgggaggatatcgaacgtaaacttggggcattggagcagcatgccaatgtctgcatgaacgaaaatcaccagcatgtgatgggcgagctacggtctaagttcagtcagcgtcagaatgtttttgctacacgctctattgccctggcaaggaagcaagtttggctaagaggagtggccctgaacaatcacaggcgatccctgctcatatggctactagagcgaatgttacgaactttgacgactgcttcaaatacgggttctttgttctcatttgtacctgaggtgtatgttaatacactgcctattctgctggacgccgtaatggactttagtcaccatgatttgaaagctcaattcgaggcctcagatgcggaatgcagcgtgaacgctgcagcagagtttctaggcattcactcagcagatcctcgcattgtgcttgcctcatgcaaagactcactgctgcaagctttgggaacgctcacctgccacaagtccggagtacgagctctggaacgtacttcgaagaggtctcaggctagtctggttcgtgccttgctacgcccctatgagaacagagcttggggccagagcaattggctgctattgcgcttttggatgggcgagggatatgcctacaaggattcccgccagccctctgtgtggcaaggtggctcgctgcccctccaccagggactgtgtcgcagtcgttccagaaacgagacgcatacaggattgctgcacaatgtcgctcccgctaatccctcaaagcattttcaacgtttaatcggcgccaaattgttggaggatgagcctttcgccaccgcctttctgaactcggtgttgagccaactaaactgggctttttccgaatttattttattgctgcaggagatacaaaacactgctcagaggcaggaaaacactctttttgagcccaagcagcttaagatatgctccatgtgctttgaattgactgtttcgctgatgcgatgtctggaaatggtcatcacaactgcgcctgaaatcgtcaccgatgaatctcgtccaaatagcgatctgctactcaatcgcatctgtcagttgattagccaggtgctttcgcgggttacagtgccacccggatgtttccagttcgtggtggacatgtgctcggcggacctaaatgcagtcacccactatcctattgtgactgctgctttgggtattttgctagccctaatgcaggaagagatggagagcgatttgagacctcagattgtaacgcgcgtatcccgggcttttctcaccgatccgagcttccaatttgccacgctggaatttgcactgggagaaatccgaacgccactgctggagcagaagaatataccacgcggtaatttcgatccctcttccaggccgcacattgatccgctaacaaacgatgtacgtgtgccgttgcctaataattccaaacgtattcgggccgatccgccaatcctgaagtttgcccttaatgattttccctcccatgtttcctctgaagaaatcgacaatgtccgcaggcttatcgatagcctgcgagtgaaacagactctgctttccgacattacactgccatcagaggactccctgtgtccgatctgctgcgccaagcccatcactgccgttttcacgccatgcaagcatcagtcctgcagcgactgcatcatgcagcacatgatgaactccaaggtgtgcttttactgtaagaccactatacaaaccattgagactctggacggtacggtcatcttttccaacgacgatgtagtccagacgccaatgatcgagcgggcctaa

SEQ ID NO: 14703 - protein, 1332 aa, DROSOPHILA
MSISKLFVKVFNEDIFEQVDHDNLYSDLDDDLEGANCSTVPDPRPAKLADLSVTKQMLIVRTWLDDKFQQIQTDSNEEIRRLYMETESRIGPDLTIFDVDYTTTVRVSSDRLALRSQGSFNTVRANCCVYGGRWMYEIHLHTKGVMQIGWASNSCQFNENSGVGDTKSSYGYDGSKQQIWHISTKKYGDKWQIGDVIGVTIDVDKEVIEYYRNGRSMGVAFNKLEKGPGISFFAAISLGYTQGIEANFGNRPFMYPVSGFQPLMARPILKLQRANLLMNYLVNLAGIFSKYNAQSGMAPTNGADARVSTKKTVYCIFATLLIEKFTNEIFDPYIIEDVLLRKISSMTNLASEKENSYSVLHGLLSLFWNYMEGDEIKFVLRKLVNALLGTFTHTIQGLDYEKHRQALGMLHCLCLHEQTRKYLLEGKLFKKHCLAFFLYIHPLEFYIMEELLPDSMAWTEGIDGPKEKYLNVVEKVRKVTEPLYTAQKDLLCTLMINSDGSRESPSSRSIFLSKLRRYVIDLSMEQRPFHAFFFMQSSIQHPLDAPVALAFASILIDQTRSMFKDEMPTKNVEVNSDYFIDGTFDYMHFDRVGGVLSHLRKVHRGDIDARLGSARTQQIYEDDRQNLRVNEVDTTLYLLGENINNVPVVGHTQGANNTTYTHFLNTRPNSSTDSSPGNADMEASLCELLDLCIIFYYSAGHKYIVKIATVRDEIAALNEVLKETKFYREDIERKLGALEQHANVCMNENHQHVMGELRSKFSQRQNVFATRSIALARKQVWLRGVALNNHRRSLLIWLLERMLRTLTTASNTGSLFSFVPEVYVNTLPILLDAVMDFSHHDLKAQFEASDAECSVNAAAEFLGIHSADPRIVLASCKDSLLQALGTLTCHKSGVRALERTSKRSQASLVRALLRPYENRAWGQSNWLLLRFWMGEGYAYKDSRQPSVWQGGSLPLHQGLCRSRSRNETHTGLLHNVAPANPSKHFQRLIGAKLLEDEPFATAFLNSVLSQLNWAFSEFILLLQEIQNTAQRQENTLFEPKQLKICSMCFELTVSLMRCLEMVITTAPEIVTDESRPNSDLLLNRICQLISQVLSRVTVPPGCFQFVVDMCSADLNAVTHYPIVTAALGILLALMQEEMESDLRPQIVTRVSRAFLTDPSFQFATLEFALGEIRTPLLEQKNIPRGNFDPSSRPHIDPLTNDVRVPLPNNSKRIRADPPILKFALNDFPSHVSSEEIDNVRRLIDSLRVKQTLLSDITLPSEDSLCPICCAKPITAVFTPCKHQSCSDCIMQHMMNSKVCFYCKTTIQTIETLDGTVIFSNDDVVQTPMIERA

SEQ ID NO: 14704 - DNA, 2466 bp, DROSOPHILA
agggaagccagtgccgccacaattcgcccaatctgcgatagctgccactgccgtcctcgtgacccaagaccggaaatatgaactgcgaggagaagctgcgtccgagcagttctgtaatatttcgcaggatttcgtgctgcttctgctcggagagcggctgagccgaatgggatagggcatctcctgtccacagaacgaactccacattatcgccctgcttggccttcatcgtcttcaccgccgattcaatcagtctccaaggactatcgcagttgtagtgtccaaagggaccaggtggctccgatgccgcactattggcattggagccggaaaccgatcgtgctaactcccagcagcttctgtatatgtcgccctgcgtggagtagagtgtgtcaaggtggaggtcactaatgtgccagaagtagcctgtcaacaaacaagtagaatcaagtaaatgtgttagttaaatacccatagatatatgtaaaagttgttgttttatttgctaagaaaagtttaatctatatcccagttttacacaacaaatttttatgtcctgagcaatttcgtatgtatttccccttcgtaaagtaaggatcgagattagactttgactttggttaagtcgggcaattcctggccgggaaaggccatttcctttcgcggggcattttcccgccggctggtcgagcgacaaaaataagaaaaacctggtagttcaaatggaaatctcctgcagctgactgtttggttggttgactgacctggcccgaatttaactttctacctggtcgcaatacgtgaagtcaaaaagtcaattagcgagtcaacattttgagcgccggccaactccaaggatcagtatcatttggcatgcccagcgatcggtttgccaagagcacgagaagttcgagataggacccagagataccagagataaaggaggcataccttttatgcccggtgagagcacggacggcggagtgaaagatcgagcaggatgagcctgattagactgggactggcgctgctgctcctgctggccaccgtgtcgcagttactgcagccggtccagggacgccgaaagatgtgcggcgaggctctgatccaggcactggatgtgatttgtgttaatggatttacacgccgtgtcaggcggagcagtggtaagtttgggtactatgcatattcgattggcttccatacatctaacttcttttcgacaagcgtctaaggatgctagagtgcgagaccttatccgtaagctacagcagccggatgaggacattgaacaggaaacggaaacgggaaggttaaagcagaagcatacggatgcggatacggagaagggtgtgccaccggccgtcggaagtggacgaaagttgcgacgccatcggcgacgcatcgcccacgagtgttgcaaggagggctgcacctacgacgatatactggactactgcgcctgatgaccaggatggcaaaacaaaacaaataaaaaccagaaaccagatcccaaaaaccaagtaccagatgaacacgacatggctgagattttgtgtggcggcacggggaaaacacccgacgaccggcaggctatttgcaattcattttcctactacacttaacccctaactataaacgtaatcgtatttccaaatatttcattgtaaaatttctagtggaggcaaataaagttactctccaagcagcagcagaaacaaaagaagagtccattgcttttttctacattctacgccctgcagcattccagctgtgaggcatggggaatccccttgttattcaaaccacccgaagccacccaaaccatcgagccacccacaagcagctgccattcagcacctcgagtgcggtgcccttgttttccgagaacaataatgaaaaatatgaatttttaattagatgacgttctgattttaataagcaaaacaaaaggtggagacaaaacgaactcggtaatacactcagattcgaatttacagcttcctttttatccataatttttgttattatcgaaggagcgatatcaaaactagaaaacaacttccaatcagtagcgggattttccgaagataacactctattcaaccgaagggttttgaaatgataataattccgttcttacaggtaaaaatctatactaatacctgtttttttgcggacggaaaaaaggctcagttggcttatcattggcaaaagggacttggggaaaccataaagtatcgaaggtactgagccaagataatgagataacagaaggcgactttattgttttccactcaaaagcaattgaataagttggcactcgtttttaattgaatgggaatgaaataagctctaaaagtgttgttaaaacgtaatggcttttgtgttaatttaaagaatttaagtagttttgaaagtatcattattctttaggtaatttttattacattccaaatttaataa

SEQ ID NO: 14705 - DNA, 405 bp, DROSOPHILA
atgagcctgattagactgggactggcgctgctgctcctgctggccaccgtgtcgcagttactgcagccggtccagggacgccgaaagatgtgcggcgaggctctgatccaggcactggatgtgatttgtgttaatggatttacacgccgtgtcaggcggagcagtgcgtctaaggatgctagagtgcgagaccttatccgtaagctacagcagccggatgaggacattgaacaggaaacggaaacgggaaggttaaagcagaagcatacggatgcggatacggagaagggtgtgccaccggccgtcggaagtggacgaaagttgcgacgccatcggcgacgcatcgcccacgagtgttgcaaggagggctgcacctacgacgatatactggactactgcgcctga

SEQ ID NO: 14706 - protein, 134 aa, DROSOPHILA
MSLIRLGLALLLLLATVSQLLQPVQGRRKMCGEALIQALDVICVNGFTRRVRRSSASKDARVRDLIRKLQQPDEDIEQETETGRLKQKHTDADTEKGVPPAVGSGRKLRRHRRRIAHECCKEGCTYDDILDYCA

SEQ ID NO: 14707 - DNA, 3433 bp, DROSOPHILA
ccttcgacgagaaggaaccctacgtggcacccacaaagatcgacgactccaatccattctggctggctttcaaggctgccaccgatgaactgtaagtctgaatcgaatgctcaacaatgcgtgttcctaatacgatttgtatgtttatagtggccttaagatctaccccattgtctgccccggtgccaccgacagcaggaacattcgagctcagggcattccagccttgggattctcacccatcaaaaataccaccatgcgcatccatgatcacgatgagttcttgggcgccgaaacttatttgaagggcattcaaatatacaagaaaattttgggcaacctagcgaatgtctaaaaactaaatcgaaataatacatgaaaaccttatcaaaataaagattgatgattttgttataagttagtacaaaacttcctggccttttatcttatctcaacgaataccttaatcaacttaagatctgaagaatacaacttgctatccttgcgacagcaagtagataatggatgtatctacattttgctgtatcatcatagatagcaagttggaagactgggaagcccattaaatccaaaataatcacttgattttttcaaatcgaaggtcatcaatcaaagcttcgtcattttaattgaatttgtcataattttacgatatgatggaaaatattgaaaaatacatgacaacttaccaagaacttgaggtttcaaaggttgaggttgcatagataatacgcaatgaactcatttctgtgtaagttgcatagataatacataatgaactatttgccgcttagaaaagttacttattcggataatagacgtgtgggttttgcagataagggcgttactatcgcaaccacatacacttttgataagcatttaaattccttgaccataaacatgaaagcaatcagtgtgattataaaagcacagacaatctttgttgcagctcagttgctgatgacagaagagtgtcgaaatgagctcggaaaagtgggaaaacaatgaggaaattaagattttccgggaatacttgcgtataccaacggtgcatccagatgttgactatagtgaggacttaattttaattctttaaagtttgcgttataatgtctttcaatgtctagctgcctgtgtggagttcctgaaacgtcaggctagctccctaaatcttcctgttgaagtggtttatcctgctgttcaaacgaagcccgttgtgatcatcaagtgggaaggaagtcaacccgaactatcgtccattgttctcaactctcacacggatgtggtgccagtttttcgagagaagtggacccatgaacccttctccgccgatattgatgaagagggtaggatctttgcacggggtactcaggacatgaaatcggtgggcactcagtatctaggagcgattcgcctgctgaaagctagtggcttcaaaccaaaaaggaatttgtatgtgacctttgttcccgacgaagagactggtggtcatctgggcatggcggagtttgttaagacggattactacaagaaaatgaacgcgggattcagcctggacgaaggcgccactagtgaaagtgacgttcatcatttgttctacgccgaacgtttgcgatggggtaagttccataaggatgatgatgatggattggggacattaccgtttcgctttatgcaggactcaagctgaaagtcagtggaacttctggtcatggttcccttttgctacccaatacggcaggagtaaaactgaactatctggtcaacaaactgactgaattccgcacctcgcaagtggagaaccttgcgagagattccagcctcagcaagggcgatgtgaccaccgtgaatctcacccagttaagtggcggagtccagagcaatgtggttccgccacttttcgaggcggtcttcgacatacggattgccattactgtgaatgtggttgcctttgagaaacagattcgcgattggtgcgaggaggcgggtggtggcattgaaattgatttcttccagaaggagccttatataggacccaccaagctggacaattccaatccctactggctagctgtcaaagccgcaatcgatgagctgtaagtaccgactaaaaattaactataatggctaatcgaaatcctcctgtgttttagtggattgaaggttcatcccatcgtttgtcctggcgccactgacagtcgtttcattcgggagaagggtaccccagccattggattctcacccattataaacaccaccatgcggatccatgaccacgacgagtttctgcaggctgatgtgtatcttaatggcattgatgtgtacaagaagattattcgcaatctggctgaagtctaaacaaaatgtttgaactacatggatcgtggctataataaagatgggctaattactaaagtgtgcctcgtatcttcattttagagagtaatcttatcaaaaaaaaaaaaagattcaagagtttaatttgaaattccgtgtttatctcaatattgtttgttgattctttgactttcgcctccttgatcaagatataaatgattctgatgggaattctgtagcagattgtcaactatactgcttcttgtcactacctcgactgccatccaaagtgacttgcaatatagtcagaattggaagagatctgccgcccattgataacgattttcttatcatatacgcataatcacttttgtggcacgatccaaatgcatataaagacagcggatgcctttagctgcttatttctactttaccatcctaacgattcatattaaaaatgagtgccgaaaaatgggaaaagaacgaggaaattcgaatattccgggagtatttgcgaattccatctgtacaccctaatattgattatagtaaggtccttattttaatatttccttaaatgcattagcactattcatttttagctgcttgtgtggagtttattaagcggcaggcagattccctcaatctgcccgtggaagtagtttttccagctgttaaatcaaaacctgtggtgatcattaaatgggaaggaagccagccaaagttgccctcaatcattttaagctcgcacatggacgtggttcctgtattcccggaaatgtggacccatgaacccttctccgccgacatcgacgaggagggtaggatctttgcacgaggtgctcaggacatgaaatcggtgggcactcagtatctaggagctatacgcctgctgagggctgatggctttcagccgaaaaggacgctctatgtaacctttgttcctgacgaggagattggaggcatccatggcatggcagcgttcgttgaaactgacttttacaaacaaatgaatgtgggattcagcttggacgagggtggaactagtgcttctgatgttcatcacttgttctac

SEQ ID NO: 14708 - DNA, 1260 bp, DROSOPHILA
atgagctcggaaaagtgggaaaacaatgaggaaattaagattttccgggaatacttgcgtataccaacggtgcatccagatgttgactatactgcctgtgtggagttcctgaaacgtcaggctagctccctaaatcttcctgttgaagtggtttatcctgctgttcaaacgaagcccgttgtgatcatcaagtgggaaggaagtcaacccgaactatcgtccattgttctcaactctcacacggatgtggtgccagtttttcgagagaagtggacccatgaacccttctccgccgatattgatgaagagggtaggatctttgcacggggtactcaggacatgaaatcggtgggcactcagtatctaggagcgattcgcctgctgaaagctagtggcttcaaaccaaaaaggaatttgtatgtgacctttgttcccgacgaagagactggtggtcatctgggcatggcggagtttgttaagacggattactacaagaaaatgaacgcgggattcagcctggacgaaggcgccactagtgaaagtgacgttcatcatttgttctacgccgaacgtttgcgatggggactcaagctgaaagtcagtggaacttctggtcatggttcccttttgctacccaatacggcaggagtaaaactgaactatctggtcaacaaactgactgaattccgcacctcgcaagtggagaaccttgcgagagattccagcctcagcaagggcgatgtgaccaccgtgaatctcacccagttaagtggcggagtccagagcaatgtggttccgccacttttcgaggcggtcttcgacatacggattgccattactgtgaatgtggttgcctttgagaaacagattcgcgattggtgcgaggaggcgggtggtggcattgaaattgatttcttccagaaggagccttatataggacccaccaagctggacaattccaatccctactggctagctgtcaaagccgcaatcgatgagcttggattgaaggttcatcccatcgtttgtcctggcgccactgacagtcgtttcattcgggagaagggtaccccagccattggattctcacccattataaacaccaccatgcggatccatgaccacgacgagtttctgcaggctgatgtgtatcttaatggcattgatgtgtacaagaagattattcgcaatctggctgaagtctaaacaaaatgtttgaactacatggatcgtggctataataaagatgggctaattact

SEQ ID NO: 14709 - protein, 401 aa, DROSOPHILA
MSSEKWENNEEIKIFREYLRIPTVHPDVDYTACVEFLKRQASSLNLPVEVVYPAVQTKPVVIIKWEGSQPELSSIVLNSHTDVVPVFREKWTHEPFSADIDEEGRIFARGTQDMKSVGTQYLGAIRLLKASGFKPKRNLYVTFVPDEETGGHLGMAEFVKTDYYKKMNAGFSLDEGATSESDVHHLFYAERLRWGLKLKVSGTSGHGSLLLPNTAGVKLNYLVNKLTEFRTSQVENLARDSSLSKGDVTTVNLTQLSGGVQSNVVPPLFEAVFDIRIAITVNVVAFEKQIRDWCEEAGGGIEIDFFQKEPYIGPTKLDNSNPYWLAVKAAIDELGLKVHPIVCPGATDSRFIREKGTPAIGFSPIINTTMRIHDHDEFLQADVYLNGIDVYKKIIRNLAEV

SEQ ID NO: 14710 - DNA, 2582 bp, DROSOPHILA
cgcctccagccagtccaccaccagctggtactcacgcagcgtcgcattgagggcgtacaactgctgtatgacctccttctcgctgccgccgagcgtggggccatcttgcatctcatcatccgcctgcctgtccgtctgcagcaggatgcggtcgtagaagagggcgtgcagcaggcgccacgtgtttatctcctgtcgcagccaggtgagcatagactcgcgttgccgcgcgccctgttccccacccatgccgtgatcgatctccagctccagctgctccaccacgccgcgacagacttgcgtcagcgattggatcacctcgaatgcctcctgcccgttaccctgagcctgcagcacgtcgaagaactgcgggaagagcacgtccatgcggctcttgccccgatccagatcatcgccggtgtcctccatcagcgagagctcattctgctccgcgttgctcttctcgaggatgagcagcgagtgggagagattttgcggcggcatcgagctgttcagcgtcgtgcgtagcaggccactgcggctgctcctcgggaacgggctgtcggccatggctgcactatgcgtttcttggctatcagctacggcacatcaattcaattaatttaatcaaaacagaaattcacgcgctattcgctaaaaatgccgggagcgttcagtgttaccagatgacggaacagcaagaaagctcccttgcacatacacttgtaaataagcgattctcactgaattcaagcaaatttcgtaagaaacaaattgatttaaattgtttacatatctagtaattcggcaaagctgctaaagaataaggtaccagcattccgtagaatcattagtatggggtacctccatcgcgtaccgcaacggcgtacctgaaatgagtaccacaatcgcgtaaagaaattcaaaaggcatttcaaatattaaagatcgataaaaacgtttcttaacgaattaaatattttagatataacaaattctgctacttaatgttgaccgtgtacaaataaatcccaatgatcaggccgtagagaccgagcacctcggcgaaaataaggatcaggatcatgccgataaagaggcgtggctgcagggcaatgtgccgcacgcccacttcgccgacttcacccactgcatatccggcagccagtccagcaaatcccaccgaaagtccagcggccaggtgtacatagccggtgggcagcgagtatttgggagcaggcgctagttccccagataggagcacggataccaccagaccgtatatggcaatgatgcccgccatgaccaccggaatgatggacttcatcaccagctcgggacgcatcaccgctgtggcggcgattccagttccggaaacagcagttccgtaggccgctccagcggaggtcagcacactggagaatacgacgcccatcacgccatagaacggggagtacggcggatagcgatccagcacgattggcgatatactggtttccttcagcttgagactttcaatcagccccggcacgtccaccgaatttgatccgttatacactggcagatagtaatccatttccattttggtagcctttttcgtatttacttgaaaaggaacgatccacgttgcttgctttctggattttccaacttgttagtctgactagcctgtagtttggcaagaaagaaaatccaaggggaacgagatgagcagtttatatttaatattaatattatttaagatgttagggctcaattcaataattttagcaacttgttaagtgaaattaaacactaataataaaacttgcttagatttaggcactcgaaattaaattaaatattattaaatgtttaaaaccttcgaaagatgtaacaatcgattgcggtttgaatttgaagctgcgcggtttatcggtcatcatgctggcgacgtgcacgaaacgcttgcatgacgatatgctgccgtccaatcgtgcaagggccgcccaacataaaacatttttcttttatttgttgtacgcacggcgaagacgcttgcaattgcgattttggctctgcagaattgcgattgggcgatgcgctgcattcgctcgagtcgcagctcctggcagtcgcagctaaccagacaacgggtcggaggacggtacgcgattccggcgacccacggaaccgagcagccaaattcaaaaacaagcgagcaccgaaaacaggaagcaagttattcgcatttcgctggcggcgcataaaatggaacgcagtggacgaatgtggacgagagccctgagagaaacacaaaagcacggaacctgagcaacagcacacaccagtgatataatagtagtctacggaacccctgatccacggcacttcgcatctaatctcacccaaggtacggcattgatttttctccccgcaaacgcgcatttttattatagagaaaatgttcacacgctcgtcgcttgtgttccttgtgatttttgttgtttgatttgcacagccttttggcaagatggccgtgcagctgaaacagagctaccaccacctgcccctgacgatcacgccaatcctgcagcagacgc

SEQ ID NO: 14711 - DNA, 582 bp, DROSOPHILA
atggaaatggattactatctgccagtgtataacggatcaaattcggtggacgtgccggggctgattgaaagtctcaagctgaaggaaaccagtatatcgccaatcgtgctggatcgctatccgccgtactccccgttctatggcgtgatgggcgtcgtattctccagtgtgctgacctccgctggagcggcctacggaactgctgtttccggaactggaatcgccgccacagcggtgatgcgtcccgagctggtgatgaagtccatcattccggtggtcatggcgggcatcattgccatatacggtctggtggtatccgtgctcctatctggggaactagcgcctgctcccaaatactcgctgcccaccggctatgtacacctggccgctggactttcggtgggatttgctggactggctgccggatatgcagtgggtgaagtcggcgaagtgggcgtgcggcacattgccctgcagccacgcctctttatcggcatgatcctgatccttattttcgccgaggtgctcggtctctacggcctgatcattgggatttatttgtacacggtcaacattaagtag

SEQ ID NO: 14712 - protein, 193 aa, DROSOPHILA
MEMDYYLPVYNGSNSVDVPGLIESLKLKETSISPIVLDRYPPYSPFYGVMGVVFSSVLTSAGAAYGTAVSGTGIAATAVMRPELVMKSIIPVVMAGIIAIYGLVVSVLLSGELAPAPKYSLPTGYVHLAAGLSVGFAGLAAGYAVGEVGEVGVRHIALQPRLFIGMILILIFAEVLGLYGLIIGIYLYTVNIK

SEQ ID NO: 14713 - DNA, 4922 bp, DROSOPHILA
aaaataaatgctgtgaaaaaatgtatattgcacataaaataaggaatgctttttggtagttaccattttagttgacattttcttgtatccaatttccagcattggcccattcccatatataataaccgctcccagggcatctattcttcgtgtcagtcagattcactagcttatttccaactattattgccgtggttttgcttgtttcgcttgctcttcgtttttccggctaacgagttttccgctggcttttgtgtatctgcaactttatgtgaacttactgctgcagaagcagccacttgccggcgatctcttgcccaatgcaattcgcatttcaatttttctaaactattggccaatacatttggggcttctcggttcgtatgctcatcgtatgtacgaccgaccatacgattatttatcaccgcaaagagcttgggaaaatccaaatgaaattgcagcatctgcttcttgattgcatgcggcttttctttagtggaattaatgaagcttaattgaagcaacagattgaagatcagcaatctctcgggttggttgacaactttccactaacggtggaaatgccgaaatgcatataacctggcactttcattttcatctgcaattcgattgcctttcgcaaatccccgttttccaggagagaggagcagagccctaatctacggaagactcttgaaaatcggttagacatttgcaattacccgcgggttatgcaataatggtagatacattgcgagaaattgcagagtagcctagttaaatcctgaaaacctaattaataaattacttcatcaatcgtttatgacttaaatatgcttaaaaatatttacaatatcttttttgtaagcatttaattattagactgctctttctttaatttttatttattcaaagtttttattgtttaaatttcttttcctgtgtagcttttagcaattgacatttggaggggctatttgaaaggtgagctcaggtaataatggccgaacagaagcagctggaagcaattgcgaatgagacctcatcagtcaccggattgagacgtcagcccaccaaatatccccacggcctcaacatcacggtgcagaccatcgacgatgataatgagggatctccgaaagatcacagtgactacacccgcgcctccggcgattcgtgctggagtaagacacagaaataccatattggaatgctggggagtcccgaaaccctggccgaacttcaagttcgacgatacaagtacccattgacggctaattattatttgaacagcaagttggaaaggccggaaaagccaacaccctggatgctgttgggttatgctcgaagtgtgtgcaggtggaagtacctgaggtggcccattatatttgtggccagcgttttgctgttcttcgggctgatcacctactgtctatggcttcacgatgtcagtgtggctagagcaaaattccttcagcgtcgctatgaagccactctgacatccacgagctcgagcagcaacgaggtctgggatgaggaaaccaccagctccaccgaaaggtcgccccaggaaaccacacgactcgaagacatggatgacagcgatgagagcacggagctgcctgaaatagcgtttggtgacgatggagacccagaggctggaggtgaagacggcgatggtgactacgatgacaccttgctgccagcggacagtattagattcacctctgggcatcaaaacagctttggggttcccatcgagcaagacaagagaatgctgcagttgctcaaagaagtgagttatagctaaagctttggcttttagtactatagtattttttaataaattcggatgagtcccaaccgtatgtttgattccctgtcagataattatcacctataccattattttatttttcagttactgcataaaccccaggcgactccagctggtaacgagcctactctgacccgggtgtcccccactctgccaccacccttgtcggccagtgggcggcccacagaggcgatggccttgaccaccccctcaacgacaaacagtggctgccagtcgaccatgctgcccatgtgccagggagtgctcgactacgatctcacctttaatcgcgagggtgcggcaccgcgggacgccgtatccatggcagcatacgacagcctcatccgggccaattgctccgtcagggcggctgagttcatttgtggcgccctggaacccgagtgtcgacccctgcatatcggacagctgcctccttgtcgtcgcatctgcaagggtaaggaagaatgattatttatataatgaaacgccacttaacacttatgccattgcaaaaccaaaatccaaaatattacgtaataaaaataagggttaatttaaaaaaattctaattaaattgtaatttttcataactatttcttagccattttggaagcctgttccataccgatttacaattcggatgtccttggcgaactcttcgactgcaacctatatcccgatgcccacgagagccacaagtgcgaggatcccacaaggcgacgtgactattgctacggaaatgagttccaatgccatgatgggagttgcattccccagaactggcagtgtgacaagatcaaggattgccaaggtggcgaggatgaggatgagcagtgtttggtttgcgaaccggacgaattccgctgccgttcaaatgaaaagtgtctcgtagaaaagtatcgatgcgatcaaaatattgattgcatggatggaagtgatgaacaagactgcgatgagtacggctccggagatttggctccattcgatgagtctgaactgaatgcttttccaagggtattcacctatgccagtttcttatcacctaacgaaacgaatgacaaagtatatacgtacattacggccaccaccgatgaggacgcaggcacggaaaccaagttccagattcatcaggtggccgcgccggcacctccagtgaattccagcgcagaggaaggcgctggaggtcctaaaggatttggtaaggtgacaagccaaattaattttacatatattacctagacttaaaatgaagttccaagtgtaaacacctgtacgcttacgttttttaaatattaattgttatatttcatgtgtcaatcaatatattttctcagtaaactttcgtgacagcaaggagataatgatgaccagcgattcggagaccaagttcaagtattcccagagagccaatcgaacttcggtgaaatttagcgtatcagcacccacaactccagcggccagaacatcaagtgcgattcccagttcagctttggttcagcagcgcgaaagaaccacaagtaccaccaccaccagcaccaccacgagtaccaccaccagtagcattaccagcactcccagcatcaccagcaccactttaatcccaattaatgcagccacatcagagcccaatccctacgaagtggtaacatccctaggaggatgtcctccccaagagcttcgttgtgttagtggcaagtgcatcactgtcagtcaattgtgcgataaggtaagaaatgctcaaatcctttgtttcatagttttccaaaaacaactaccaaatacaatcttccattcatacaaataaaatacaatttaagtaaaacgaaaaatatgagatagttacaaaactgttttgtacgtatgtacttcctgcagcaaattgattgtcccgatgctgccgacgaactaatgtgcgtttatcgggagcgcccaagtaggaggcgcctcacctcgaccactgcaccacccacaacatcatcggcaccaccagagacaagcactgcaacaacaaccacgggtccgttgagcagtacaaggcgttcgttgaggaccacgcccaatcgaagtcgaaagcccaagtcttagagtgatgtatcttgtatctaatgtttatttatgtctctattatttctctccacttgtattttcttcgctcgctatatgtatgataaatgatgtatttgtaaatctttgttagtggctaagttgtctagtttttagagttgtttgactatttgtatgcgcgtgaaaattgtattttttgcaatgaataaagtttaagatgtgagtagcataagcagtataaacgtgaaattggggtaaactcggtgctcattaatttgtttattgttccaagctattaatctcctctatctacgcaccgactaaccttgtcgggaacatataagcaatccagaaaacatataattttctttgtttcgtactttcgaaagccataaacatatactcatatggacaatgctctaacgaaattcaaatgaaatcgatacaattaaagtcgggacattatttcacaacaacaaccttggtcgttggtcagtatggcccacgcattcaaaagaccgagaccatttggtttgggcaattcaattaaccagtccattgttatcgattccggtggtgcagtgaatgctacggagtccattatctatatgagtgtgtgcttagctggctgcagtacacttggaaaaatgtagaagtcctttcaatatgttttcagacttaacagttcagctgttgtgcaactgttcaaaatgattggaattctttaaacgaatcgaaaataaaactattctaagccgtcttaaatttatgataaagatcgtttttattttactttatagcaatgaataaatggaaatagaacattttggctagtgtagaacaaaatttattaggcagtcgacaaacagatccggcttttataatgctgcccgaaattaagagagacaacaacggtcgacaacacttgtcaaggcagattaaattgcagtctgtggcttttagaggaactcctatccgaaactcaactccggtttagaattcaactgacagcccatttctg

SEQ ID NO: 14714 - DNA, 2364 bp, DROSOPHILA
atggccgaacagaagcagctggaagcaattgcgaatgagacctcatcagtcaccggattgagacgtcagcccaccaaatatccccacggcctcaacatcacggtgcagaccatcgacgatgataatgagggatctccgaaagatcacagtgactacacccgcgcctccggcgattcgtgctggagtaagacacagaaataccatattggaatgctggggagtcccgaaaccctggccgaacttcaagttcgacgatacaagtacccattgacggctaattattatttgaacagcaagttggaaaggccggaaaagccaacaccctggatgctgttgggttatgctcgaagtgtgtgcaggtggaagtacctgaggtggcccattatatttgtggccagcgttttgctgttcttcgggctgatcacctactgtctatggcttcacgatgtcagtgtggctagagcaaaattccttcagcgtcgctatgaagccactctgacatccacgagctcgagcagcaacgaggtctgggatgaggaaaccaccagctccaccgaaaggtcgccccaggaaaccacacgactcgaagacatggatgacagcgatgagagcacggagctgcctgaaatagcgtttggtgacgatggagacccagaggctggaggtgaagacggcgatggtgactacgatgacaccttgctgccagcggacagtattagattcacctctgggcatcaaaacagctttggggttcccatcgagcaagacaagagaatgctgcagttgctcaaagaattactgcataaaccccaggcgactccagctggtaacgagcctactctgacccgggtgtcccccactctgccaccacccttgtcggccagtgggcggcccacagaggcgatggccttgaccaccccctcaacgacaaacagtggctgccagtcgaccatgctgcccatgtgccagggagtgctcgactacgatctcacctttaatcgcgagggtgcggcaccgcgggacgccgtatccatggcagcatacgacagcctcatccgggccaattgctccgtcagggcggctgagttcatttgtggcgccctggaacccgagtgtcgacccctgcatatcggacagctgcctccttgtcgtcgcatctgcaaggccattttggaagcctgttccataccgatttacaattcggatgtccttggcgaactcttcgactgcaacctatatcccgatgcccacgagagccacaagtgcgaggatcccacaaggcgacgtgactattgctacggaaatgagttccaatgccatgatgggagttgcattccccagaactggcagtgtgacaagatcaaggattgccaaggtggcgaggatgaggatgagcagtgtttggtttgcgaaccggacgaattccgctgccgttcaaatgaaaagtgtctcgtagaaaagtatcgatgcgatcaaaatattgattgcatggatggaagtgatgaacaagactgcgatgagtacggctccggagatttggctccattcgatgagtctgaactgaatgcttttccaagggtattcacctatgccagtttcttatcacctaacgaaacgaatgacaaagtatatacgtacattacggccaccaccgatgaggacgcaggcacggaaaccaagttccagattcatcaggtggccgcgccggcacctccagtgaattccagcgcagaggaaggcgctggaggtcctaaaggatttgtaaactttcgtgacagcaaggagataatgatgaccagcgattcggagaccaagttcaagtattcccagagagccaatcgaacttcggtgaaatttagcgtatcagcacccacaactccagcggccagaacatcaagtgcgattcccagttcagctttggttcagcagcgcgaaagaaccacaagtaccaccaccaccagcaccaccacgagtaccaccaccagtagcattaccagcactcccagcatcaccagcaccactttaatcccaattaatgcagccacatcagagcccaatccctacgaagtggtaacatccctaggaggatgtcctccccaagagcttcgttgtgttagtggcaagtgcatcactgtcagtcaattgtgcgataagcaaattgattgtcccgatgctgccgacgaactaatgtgcgtttatcgggagcgcccaagtaggaggcgcctcacctcgaccactgcaccacccacaacatcatcggcaccaccagagacaagcactgcaacaacaaccacgggtccgttgagcagtacaaggcgttcgttgaggaccacgcccaatcgaagtcgaaagcccaagtcttag

SEQ ID NO: 14715 - protein, 787 aa, DROSOPHILA
MAEQKQLEAIANETSSVTGLRRQPTKYPHGLNITVQTIDDDNEGSPKDHSDYTRASGDSCWSKTQKYHIGMLGSPETLAELQVRRYKYPLTANYYLNSKLERPEKPTPWMLLGYARSVCRWKYLRWPIIFVASVLLFFGLITYCLWLHDVSVARAKFLQRRYEATLTSTSSSSNEVWDEETTSSTERSPQETTRLEDMDDSDESTELPEIAFGDDGDPEAGGEDGDGDYDDTLLPADSIRFTSGHQNSFGVPIEQDKRMLQLLKELLHKPQATPAGNEPTLTRVSPTLPPPLSASGRPTEAMALTTPSTTNSGCQSTMLPMCQGVLDYDLTFNREGAAPRDAVSMAAYDSLIRANCSVRAAEFICGALEPECRPLHIGQLPPCRRICKAILEACSIPIYNSDVLGELFDCNLYPDAHESHKCEDPTRRRDYCYGNEFQCHDGSCIPQNWQCDKIKDCQGGEDEDEQCLVCEPDEFRCRSNEKCLVEKYRCDQNIDCMDGSDEQDCDEYGSGDLAPFDESELNAFPRVFTYASFLSPNETNDKVYTYITATTDEDAGTETKFQIHQVAAPAPPVNSSAEEGAGGPKGFVNFRDSKEIMMTSDSETKFKYSQRANRTSVKFSVSAPTTPAARTSSAIPSSALVQQRERTTSTTTTSTTTSTTTSSITSTPSITSTTLIPINAATSEPNPYEVVTSLGGCPPQELRCVSGKCITVSQLCDKQIDCPDAADELMCVYRERPSRRRLTSTTAPPTTSSAPPETSTATTTTGPLSSTRRSLRTTPNRSRKPKS

SEQ ID NO: 14716 - DNA, 5248 bp, DROSOPHILA
ttttggggtctcactccgccacttcgatttgatgaaaatagttttggaaattttattggcgaagccatataatgcgctttgaagtcaatggcaatgcgacgccttcctgatccaccgaatcattggatgtgcatgttttatgctaattgttcgtaaatgccccgtaccactggctcggcacctcatcttctggcgataaatatggaacaagcgcataaatttgtttattaaccagactcaagaggagtctctttccatttttaagtgtttgaaattgctgttaaggccggatcgttaaagtattttacgatgttattagatttccactggacgatggtcagttcgagtccatatactgattggttatgctctattagtaattgaggtgtgtttattgctcaataactgtgcagaacaacgatctgtcgatgaccaggagatcaatagaatatacaaacacacctctttattatcattaatgggtatattcacttaatgctaaattaaactactgctatgcgggctcctatataatggaatatcccaaagaacaataatcagtgcaaagaagacaccatatattcctttcttataaaatacgactatctgatccgtgaactctgagcaaagccgtctgcatcctttcttgtcaaaagccttcaacgtcagttaaggtcgaaagatctttaaggccgaccagttttttttttttgtgcctttctgtgggggaactccgaccgcaaatgtctcgaaatcggatgccttctcacaggcacgtggcagctgggtgaccacaatgcagctggagcggtagattgtcattggccatgtccaatatcaagtccatgtggaaccctagacatttctcatctgtcccggcaactgcgccgacttgtggccaggcgttaagatttattgaagtgttataattaagttagaaatcgctttctgattgcaaatcttaccttctctccctgcagttttcacctggggcaagcgcatgagtcgcaaactggatttgctgaagcggagtgactcgcccgccgccgcccacaaatcgcattcggatttgaggagtctgttccactcgccaacgcaccacaagagtggatccggtggatccagcggacccagttcggcgaaggcatcggcctcacccactggcggccatcagaacagctccggctccacgaccagcaccctcaagaagtgcaagtcggggcccatcgagaccatcaagcagcgacaccagcagcagcagcagcagcagcaatcggttcaggatgtgggcacgggacagagccagagtgctcagtccacgcccacgcatcagttccaggcggccgcccgcccacagaaagcgctaaagaacttcttccataggatcgggtccaccggcatgctgaaccatcgctcccacaatctccttaaggcttcggaggcggctcaacaggccaccccggcagccaccacattgtataggagcagctccactagccagctgtccagcagctcctatgtgaagtgcgacgatcccaccgagggactgaatcttcagagggagcagcgggaacagcgtcttccgcggatcgccagcctgaagtccagtagctgcgatgacatagccaaggtgagcagttgcctgacggccagcacaagtagtggcagtgccgcaggcagcttgggctctcctccaagtagtgcagcagctggtggaggcggaactgcaaacagcggccaacacgatccctcgcgtcgtggtgcatttccttacgccttcctgcgatcacgtctctccgttttgccagaggagaaccacggaaatgtaccaggacacctgaagcaacaaatacagcggcaacgggagcagcaccagcagcatcagagggatctcctccagcaggagcagacatcgtcgccccttccccagcgccgatcccccgaacaggcgatgctgaacaatgtgtcacgcaacgacagcatcacctccaaggactgggaaccactttaccaaagattaagtagttgtctaagttcaaacgagtccggctacgacagcgatgggggtgcgacgggagcccgactgggcaataatctgagcatctccggcggagataccgaatctattgcctcgggcacactcaagcgtaactcgctcatctccctcagctcctcggagggcgttggaatgggcatgggcatgagtctgggactgggtgccccatcgacgaggaacagcagcatctgcagtgctcccgtgtcgctgggtggctataactacgactatgagacggagacgatacggcgacgattcaggcaggttaagctggagcgcaagtgccaagaggactacatcggaattgtcctgtcgcccaaaacggtgatgaccaatagcaatgagcagcagtacaggtatctcatcgtggaactggaaccctatggcatggcccaaaagtgagtattggaaaattacgaatttattatctttcctaacttgcaacttttattctatagggatggtcgccttcgcctgggtgacgagatcgtcaacgtaaatggaaaacacctgcgaggcattcaatcctttgcagaggttcagcgcctgttgagcagctttgtggacaactgtatcgacctggtgattgctcacgatgaggtgacgacggtaactgatttctacaccaaaatccgtatcgatgggatgagcacgcagcgccatcggctgagttatgtgcaacgcacacagagcacagacagtctgagcagcatgcagagtctgcagctgcagcaggagaggattcagggtcacaatacggaacaggagcaggaggcccagggcgaggatcagtgcgatgcgcgttcaatggccagcgtcagcacaatgcccactccgatgccgctgatgcagcatcgtcggagctccacgcccaggcactcactggacgtcggtgcgccggagcatgagctcctcaggaggcgggcgcgcagctcctcaggtcagcgcagcttggctctaacaccgaccccactctttgccagcggcagcagcagttgctcctcctcccctaaccaccggttgctggataacgagaacgaccctgctaacgacaccgattcctatacgccagtgtatgcaaatcgggcggcaagcgtgtgcgtggcctcctccctggcggacgatgagaagtggcagttactggcccgaaagcgctgctcggagggttccgccctatccgctacaccgaacccgcagcaatttggccagcgcactcactacgccagaaactccatcaatctggccaactcgcattaccgctcgctccgatttgcccactcgcggctgagttcgtctcgccttagtctgttcatgcaggcaccgcctaacagtctaaccgtcggagaaggagtcgctaacaccccatcctctacagctaccacaaccactgatctcactaaccagcagcaacagcagcaaaaccagcaacagacacaccaatcactgtacatcaagcactcgccaaagagcgtctcattgttctcgcctaatccctatgttaacgcctcatcctcaccagcttcggcatccacatcagcgggtgccggctcctccctggcaccgccagccgctgccctaatgcatcacaggccatcgcttccggtggccaagctaacaatacgcgacgaggaaatggcggaggtcatccgtgcgtcgatgagcgagggtgagattcagtaatctaataatcagctaaataacttactagagtaaatcaagtaatttaccgtgtcaaatactaaacacttattacaaattataggtagtggacgttgcaccccgaagactataaccttctttaagggacctggactgaaatcgttgggcttcagcatagtgggaggtcgagattcgccaaagggcaacatgggaatttttgtaaagaccgtgtttccctcaggccaggcagccgatgatggcacactgcaagcgggtaagttttttttttaaaggcttttcgatatctatagccacaactaaaatacactccaaacaggcgacgagattgtagagatcaatggaaactctgtgcagggcatgagtcatgccgaaaccataggactctttaagaacgtaagagagggcaccattgtgctaaaaatcttaagaagaaagtaagtacatttgaggaaactattatttttatttgaaaactaatgttccacttttttttgcagattacagaaagctaaatcgatgggttgctagtgctagttaatgcccgtatttgacttattcccatggtaatacataattatggacaacctgcatcgtttaaccaagttaaatggtagcttctctaattaagtgaagccttttttgtaatcgtacaaagccccttgcaagaactatacttatacacagactctatttagaaactagaatcccaaatagtatgtaaagaattgtatggagttacaattttaaattatttacccattctagactaggctaaggttcgaaacgttgtacaagttctatttacatacaaccttaatatatttacctgaaaagcaatatacgttttgtttcaatgacattatattaaaataaatcactctgtttccgtttcattcttcacaatcagtcgttgcttttttacaaaatgctctatccggttctccaaactctctggaaaaaatgattgattttagtaaacaaaaaataagtgtgcattcaatacataccacatcgtttgcgttctaaaagaggctgatattgacgcggattgacggaatcttgcaacaggattacctgagccagtaccttctcttttggcttaaaattctcttcaaataagttttccaattgttgcagcacattgcgtatcatggtgctcttaacgctaaattgcgtccactcacactgggtgttttcaataagcttttgtagattttcctcattgtaaatccacgctgtaagatcacgctccaagtgctccggagcatttaagtcatttgattcgtcggcggctgtatccatggcttcttcgtctgcatcaccgctgcttggatggtttacacttcttgttgtgtggtctcgaaagtcgcaacgaaacagatttaagggcaatccaattgcgggggtgtactgaggcttgcagggattagactccacatcaagcaggtcacttattacgcccgggttttcctttttttggccaacaagtaaaagcaccgccattatgcaacg

SEQ ID NO: 14717 - DNA, 2925 bp, DROSOPHILA
atgagtcgcaaactggatttgctgaagcggagtgactcgcccgccgccgcccacaaatcgcattcggatttgaggagtctgttccactcgccaacgcaccacaagagtggatccggtggatccagcggacccagttcggcgaaggcatcggcctcacccactggcggccatcagaacagctccggctccacgaccagcaccctcaagaagtgcaagtcggggcccatcgagaccatcaagcagcgacaccagcagcagcagcagcagcagcaatcggttcaggatgtgggcacgggacagagccagagtgctcagtccacgcccacgcatcagttccaggcggccgcccgcccacagaaagcgctaaagaacttcttccataggatcgggtccaccggcatgctgaaccatcgctcccacaatctccttaaggcttcggaggcggctcaacaggccaccccggcagccaccacattgtataggagcagctccactagccagctgtccagcagctcctatgtgaagtgcgacgatcccaccgagggactgaatcttcagagggagcagcgggaacagcgtcttccgcggatcgccagcctgaagtccagtagctgcgatgacatagccaaggtgagcagttgcctgacggccagcacaagtagtggcagtgccgcaggcagcttgggctctcctccaagtagtgcagcagctggtggaggcggaactgcaaacagcggccaacacgatccctcgcgtcgtggtgcatttccttacgccttcctgcgatcacgtctctccgttttgccagaggagaaccacggaaatgtaccaggacacctgaagcaacaaatacagcggcaacgggagcagcaccagcagcatcagagggatctcctccagcaggagcagacatcgtcgccccttccccagcgccgatcccccgaacaggcgatgctgaacaatgtgtcacgcaacgacagcatcacctccaaggactgggaaccactttaccaaagattaagtagttgtctaagttcaaacgagtccggctacgacagcgatgggggtgcgacgggagcccgactgggcaataatctgagcatctccggcggagataccgaatctattgcctcgggcacactcaagcgtaactcgctcatctccctcagctcctcggagggcgttggaatgggcatgggcatgagtctgggactgggtgccccatcgacgaggaacagcagcatctgcagtgctcccgtgtcgctgggtggctataactacgactatgagacggagacgatacggcgacgattcaggcaggttaagctggagcgcaagtgccaagaggactacatcggaattgtcctgtcgcccaaaacggtgatgaccaatagcaatgagcagcagtacaggtatctcatcgtggaactggaaccctatggcatggcccaaaaggatggtcgccttcgcctgggtgacgagatcgtcaacgtaaatggaaaacacctgcgaggcattcaatcctttgcagaggttcagcgcctgttgagcagctttgtggacaactgtatcgacctggtgattgctcacgatgaggtgacgacggtaactgatttctacaccaaaatccgtatcgatgggatgagcacgcagcgccatcggctgagttatgtgcaacgcacacagagcacagacagtctgagcagcatgcagagtctgcagctgcagcaggagaggattcagggtcacaatacggaacaggagcaggaggcccagggcgaggatcagtgcgatgcgcgttcaatggccagcgtcagcacaatgcccactccgatgccgctgatgcagcatcgtcggagctccacgcccaggcactcactggacgtcggtgcgccggagcatgagctcctcaggaggcgggcgcgcagctcctcaggtcagcgcagcttggctctaacaccgaccccactctttgccagcggcagcagcagttgctcctcctcccctaaccaccggttgctggataacgagaacgaccctgctaacgacaccgattcctatacgccagtgtatgcaaatcgggcggcaagcgtgtgcgtggcctcctccctggcggacgatgagaagtggcagttactggcccgaaagcgctgctcggagggttccgccctatccgctacaccgaacccgcagcaatttggccagcgcactcactacgccagaaactccatcaatctggccaactcgcattaccgctcgctccgatttgcccactcgcggctgagttcgtctcgccttagtctgttcatgcaggcaccgcctaacagtctaaccgtcggagaaggagtcgctaacaccccatcctctacagctaccacaaccactgatctcactaaccagcagcaacagcagcaaaaccagcaacagacacaccaatcactgtacatcaagcactcgccaaagagcgtctcattgttctcgcctaatccctatgttaacgcctcatcctcaccagcttcggcatccacatcagcgggtgccggctcctccctggcaccgccagccgctgccctaatgcatcacaggccatcgcttccggtggccaagctaacaatacgcgacgaggaaatggcggaggtcatccgtgcgtcgatgagcgagggtagtggacgttgcaccccgaagactataaccttctttaagggacctggactgaaatcgttgggcttcagcatagtgggaggtcgagattcgccaaagggcaacatgggaatttttgtaaagaccgtgtttccctcaggccaggcagccgatgatggcacactgcaagcgggcgacgagattgtagagatcaatggaaactctgtgcagggcatgagtcatgccgaaaccataggactctttaagaacattacagaaagctaa

SEQ ID NO: 14718 - protein, 974 aa, DROSOPHILA
MSRKLDLLKRSDSPAAAHKSHSDLRSLFHSPTHHKSGSGGSSGPSSAKASASPTGGHQNSSGSTTSTLKKCKSGPIETIKQRHQQQQQQQQSVQDVGTGQSQSAQSTPTHQFQAAARPQKALKNFFHRIGSTGMLNHRSHNLLKASEAAQQATPAATTLYRSSSTSQLSSSSYVKCDDPTEGLNLQREQREQRLPRIASLKSSSCDDIAKVSSCLTASTSSGSAAGSLGSPPSSAAAGGGGTANSGQHDPSRRGAFPYAFLRSRLSVLPEENHGNVPGHLKQQIQRQREQHQQHQRDLLQQEQTSSPLPQRRSPEQAMLNNVSRNDSITSKDWEPLYQRLSSCLSSNESGYDSDGGATGARLGNNLSISGGDTESIASGTLKRNSLISLSSSEGVGMGMGMSLGLGAPSTRNSSICSAPVSLGGYNYDYETETIRRRFRQVKLERKCQEDYIGIVLSPKTVMTNSNEQQYRYLIVELEPYGMAQKDGRLRLGDEIVNVNGKHLRGIQSFAEVQRLLSSFVDNCIDLVIAHDEVTTVTDFYTKIRIDGMSTQRHRLSYVQRTQSTDSLSSMQSLQLQQERIQGHNTEQEQEAQGEDQCDARSMASVSTMPTPMPLMQHRRSSTPRHSLDVGAPEHELLRRRARSSSGQRSLALTPTPLFASGSSSCSSSPNHRLLDNENDPANDTDSYTPVYANRAASVCVASSLADDEKWQLLARKRCSEGSALSATPNPQQFGQRTHYARNSINLANSHYRSLRFAHSRLSSSRLSLFMQAPPNSLTVGEGVANTPSSTATTTTDLTNQQQQQQNQQQTHQSLYIKHSPKSVSLFSPNPYVNASSSPASASTSAGAGSSLAPPAAALMHHRPSLPVAKLTIRDEEMAEVIRASMSEGSGRCTPKTITFFKGPGLKSLGFSIVGGRDSPKGNMGIFVKTVFPSGQAADDGTLQAGDEIVEINGNSVQGMSHAETIGLFKNITES

SEQ ID NO: 14719 - DNA, 3363 bp, DROSOPHILA
gtggagaaccttgcgagagattccagcctcagcaagggcgatgtgaccaccgtgaatctcacccagttaagtggcggagtccagagcaatgtggttccgccacttttcgaggcggtcttcgacatacggattgccattactgtgaatgtggttgcctttgagaaacagattcgcgattggtgcgaggaggcgggtggtggcattgaaattgatttcttccagaaggagccttatataggacccaccaagctggacaattccaatccctactggctagctgtcaaagccgcaatcgatgagctgtaagtaccgactaaaaattaactataatggctaatcgaaatcctcctgtgttttagtggattgaaggttcatcccatcgtttgtcctggcgccactgacagtcgtttcattcgggagaagggtaccccagccattggattctcacccattataaacaccaccatgcggatccatgaccacgacgagtttctgcaggctgatgtgtatcttaatggcattgatgtgtacaagaagattattcgcaatctggctgaagtctaaacaaaatgtttgaactacatggatcgtggctataataaagatgggctaattactaaagtgtgcctcgtatcttcattttagagagtaatcttatcaaaaaaaaaaaaagattcaagagtttaatttgaaattccgtgtttatctcaatattgtttgttgattctttgactttcgcctccttgatcaagatataaatgattctgatgggaattctgtagcagattgtcaactatactgcttcttgtcactacctcgactgccatccaaagtgacttgcaatatagtcagaattggaagagatctgccgcccattgataacgattttcttatcatatacgcataatcacttttgtggcacgatccaaatgcatataaagacagcggatgcctttagctgcttatttctactttaccatcctaacgattcatattaaaaatgagtgccgaaaaatgggaaaagaacgaggaaattcgaatattccgggagtatttgcgaattccatctgtacaccctaatattgattatagtaaggtccttattttaatatttccttaaatgcattagcactattcatttttagctgcttgtgtggagtttattaagcggcaggcagattccctcaatctgcccgtggaagtagtttttccagctgttaaatcaaaacctgtggtgatcattaaatgggaaggaagccagccaaagttgccctcaatcattttaagctcgcacatggacgtggttcctgtattcccggaaatgtggacccatgaacccttctccgccgacatcgacgaggagggtaggatctttgcacgaggtgctcaggacatgaaatcggtgggcactcagtatctaggagctatacgcctgctgagggctgatggctttcagccgaaaaggacgctctatgtaacctttgttcctgacgaggagattggaggcatccatggcatggcagcgttcgttgaaactgacttttacaaacaaatgaatgtgggattcagcttggacgagggtggaactagtgcttctgatgttcatcacttgttctacgccgagcgtatacgatggagtgagtagcccgttcagctttcacatcagttgattgaacttcccattattcagttctcaaattgaaagttgctggaaccgccggtcatggttctctattgttgcccgatacagccggagttaagttgaactatgtgttgaacaagctgacggagttccgtgaatcgcaaatccagcgactgaaaaacgacaaaagcctgagcatcggggatgtgaccacggtgaatctcacccagttgagtggcggagtgcagagcaatgtggttccaccgctttttgaggccattttcgacatacgtctagccataaccctggatttggttgcatttgagcgggaaattcgaaattggtgcgaggaggcaggtggaggcattgacatcgagttcccactgaaagaggcctatgtggcggccaccaggctggatgattcaaacccctattggttagctttgaaagtcgctctggatgaactgtgagtatacgtcagatacaatagagaatctttaataatgtatcctttttcaggggtcttaaagttaagccgatagtgtgttttgcagtcaccgattgtcgttttattcgccagcagggaaccccagcaattggtttctcacccatcataaacactacagtactaatccatgaccatgatgaatttttaagggctgatgattatttgaatggcatacaagtttacaagaagattattcctaatctcactgaagtctagccaatgtcttctctctgtccaataaaactttgttgaaatactggaattttaatgttcttaatttaacatttattagtcaagcaacatcaacatcgggtaatgttgagtttacataaagataaatctgtcgtaacaatacaccttgtttaaccaaacactttaacgatattaacaccgccttggctttgataagaattacgagctatcagataaaaatttagaaccaagtacgaaaccaaccgagttcccatcaaattttcacttcaccttaggggaaatttcatcagaggaatgaacgtggagctttgtctagacgaaggtgtggttgcttccaataagacccagctaaacggacccttcgggctaggtaatatctacttagtgcatagattggaatttcctcataaatggccaaccaaactggtttctctacttcacaaaggactaaaagtttaagcctgtgtttgtcctgtcatgtgacaactttggatccctgccctcgggttcgtctccatcaactcaactatacaatgatactggtgctcgaccataacgagtgtgtccaggcggtctcctaaaacgaactcatttcggctttatccagtggcggcgcatcgcgcatacgccccattgcccgccgaactaagggctgtcatcgatgtgacagcaacgtatagcgagtttgcgagacacaactggcaagcggacgagacaggtggtagtgagttttgtcagttagtcaaacaaaataaattttaaggccaccatcacctggaagcacagcgaggggtcgggtgttaagttaaactgctgcatgtcagtctctgcaaattgtcagttgggcagcacttcggaatgtctgacatgtgagtggtgccaagggcaataaattatgctggggccgcagaatgaataatggcaacatgctcacgaaaggaccctctcgtacattcccaccccccgctgcaccactcctttttgaccatttgtgtcctgg

SEQ ID NO: 14720 - DNA, 1202 bp, DROSOPHILA
atgagtgccgaaaaatgggaaaagaacgaggaaattcgaatattccgggagtatttgcgaattccatctgtacaccctaatattgattatactgcttgtgtggagtttattaagcggcaggcagattccctcaatctgcccgtggaagtagtttttccagctgttaaatcaaaacctgtggtgatcattaaatgggaaggaagccagccaaagttgccctcaatcattttaagctcgcacatggacgtggttcctgtattcccggaaatgtggacccatgaacccttctccgccgacatcgacgaggagggtaggatctttgcacgaggtgctcaggacatgaaatcggtgggcactcagtatctaggagctatacgcctgctgagggctgatggctttcagccgaaaaggacgctctatgtaacctttgttcctgacgaggagattggaggcatccatggcatggcagcgttcgttgaaactgacttttacaaacaaatgaatgtgggattcagcttggacgagggtggaactagtgcttctgatgttcatcacttgttctacgccgagcgtatacgatggattctcaaattgaaagttgctggaaccgccggtcatggttctctattgttgcccgatacagccggagttaagttgaactatgtgttgaacaagctgacggagttccgtgaatcgcaaatccagcgactgaaaaacgacaaaagcctgagcatcggggatgtgaccacggtgaatctcacccagttgagtggcggagtgcagagcaatgtggttccaccgctttttgaggccattttcgacatacgtctagccataaccctggatttggttgcatttgagcgggaaattcgaaattggtgcgaggaggcaggtggaggcattgacatcgagttcccactgaaagaggcctatgtggcggccaccaggctggatgattcaaacccctattggttagctttgaaagtcgctctggatgaactggtcttaaagttaagccgatagtgtgttttgcagtcaccgattgtcgttttattcgccagcagggaaccccagcaattggtttctcacccatcataaacactacagtactaatccatgaccatgatgaatttttaagggctgatgattatttgaatggcatacaagtttacaagaagattattcctaatctcactgaagtc

SEQ ID NO: 14721 - protein, 340 aa, DROSOPHILA
MSAEKWEKNEEIRIFREYLRIPSVHPNIDYTACVEFIKRQADSLNLPVEVVFPAVKSKPVVIIKWEGSQPKLPSIILSSHMDVVPVFPEMWTHEPFSADIDEEGRIFARGAQDMKSVGTQYLGAIRLLRADGFQPKRTLYVTFVPDEEIGGIHGMAAFVETDFYKQMNVGFSLDEGGTSASDVHHLFYAERIRWILKLKVAGTAGHGSLLLPDTAGVKLNYVLNKLTEFRESQIQRLKNDKSLSIGDVTTVNLTQLSGGVQSNVVPPLFEAIFDIRLAITLDLVAFEREIRNWCEEAGGGIDIEFPLKEAYVAATRLDDSNPYWLALKVALDELVLKLSR

SEQ ID NO: 14722 - DNA, 3284 bp, DROSOPHILA
atttcggcagccaccacttcgggccataagttgccatgaaattggcattaaacggttggagggcttgcagttttcaatggttgtaaaattaatcgattcgattgtgaagggtcactgaagaggttttcttgtaatgcaataaattacaaacaagatactgtgtaaatttcgttggctatttaaaagatcttcctataaaaagaattacaattgcgcttgcttgtaagtaaaaacagatggttataatattaataatttttgcaagaatgctatggatgctatttgtctttttctacacaacaaacactttaatataatttgatttgtttaccataaaaatataaataattcgttaaaacctaacaatgatgaaaaaaagccaatatgtaaaagcctgaaaatgaacgaactgcttataaatacaatatctgctcatatgataatattgcttataatgacttttttgatgcttcttcataacttaaagttttatgaagttgcatttgtttatttttcaaacataagttactaggcaaattaaaaaaaaatatatatgcaagcaatatatatggattttctaataaaactattaattaaaatttgtatttttaattaaatacatttttaacactgtctataaaataagctgcttgatgattttattgaaagttcgaaataccaataatgtaatttgatctagcttaggctgaactaattcagttccgtttaaaaagcttttacgcactctcttcaactttcaattaaactcgagtgataatacgaattggaaagactgattcgttccacagggacaccaatacagtcccatcgcacacacccaagcccacacacacacacatacatatgtatggcaggatggcaaaggagggttcgccattgtcctttcgcacagatacagtgaatcatcgcttacctgccatttgcggcattgtgagtgatcgaacaagggcggagcgtaaatggcaacagttgttgctaaatggtgactaaatggccgaacacactcgctcaaacaaccctcgaattggccctcaggggtgtggaagtggcaaaccaacccccagaacagagtctcgaggtatataagaaccgggtgagggcgcagcagccagacagtttcgcacagtcagcgatcgtgttcagtagctcatctcgagatcagttggaaaacgaaataccccagaaacccaagatgtcgcgttcatttttgatggattccctactcagcgataggcccaatttgagccagaagaaggagaaactgggatcgccaggaggaagtcctacagccgctgctgcagtggccgcagctgccatgttaccatcgatacccatgcttccttacccggccagctatgtgggcagctatctcttctccttgggcatccagcagcagcagcaacaacagcagcagcagcaacagcacgcagcagctgcagcagcggccgcagcagcagcagctgccttgcagcaacatccacatgtcagttcgagtcccggttccctttaccatccatacgcccagctgttcgccagcaagaggaagtccagtggattcagcaactacgaaggatgttatccatcgccaccgctctcggccaatcccaactcccagcaattgccgccaatacacaacctctacggatctccagttgtgggcggattacccttaccggaacctggaagcttctgcacatcaccgtccgcttcatcgtccgcctctttggattataccaataactttgatgaacctcaaggaaagcgtttcaagcacgagtcctcctgctctccgaatagctcaccactgaagaaccactcttcgggaggtcccgtcgagatcacgccgctgatcaacgattatgccgattccagcaaaaggatccgcactgccttcaccagcacccagttgctggagctcgagcgagaattctcgcacaacgcctacctatcccgcctacgtcgcatcgaaatcgccaatagattgcgcctttccgagaagcaggtgaagatctggttccagaatcgccgagtcaagcagaaaaagggcggctccgaaagtcccaccttcaatctgtccaccaactccaatggaagtccgcaagcatctccagtgtctccccaagtcaaagtccacgaattgaaggttgaggcgtagaatcaatcacctattaaaccataagaataatgtaattgtacagtagattttagtctgttttcagtcataagtatgttaaagtaaataaattttaatcaaaatgaaaaacgacgtttttgggatagataaaccataatagaaagcaatgatttatttatgcaaagtgggttcacatctagcagctaagttggcccaagatggctttactaaaaaatactaaataattttaaattacgaaccaattaaatgaatataataaatatatagcagccctggaatatccctaaaaataccaaacgctagtgtcgatatttcgttccaaatttgtgctgtcaatcaaaacgaacaaaattttcattcccaaaaatttagtcgttgtcgagactttgctgtaatcatgtcgaatctgtacaccgaattgaagaacgagtggagcaaacatgcgcccaacctcacccactgctcccgcctcctggatggcttcaaactggagctggtgaggtcaaactttggaacaatccaaactgcatcgagttccaagcaaaaggatcagctaatcaaatcgcgggagatgctggaaatcgccgtggaacatagcatcaccatcaaggattatgctgccttcgagagatatatggcccagttaaatacctactactatgattacgataagtacttggaatcatcgaagcacatgtacaagttcatgggcctaaatctgctctatatgttggctaccaatcgccttgccgacttccacatcgaactggaacgtttgccgacggctttgctgctccatgatagcttcatccaacccgttttggctttggagaactactacatggagggcagatacaacaagatactgcaagccaagaaatctatgccctcggagatctattcgaattttatggacatcctggtgaacacggcgcgtgaggagatcgcatcctgcatggagaaatcctatctgaagatggcgcccaaactagctgctcagcgtttaggccttcgtcccggttccaaggagcttttcgagctggccactaagcgccagtggtgtctggacgaggaggggaactacgactatgctggacttcataccaga

SEQ ID NO: 14723 - DNA, 1284 bp, DROSOPHILA
atggtgactaaatggccgaacacactcgctcaaacaaccctcgaattggccctcaggggtgtggaagtggcaaaccaacccccagaacagagtctcgaggtatataagaaccgggtgagggcgcagcagccagacagtttcgcacagtcagcgatcgtgttcagtagctcatctcgagatcagttggaaaacgaaataccccagaaacccaagatgtcgcgttcatttttgatggattccctactcagcgataggcccaatttgagccagaagaaggagaaactgggatcgccaggaggaagtcctacagccgctgctgcagtggccgcagctgccatgttaccatcgatacccatgcttccttacccggccagctatgtgggcagctatctcttctccttgggcatccagcagcagcagcaacaacagcagcagcagcaacagcacgcagcagctgcagcagcggccgcagcagcagcagctgccttgcagcaacatccacatgtcagttcgagtcccggttccctttaccatccatacgcccagctgttcgccagcaagaggaagtccagtggattcagcaactacgaaggatgttatccatcgccaccgctctcggccaatcccaactcccagcaattgccgccaatacacaacctctacggatctccagttgtgggcggattacccttaccggaacctggaagcttctgcacatcaccgtccgcttcatcgtccgcctctttggattataccaataactttgatgaacctcaaggaaagcgtttcaagcacgagtcctcctgctctccgaatagctcaccactgaagaaccactcttcgggaggtcccgtcgagatcacgccgctgatcaacgattatgccgattccagcaaaaggatccgcactgccttcaccagcacccagttgctggagctcgagcgagaattctcgcacaacgcctacctatcccgcctacgtcgcatcgaaatcgccaatagattgcgcctttccgagaagcaggtgaagatctggttccagaatcgccgagtcaagcagaaaaagggcggctccgaaagtcccaccttcaatctgtccaccaactccaatggaagtccgcaagcatctccagtgtctccccaagtcaaagtccacgaattgaaggttgaggcgtagaatcaatcacctattaaaccataagaataatgtaattgtacagtagattttagtctgttttcagtcataagtatgttaaagtaaataaattttaatcaaaatgaaaaa

SEQ ID NO: 14724 - protein, 391 aa, DROSOPHILA
MVTKWPNTLAQTTLELALRGVEVANQPPEQSLEVYKNRVRAQQPDSFAQSAIVFSSSSRDQLENEIPQKPKMSRSFLMDSLLSDRPNLSQKKEKLGSPGGSPTAAAAVAAAAMLPSIPMLPYPASYVGSYLFSLGIQQQQQQQQQQQQHAAAAAAAAAAAAALQQHPHVSSSPGSLYHPYAQLFASKRKSSGFSNYEGCYPSPPLSANPNSQQLPPIHNLYGSPVVGGLPLPEPGSFCTSPSASSSASLDYTNNFDEPQGKRFKHESSCSPNSSPLKNHSSGGPVEITPLINDYADSSKRIRTAFTSTQLLELEREFSHNAYLSRLRRIEIANRLRLSEKQVKIWFQNRRVKQKKGGSESPTFNLSTNSNGSPQASPVSPQVKVHELKVEA

SEQ ID NO: 14725 - DNA, 3041 bp, DROSOPHILA
agcgacacgtgatcaccacccagacggagcacaagtgcgtgctggactcttgtcgtgctttagagaacgagggctttaaagtcacgtacctgccagtgctggccaacggactcatcgacctccagcaactggaggaaaccatcacatcggagacctcgctggtgtccattatgacggtgaataacgaaatcggcgtacggcaacccgtcgatgagattggcaaactgtgccggtctcgccgagtattctttcacacggatgccgctcaggcggtgggaaaggtcccgctggacgttaacgccatgaacattgacctgatgtctatatccggccacaaaatctacggcccaaagggtgtaggcgccctgtatgtccgacgaaggccgagggttcgcctcgagcccatccaaagtggcggcggccaggagcgtggcctaaggagcggaacggttccagccccgctcgccgtgggattgggagctgctgcggaactttctttgcgtgagatggactacgacaagaaatgggtggactttctatccaatcgcctgctggacaggatttcaagtgccttgccgcatgtcatcaggaatggtgatgccaaagccacatacaatggttgcctgaatttgtcgtttgcctatgtcgagggcgagtcactactgatggctcttaaggacgtggccctgagcagtgggtccgcctgcacctccgcctccctggagccctcctatgttctgcgtgccatcggcaccgacgaggatcttgcccacagctccatacgctttggcatcgggcgctttaccaccgtcgaggaggtggactacaccgccgataagtgcatcaagcatgtggagcgactgcgcgagatgtcgccgctgtgggagatggtccaagagggcatcgacctaaagaccatccaatggtcgcagcattaatgtactaatatttaagccgttactgttacaccacactttgaaagcgaagggaaaataaatttgttggaagagtatctaggtttatttgtacacaaaaccacttataactaagcttagtccgaacgaatgtgcttgtgtaagaggtgaggcaagagagaccccaaaaagcgaaaacggctcaaagtgcgacggccaatgatatgcaaatgatgcaataatttgcattcgccgctggtcaaggttcagttggccttcttctggggtgagccgctggatccaccgcccaggatcttacggcgctgggcgaacatgtgcaagtacaactgcgggaagatggggatgtagccgagcatgacgatccacaggaatccaaaatacgagaaggtggcgttccacttgttgggcatcaccacactccacacgctgttctcacgggcatagctctgggcccaccagaagcacagcagctccccagtcacgccgatgggatacaggacaatgaatgtggtgtagcgcaggaacaccacaaaatgcggcaccaccttgacgatgttcagagcgtaatatccatatcggatgatctcagtgatggcccaggccagcagggcgatgggcagaccgggtgaaacctttccagtaggcgtggccatcaccacgccgacgaccaccatcatgcggctgaacacctggaagccagtgaccaccgggttcgacttgaccaatccaaaagaagcattgagtatctccacgaacgcggcattctggaagatgatcacggccagccgagtatactcccacaacgtcacctgggcacggaactccggaccctgcaatatgtagtagttgaccagctgccacaggatgtagctccatccgaccacctggccggcgttgtacgcaaacaggtacaatttagtgaccgccgacggctccttggaagcgcctggtttgctggacttggacactgcctttgctgacatgttggagcggagatgtgtgaactttcaccttgccgatcgccgctggttaactaatcagtcgtcacagtcttatcgccctgtagcgcgataattccgaagtcgctttcacctgattgggtcagtatgaccgcacggcgaccacacaaaaaataccaaaaaaaagggctaagaaatatatataactattaaatacccttccatataatatcttttataaataaaaacgctttgatatcgaaaattgttcatttaatcatttgtaaattaataatcatttaattaaaatttcttgatataaaatttcattcgcctttattttctctgaattttgttttttgctattcacaatttttccaacgagtataaataaaagatgaacttcattctttcaaagtcaacgggtacaaagtgcatagccttataacctttcctctattcacagatcgcaaatctaagttaacaatgccacaaccattaggcatgcttagcaattaagtcgtttttatgtgcaaagttatttcacttaagttaagttaagtctcaaaacgttaaaattctttgaaaactatgattttaaatcctatcaacttactttaaagctgaattaccgtttcttatgttagtacaaattaaagtaaataaactaaataataacacaatttatatttcttcgaaaatattcttagtatcattagtaaaactataataatttttaattatagtaaaaattaatacctatcatatatattctttctttaatgtatagtaaagcatggttaagaacaatggataatgggtggttatgagccgacatataaaaatttatcgctaacgacaaggtggagaaatcaatttttttgataagaactagcccattgtacgctttgcatttctaaccacatttcgcttaaagcagcccactgtaggcggcagctgacgtttcccagcgaacgacggctggtttgcgcgatgagccagcaaggcagctaaactttctggtcgcctggtggaaaccgaaccgaaaaccgaacgtgtctgaaaaagtccgccaccaccacggaccggtgcacgtccccacctgccaagtcgcgtgtgtgtggtgttgcctgtggaccgaccccag

SEQ ID NO: 14726 - DNA, 1041 bp, DROSOPHILA
actgacccaatcaggtgaaagcgacttcggaattatcgcgctacagggcgataagactgtgacgactgattagttaaccagcggcgatcggcaaggtgaaagttcacacatctccgctccaacatgtcagcaaaggcagtgtccaagtccagcaaaccaggcgcttccaaggagccgtcggcggtcactaaattgtacctgtttgcgtacaacgccggccaggtggtcggatggagctacatcctgtggcagctggtcaactactacatattgcagggtccggagttccgtgcccaggtgacgttgtgggagtatactcggctggccgtgatcatcttccagaatgccgcgttcgtggagatactcaatgcttcttttggattggtcaagtcgaacccggtggtcactggcttccaggtgttcagccgcatgatggtggtcgtcggcgtggtgatggccacgcctactggaaaggtttcacccggtctgcccatcgccctgctggcctgggccatcactgagatcatccgatatggatattacgctctgaacatcgtcaaggtggtgccgcattttgtggtgttcctgcgctacaccacattcattgtcctgtatcccatcggcgtgactggggagctgctgtgcttctggtgggcccagagctatgcccgtgagaacagcgtgtggagtgtggtgatgcccaacaagtggaacgccaccttctcgtattttggattcctgtggatcgtcatgctcggctacatccccatcttcccgcagttgtacttgcacatgttcgcccagcgccgtaagatcctgggcggtggatccagcggctcaccccagaagaaggccaactgaaccttgaccagcggcgaatgcaaattattgcatcatttgcatatcattggccgtcgcactttgagccgttttcgctttttggggtctctcttgcctcacctcttacacaagcacattcgttcggactaagcttagttataagtggttttgtgtacaaataaacctagatactcttccaac

SEQ ID NO: 14727 - protein, 245 aa, DROSOPHILA
MSAKAVSKSSKPGASKEPSAVTKLYLFAYNAGQVVGWSYILWQLVNYYILQGPEFRAQVTLWEYTRLAVIIFQNAAFVEILNASFGLVKSNPVVTGFQVFSRMMVVVGVVMATPTGKVSPGLPIALLAWAITEIIRYGYYALNIVKVVPHFVVFLRYTTFIVLYPIGVTGELLCFWWAQSYARENSVWSVVMPNKWNATFSYFGFLWIVMLGYIPIFPQLYLHMFAQRRKILGGGSSGSPQKKAN

SEQ ID NO: 14728 - DNA, 3965 bp, DROSOPHILA
tagagatggcaagatactgcactggcgaatagggatgggagcgtgaggttagttgatttcatgacacggttactcatgcacgaacatcgcacgaagtgtaaagcgatcccgagatgttacaaataaacatttaaaaaacctttattcaaatcaattacatttttgtaagttgtgtaacatccattattcggttttaaccgagctatgttccacgatatgtggaatacccaaagggattgagtaacaaaggaatgtgatagttctgattctcactgcaatccacaatcaagtcaattgctggataaagtgtcctcacattgcgctccgcgtaataggcgcccacgtgaaaggtcagcttatagatcccgccgggaaattgaccaggttccaagagcaggcagcgaccatccgcatcagtttgggccgcccgaagggatctccattcctgaatctcgtccagcctggaaactgttactctcacattggctgccgcctttcccaccgaagtatcctgtaaaaggttaacgaaaaattttatacatataaataaattgaaacaaagttaccaatatgtgggtagaaaactttcgtgcatccatcttgagggcaactttaagattaaagatcgtagatatctctggtatctcagacggtagcaaaagctccagtttatgggactctttatcttaatctttgattgcatcttgcattaacaatgaaaatcactgataagtgggatatcaaaataatatgtaagccaaaaatctgtttggggaaataaattggaacgatcatatatatacttttttttaatgaagtattaattccaaataaacgaataaatttgcaacagtttttaaaaatataaaaatcgtttgatgccgtatgtttcagtatttgtttaaagtattagcaaagacactagaatattctattattctagtgtctttggtattagtaacagcgtaattaataggatctggtcacacaacctgccttgtttgaactgcacgtgtttatcaattcgtttggtgtatcaaactaagttgaaaaatataatcataatggctgaggaaggaccaccggagccgagcattgattttgtcccagctctttgctttgtaccacgcggcgtggctaaggatcgtcccgacaagatcgtgctgacgcaggcggagctggccaggattatcggtgatacgcaacaggaattggacgaggagagcgacgacgatgcagaggagggcgaaaatgccgaggaagaccaaaacgacatggatgtggacgaccacgcggatgccaatagtgagaaccgcgatccgcaggacgagttccaattccaggagtatgacaacgaggcgaatgctaatgtcaccagtctggccaacatcgtggacgctggcgagcaaatccccgatgaggacgaagactccgaggccgaggacgaggtgatcaagcccagcgacaacctcattctagtgggtcacgttcaagacgacgccgcctccatggaggtgtgggttttcaaccaggaggaggaggctctctacacccaccacgactttctgctgccaagctttcctctgtgcatcgagtggatgaatcacgacgcgggcagcgaaaaggcgggcaacatgtgcgccatcggctgcatggatccgataatcacagtctgggatctagacatacaggacgctatcgagcccacatttaagctgggttccaaaggcagccggaagcagaacaaagagcagtatggacacaaggacgccgtgctggatctctcttggaacaccaactttgagcacattctggccagcgggtccgtggaccaaactgtgattctgtgggacatggacgagggccagcctcatacaaccattaccgcttttggcaaacagattcagtcgctggaattccatccgcaagaggctcaaagcattcttaccggctgtgccgatggatacgtgcgactcttcgattgccgcgacgctgagggcgtcaactcgtccagcattgagtggaaagttgacggtgaagtggagaaggtcctgtggcatcccacacagaccgactacttcatcgtgggcaccaacgatggcaccttgcattacgccgacaaacgttctcctggacaactgctgtggtccgtaaaggcccacaacgaggaaatctccggtgtgtgcttcaacaaccagaagcctaatctgctgacctccacctccacggagggcaccctaaaggtgtggaactttgatggcacagaggcaaagcacgtctacgagcacgagttcaacatgggtcgcttgcagtgcatgcgccagtgccccgaggatccctacaccctggccttcggcggagagaagcctccgcgctgtgcgatctttaacatcaagaactcgatagccgtgcgccgaacgtttggaatccctgatgcagagtaggcaaatcgtacagctacgtatttatctgtgtatatgctttatatgacttttaaataaatatgaattatatataagaaccttaatgattgacttttatattaattaaaatttattgataacttgcgcatatatgcactttacacttttatgcttaaacaactaatcgacatttcaggggggatgggtcacaaacgaaatacaaaacattaatcctaaacattccgagcattccttaacactacattacgtataccaaataagcttatctgtgctcctaactcttgaatagacccacgcacatcaggagatttcggcgcgtaaagtgcaggctgacaaatggcgagttcttgctggggaaagtacgcatgaggtagacgtcctcgtcgttctcatcctgatggtgcgacacagtgatgtgattgctgatatagtcttcggtaaccttgtgaaagtcccacagagttagattgttatccaagccggctgcagccaggactgttccatcgcgactaaaggtgatcgtggtcacagtgctagtgtgcctcaacagggtggtgaccagggatccgttcgacagatcccagatgatgatattgtgatctactgaacccgaggccagataccggccgcaggcggagaaggccagagaactcaccgatcccttgtggcccgtcatcaggcgtaccgactgaccggtcatgttgtcccacaggcgtaccgtgcgatcgctagaaccggtggccacataattggaattgggatgaaattgtacacaatccacgtccgacaagtgacccacgaatacgcgcaacgcttgattggaatccgtggcccacagacgagcagttttgtcgtacgaacaagaaacaaaatagtagccatgcggcgcaaagcgaacatcccacaccgggtaaacgtgcccgcggtaggtgactacgcaggaccaggtgagcagagaccacagccttatggtgctgtcctcggaacatgagagcaacaggttcatctcgggggcaaaggcacagcggtatacgggtccggtgtgacccattaagctcctggttacctcaccacttcggtcatccagcatacgcacattgatatccgccgattccttgtccagttcgcgaagggaatctgcatccttcagcgtacgcagcttcgcgggcgtcaatgaccaaatcctcacgctagaatcgccaaatccacaggccaacatcgtggaatcgtctgaaatctcggcacaggttacgccctgatgggaattaagcaccgtgtagaagacggcagagggcagttgatccttgctgagggctaaacgcttgctggcttccctgagagccttaagctttagcaacttgtccgaatccttcagttccggcaggggaattctgtcgatggatggagcattcggatccgacttggactttttcgacagcaggggatccttttttggctttttctttttcggacgatccggggcatccggatcatcgtcctcctcctctggtgccggcgctg

SEQ ID NO: 14729 - DNA, 1965 bp, DROSOPHILA
tttgaactgcacgtgtttatcaattcgtttggtgtatcaaactaagttgaaaaatataatcataatggctgaggaaggaccaccggagccgagcattgattttgtcccagctctttgctttgtaccacgcggcgtggctaaggatcgtcccgacaagatcgtgctgacgcaggcggagctggccaggattatcggtgatacgcaacaggaattggacgaggagagcgacgacgatgcagaggagggcgaaaatgccgaggaagaccaaaacgacatggatgtggacgaccacgcggatgccaatagtgagaaccgcgatccgcaggacgagttccaattccaggagtatgacaacgaggcgaatgctaatgtcaccagtctggccaacatcgtggacgctggcgagcaaatccccgatgaggacgaagactccgaggccgaggacgaggtgatcaagcccagcgacaacctcattctagtgggtcacgttcaagacgacgccgcctccatggaggtgtgggttttcaaccaggaggaggaggctctctacacccaccacgactttctgctgccaagctttcctctgtgcatcgagtggatgaatcacgacgcgggcagcgaaaaggcgggcaacatgtgcgccatcggctgcatggatccgataatcacagtctgggatctagacatacaggacgctatcgagcccacatttaagctgggttccaaaggcagccggaagcagaacaaagagcagtatggacacaaggacgccgtgctggatctctcttggaacaccaactttgagcacattctggccagcgggtccgtggaccaaactgtgattctgtgggacatggacgagggccagcctcatacaaccattaccgcttttggcaaacagattcagtcgctggaattccatccgcaagaggctcaaagcattcttaccggctgtgccgatggatacgtgcgactcttcgattgccgcgacgctgagggcgtcaactcgtccagcattgagtggaaagttgacggtgaagtggagaaggtcctgtggcatcccacacagaccgactacttcatcgtgggcaccaacgatggcaccttgcattacgccgacaaacgttctcctggacaactgctgtggtccgtaaaggcccacaacgaggaaatctccggtgtgtgcttcaacaaccagaagcctaatctgctgacctccacctccacggagggcaccctaaaggtgtggaactttgatggcacagaggcaaagcacgtctacgagcacgagttcaacatgggtcgcttgcagtgcatgcgccagtgccccgaggatccctacaccctggccttcggcggagagaagcctccgcgctgtgcgatctttaacatcaagaactcgatagccgtgcgccgaacgtttggaatccctgatgcagagtaggcaaatcgtacagctacgtatttatctgtgtatatgctttatatgacttttaaataaatatgaattatatataagaaccttaatgattgacttttatattaattaaaatttattgataacttgcgcatatatgcactttacacttttatgcttaaacaactaatcgacatttcaggggggatgggtcacaaacgaaatacaaaacattaatcctaaacattccgagcattccttaacactacattacgtataccaaataagcttatctgtgctcctaactcttgaatagacccacgcacatcaggagatttcggcgcgtaaagtgcaggctgacaaatggcgagttcttgctggggaaagtacgcatgaggtagacgtcctcgtcgttctcatcctgatggtgcgacacagtgatgtgattgctgatatagtcttcggtaaccttgtgaaagtcccacagagttagattgttatccaagccggctgcagccaggactgttccatcgcgactaaaggtgatc

SEQ ID NO: 14730 - protein, 459 aa, DROSOPHILA
MAEEGPPEPSIDFVPALCFVPRGVAKDRPDKIVLTQAELARIIGDTQQELDEESDDDAEEGENAEEDQNDMDVDDHADANSENRDPQDEFQFQEYDNEANANVTSLANIVDAGEQIPDEDEDSEAEDEVIKPSDNLILVGHVQDDAASMEVWVFNQEEEALYTHHDFLLPSFPLCIEWMNHDAGSEKAGNMCAIGCMDPIITVWDLDIQDAIEPTFKLGSKGSRKQNKEQYGHKDAVLDLSWNTNFEHILASGSVDQTVILWDMDEGQPHTTITAFGKQIQSLEFHPQEAQSILTGCADGYVRLFDCRDAEGVNSSSIEWKVDGEVEKVLWHPTQTDYFIVGTNDGTLHYADKRSPGQLLWSVKAHNEEISGVCFNNQKPNLLTSTSTEGTLKVWNFDGTEAKHVYEHEFNMGRLQCMRQCPEDPYTLAFGGEKPPRCAIFNIKNSIAVRRTFGIPDAE

SEQ ID NO: 14731 - DNA, 9228 bp, DROSOPHILA
atgtaagtaagccaaacgacataagcaggcatgaacacagctggatcgactgaaaatgttttaaaatacagaatttggaatactcttcttaatggagctacaatataaaaagaaatggctttggttaataaatctttcttttttcttttgagtttttgttatattatttggccaacttcacgcaattctcatatttagccaaagttttcaactttctttttaagtaaaaataaacttaaattgattttaagtcaaccaaaaatgcatccaaagcccagaaaaagcatcgctctgtatatacatataagtatttcccaggacacttgatgatgatgattgttttggtcatggatttcttaaagaactacttttatgacgaagccataaaaacgaagtccatttgcacgtaaaatatatttacctaccaaataagccctgtcactcagatggcattggcaaaatgcatttcctgcttaaattcattattgaacaaatggtgttatcgagtgttggcgaagccggcgacctagtggatatggctcgatccggcgcgaaggaccaaaggcacaaagggcagccccattgagtgcaccgacgcgtcgacggctcccggtgggtgtaaattttgttatgcggcaaatacaccataaagctacggagcagtagctccaggatgaggaccaggataaacacgaggaagaggataaccagcgatgggtggagggggtggtggggggtaggtgagatccctgcttgcagtccaggtcttcagttttcccaaaggctgcctgcatttgcgtgaatacgtatgccttttccctctgttagccgtccctctgttttactcccctcattcgcacagtgtattcggaggtatgaaagaagtttgggcccgtacctcggatgccggatcctgggcttcgtccgttcccactcgtccgtgttgtgcatgtgcggcacactctaataaaatttaataaaaaacgtgcagcgcggcataatgcaatggcaatggactagcccaaggggcttggtgttcggggcaccggtttgttattgggtttgggggtttcgttggggcagttgtgaggggtgttttggtggcttggcggtacaggtgtatcattaccagcacgccaaccgcaagtcagacaagctcacagcatatcaatatgccgtgcggggagattcttatgaccaacccactcatttgaatcttctcatgaactcatttctacgtggaaaaaaaacctagtcttttatttaagtttcatgcaatttcattcaattcactagtatgctttaaatacaaattgttaccagaaagataatgtatccaaaatataacataataataaacctttaaattgctataaaaggtttctattgatttgattgtcattttacttcaatcattgacccatttaagcaagagctattgtctttcattattcaaatgtcagtttgataaggaaatgacagaagttattacgacttgagatgccccaaatcgctgacgcattttggtaatattttgttgttattttttcttttgcagttcgaactgaagaaggatttcgcgaagcagaaggagcacaagaccacaaaagatgccatgggcaagtgtgtctcccggcagtcggctccgctccacgaactcgcatccccagacgcgcagcatcatcaatctgtattgacaatcgcactgtcccacgaagatttggcccaggcactcaaaatctggcaacagttgacagggagtaatgaatacattgcagccgggccatcctcgcaccaggaggaggaacccttttattacactataaggcggcaaaggcaaccggagcaacagcagcagcgggagcaggagcaggagcaggccgtgttgcatatcgagtccctttacaatgatgccgccatcgccccagcggaaccagtgacatcagccagcgaaccggagtactccacttgccaggaattcctgctgcacgaactgctgcaggtcatcgaggaacatgcagcctccacgacgacgacgaccaaccacatcctgaatcagtctcgaatcaggccagaacctcaattacccgtcgagaacaacggctggctggcggtggtgagtaatattgataaatgtttacaactcacttgaggcttctggcgaagcaccatcaatgagttgcttgctccgggcggcaaagttgagtctggcgaaaaggtggtgccaccgattgtgggtcaacaatctattctgttgccagactattgtcagtctcgatagccattgtttctggacgaaagtgaaataggattgctgtgggatgttgttatataaacatagcgaaatcaaagctcaaatggtagtgtacagaaaatattcagaattaaaagttttgctttatttataactttacctacctattttctgactaaacatgctgtcacttcgaaacatgtaatatactcaattataaagagtcagtacgtgctgtatgcatatataaaactcaatgtaataaggaaatttgggtttaagaacccaaggccttgattcactttctcgaaacacttgccaccgcctttcccttcgaatttttggcttacatattcatattccttttctcccaaggcttattacaaggtaatttaacataaacaagctagtaggtgagagaggtggaaatggctgtcagaaatggcccccttgccacatatcatctttcatacttaaacgaagcactttatcccttccttccccatcagcaattgaccttaaccaaattttattttacttcgctaatgtctcagggggcttattacacctgaattttacatgattcactaaatatacgtataaaagaaaagaaaatcaagcctaaccgaaaatgtttagaaaaaatgtaaaaggaaaatataagtttacaatttataatatttaatttaggtacatatgtatatagatgcactaaaagtgtactgaaaaggattagattatttaaggttaaattataaatttttctaaacaatcttgaacgggttttgcaattgttttctaagtttaatatcttaggaattgtaaatgtgtcatcacagtatctattgtacataaatttccaaataaattttggttctgttcccaactaaacaccatgtcagccgctaggtggcgccatagtaagccacccccgattttcgaccattttcggcgaacaacagccacttgtttttcctttttctgcgcatgagcgaacactgggaaactctctcagactctctgtctattttccattttgctccccctgtggtcaagctgaaaagagtataacgaccagacccaccacaagaacgtagggaaacccaaatgctccgtgagaattttcagctcgccattcaattttccgtttgccgtgctttcacaagtgaaaaaaatcgtcgccactctgccgcagcagaaaaaaccccaaactatatagaaaaaaaaacagcaatactaacaacaaaatcaggaaaacaattgcaaatagaaacgtgccacataattgcgaaaaacgtttgcataacgtgaggcgttgaaaagtgcgagcaatctgcgaaagatttttccagcaaaccgtttggattttcaaggacccccgtgtgggtgtaccactggcaggtactcgctgtgtatctgtgtgtgtgtgcgaggctcaagtgcaattataaatggcgtaatttgtgcgccgtggcggccgtgtcatgaacatagccaaaccagtgcatcctagagtggacctattctgtaccaggatcaagacgactccgcgggggcgcagcaaacggacggaggctcgccggaaaagcgagttccttcgccgacagcacgcaaaatggatgaatgcgacaaccccgtcgtcgtctcactaggaaaactcgaatcacagcagctaaacgagggggtcgccgagccgagtgcggaaaattcggatcaggagcaggcactttgtgactacaaagagccgaacattgatgataaggaagcgcttatagagcaggaccttcacaaatcatcagtcgaggaggacgcagctaacgacgcggaagtcgaggcagtcatcatggtaccacaataaaatatacaattttgaatagtcgttcggagtttcgtttaatatataaaaaaattttacatagaaatggctttttagaacagcacacatatcttattaatatctcatagatagttccttgtttcggataaagtatctcgttaaagtttgtgcctgtttttgtataactattttgttcaatttgatgcattcgcctacgattgcttcgttttaccaagttcaattaagtacaactactttataaaaatgaagcactgtaacatcctacgttaattctcgtatttctcgatacaagccattcaaacccacctcgtatataggctaccatattgatagtaatcatgattccatgaaaagtatctcgcagatatgtagttattgttcgtagaaccgagtgactcatgtagttagctaatagttgtgtatgctattgtgtgttgtctcttgttagggaagtcctcgaggctcctttgtttccatgtgcctctcatctgtgctgacccgatttgcaaatgtgtttcgctttcatcctaatcgcttttcctctaaccgctttgcctcctctatttttccgtgttcccagggacaggcggagagcaagaagcagggcagcaagtcgagtcgccgccaccacaatggcaacggaaatagtaatggcaatcccacggaggcgatggaacagaatcagacggtgcacaccaaaggcaccgccatgtcctttggtttccgcaaaaagctcaatgggacgcccaagaagttcaagaaactcctggaaggcggcgacaaaagcgcaactcgcacagacacaaaggatgacaacggaaatgcaggtgggtggcgtgcacggttttcttggtaataataattgcaaattttactaaccgggtggttaagtaccattgtgacttagccacccttatttcataaaagagcatttggtttattttctctaattgggggaagtgtagaagctaaggccttgttaaatgtcaaaaaaaaaagcgaccaagcattatggctttttaatttggcgacaatttggccaatttaacaatgagttgacatgccaacaactcatcggaatcgcctcctttcttctcctcttccccgcaccagctgttcccattcacttcgagaaagtaggcgccgccgctgtacagaaggctgggactttggcgacaggtgcggccggcggacgtttcggttatcgtggggcggtgccacgcccctcttctgcaggcttcactgcgcccagtgaagattccgaatcggaatcgatggccaatgcccaaaacaacatcaacaacaacaataacaataataatggacgtggaacggagaatggtccggtgttggtgagcaattgtgagtatctgctggttgcaaaaataaaataaaactttcatccaatcaaaatacgaaactacattcgattttcccgcagtgaaacgacgctccaagagcgcacacgccggacgatccggcgatggggagcccaaaatagcccagcccaagacgctgacgttcaacctgaatcagaacaccaccatcgagtaccagcggcgtcagttcttcggcgagatcgcggacgaaacgtcgggttccggatccggatcgggaacgggatcgagagctatgcaaccgagatataactacaacaacctggccagcatgcatgccaatgtcatgtgagtaatccggatattggacacatctcatacatttgaatgtttctagaaaacaaaaaaaaaaaaaattactggaagtctatgtaaggagaataaaccaattttttatacttttccagagttcgccccacaccgcgacccactccagccagctatgccaagttcacactgcagacagtgagcctgcccaggccggagtacccggtggccatcagtttgacagccaccacaccaaccacgcccagcagcagtgtgcagtcacctgtgcccgcccattcgacaggtgccagggccaaggacatctcgaccagttccaggcaacatcctttgacctcggtccatgtccaaccacagtcgcgtcatcttgaccagaagagcgtgaagcagctaacgaataactccacacgacgaggattctccggaagcagggagattagcgccgattctgggatagccagcatggacatggctttggacagcagttcgggcagctcggtgggttccaagaggagtcggagcagaccaaggaacctaaagatggtgatgagtggacggcacacattcgaggtgcgcgatgcggatgatccgccatccagtgagtccaactcctttgtggaaccactggcactaccaaagttacccactgatggaagtcagagtattcctctgccattgctgggcttggtgcgatccaatacggtgttgagtcgggagtcttacgagcgacgtcaggcggaaacaccaggatcccaggatcagcaggattcggaaaaacccaaaaccagcggctccgatgaaagcgagagtgtggatgaagagaaactctacttggactcgtccacctccgaaaagagtgccaaacatcagagccaatcgtcagtggcttccacttggcgtcaccaggcgggtgaatctctggccgcccaggattgcagcagcatgagcatgagcatcagtagtgacacccatgctccggaaaatccgcgcgataatgacaaggaggaggacatgtccttgggtctggatgagatcagtctgatcaacactgacatgcagtttagcacaatctgtaagtgtttcgtttggttcttggctttatttttgtataaccttaaatccttaccagcttcaatgacggaaactccacccaaagtgggtcaggagtccctgctcaatcttcacctggtggacaatcgggaggcaggcacctcgcgtccccgctcctttaacaatgctcttaatgaatccaagtttgccgagctggctctggccagtagtagttgcctcctgttggatgatgagacatcgcccacagacagtttggtcagcagcaccgaagattccgaggaggctggtggcaagttgcaaaagcacaagctcaatgaggagcgtcagcagaaggacatcgatgacatcgacatagatgatatatcaccggttctcgaactggatctggatcctccaggtggacgaagtcccatttcacccggcactcccacgcatgcatcccattccctttctttgggttcggattgcggaaatcttattgatgatgagatcgccgatcagccagcattgctatgcaacagtgaagcccatgaggtggccaccgatacgcccacattgatggaaaccctcacgcacacccaaacaggatccttgagatccttgaagagtcagtcgaaggcacgtaccgctctgcagcaggccatcgagttgagtttaaggactccggcagcggtacgaaaggcagttatggatcgagccgaatccttggatactctatcgccatgcgaatccatttgctccgatgacctgatgatggacttcgatatgaacagcagcgtggactcgatcgatcacatggccagttcaacgggacgcagtcgcagtggctcggatcttcacaagattggtggtcaggatatcgatcccatgcaggcggaaactgaggcggaacttctatccgagttggaacgcaggggcagtgatgtgatgaaggagctcaatactttgctgcgaggaaggaggcagcgcggaggaccaagggagaggattaggtgagttctgatttaagttcgttgacttgttcgttgaatttttccatattgagattactcgattatccatagagtaatcgaacttaaagcgcattttaaaatgttcgaagtgatccatttccagaaataaggtcgagagttcatactatatagtatgtatttcagatgacctcttgtaactcggcatttgaactacaaattgaactgaaaatgtggtttcacgctctccaaaaccaatcctgccgccctgaatttgtaactgataaaagcatttcattttttttttggtataatttccatttcccctacctatgcgaaactaattgaattggctgcatcgggtcagaaatgcgctggcggtatcgctttgaattcgctttgatttggttttattagctcttcagttggcagttggccagcgactgttggaatattattaagtgcattcttccctcaccccaacctgcaacccaatttcattcgaggtgctgcaaatcaatcagcagcctctccccttttttagcgcaggttgtcctctctctttttggctgcccgacaaatttcagccggccggtaagtgattactcaatttagccctagaaagacagagatttacgacttacttcagggtagtacataacttataacaaaatttaaagaaatcttaaaaatagtttcaaattttattcgttttaaattccataatatcaattgaataaattgagaagtatataagtagaaactgcctagagtttttgtactaaacatctattacatagtaacatccaaaacatagtaaccattaaatcacttgctccaacctggtgttagtgtcatttaccatgcacatccagaaatattcaaccattgatttaacgaccaaaacaaacagccagcgaatcccacgtgtttgcctgtttgtctactcggttctgtttgccaaaagggcactctggggttaatcaaatgcaatttacgttggccagctcacagctttggcatggcacgcccttatccccagcccccccacttttattttaagggtaaatggaaatcgaaatggaaattgaaattagcccaaaattagacagacatcagtgggaaaaaggacaggttggaactcacaggttcgcctctatgtttgctgaagttgctaaaggttacgctgctccattggcgtctccatcatccatccactcgacattcccattgcagttcccgttccgttgtcggtcccaattgccgtgttttagcgccggctaccagaaagagaaggggctatccattggggcatgtttatggcccaaaatgtgctgcagccagcaactgcaacaactgcaactcttcgtgggccttgtgcattctgggcga

SEQ ID NO: 14732 - DNA, 3474 bp, DROSOPHILA
atgcaatggcaatggactagcccaaggggcttggtgttcggggcaccgttcgaactgaagaaggatttcgcgaagcagaaggagcacaagaccacaaaagatgccatgggcaagtgtgtctcccggcagtcggctccgctccacgaactcgcatccccagacgcgcagcatcatcaatctgtattgacaatcgcactgtcccacgaagatttggcccaggcactcaaaatctggcaacagttgacagggagtaatgaatacattgcagccgggccatcctcgcaccaggaggaggaacccttttattacactataaggcggcaaaggcaaccggagcaacagcagcagcgggagcaggagcaggagcaggccgtgttgcatatcgagtccctttacaatgatgccgccatcgccccagcggaaccagtgacatcagccagcgaaccggagtactccacttgccaggaattcctgctgcacgaactgctgcaggtcatcgaggaacatgcagcctccacgacgacgacgaccaaccacatcctgaatcagtctcgaatcaggccagaacctcaattacccgtcgagaacaacggctggctggcggtgagtggacctattctgtaccaggatcaagacgactccgcgggggcgcagcaaacggacggaggctcgccggaaaagcgagttccttcgccgacagcacgcaaaatggatgaatgcgacaaccccgtcgtcgtctcactaggaaaactcgaatcacagcagctaaacgagggggtcgccgagccgagtgcggaaaattcggatcaggagcaggcactttgtgactacaaagagccgaacattgatgataaggaagcgcttatagagcaggaccttcacaaatcatcagtcgaggaggacgcagctaacgacgcggaagtcgaggcaggacaggcggagagcaagaagcagggcagcaagtcgagtcgccgccaccacaatggcaacggaaatagtaatggcaatcccacggaggcgatggaacagaatcagacggtgcacaccaaaggcaccgccatgtcctttggtttccgcaaaaagctcaatgggacgcccaagaagttcaagaaactcctggaaggcggcgacaaaagcgcaactcgcacagacacaaaggatgacaacggaaatgcagctgttcccattcacttcgagaaagtaggcgccgccgctgtacagaaggctgggactttggcgacaggtgcggccggcggacgtttcggttatcgtggggcggtgccacgcccctcttctgcaggcttcactgcgcccagtgaagattccgaatcggaatcgatggccaatgcccaaaacaacatcaacaacaacaataacaataataatggacgtggaacggagaatggtccggtgttggtgagcaatttgaaacgacgctccaagagcgcacacgccggacgatccggcgatggggagcccaaaatagcccagcccaagacgctgacgttcaacctgaatcagaacaccaccatcgagtaccagcggcgtcagttcttcggcgagatcgcggacgaaacgtcgggttccggatccggatcgggaacgggatcgagagctatgcaaccgagatataactacaacaacctggccagcatgcatgccaatgtcatagttcgccccacaccgcgacccactccagccagctatgccaagttcacactgcagacagtgagcctgcccaggccggagtacccggtggccatcagtttgacagccaccacaccaaccacgcccagcagcagtgtgcagtcacctgtgcccgcccattcgacaggtgccagggccaaggacatctcgaccagttccaggcaacatcctttgacctcggtccatgtccaaccacagtcgcgtcatcttgaccagaagagcgtgaagcagctaacgaataactccacacgacgaggattctccggaagcagggagattagcgccgattctgggatagccagcatggacatggctttggacagcagttcgggcagctcggtgggttccaagaggagtcggagcagaccaaggaacctaaagatggtgatgagtggacggcacacattcgaggtgcgcgatgcggatgatccgccatccagtgagtccaactcctttgtggaaccactggcactaccaaagttacccactgatggaagtcagagtattcctctgccattgctgggcttggatcagcaggattcggaaaaacccaaaaccagcggctccgatgaaagcgagagtgtggatgaagagaaactctacttggactcgtccacctccgaaaagagtgccaaacatcagagccaatcgtcagtggcttccacttggcgtcaccaggcgggtgaatctctggccgcccaggattgcagcagcatgagcatgagcatcagtagtgacacccatgctccggaaaatccgcgcgataatgacaaggaggaggacatgtccttgggtctggatgagatcacttcaatgacggaaactccacccaaagtgggtcaggagtccctgctcaatcttcacctggtggacaatcgggaggcaggcacctcgcgtccccgctcctttaacaatgctcttaatgaatccaagtttgccgagctggctctggccagtagtagttgcctcctgttggatgatgagacatcgcccacagacagtttggtcagcagcaccgaagattccgaggaggctggtggcaagttgcaaaagcacaagctcaatgaggagcgtcagcagaaggacatcgatgacatcgacatagatgatatatcaccggttctcgaactggatctggatcctccaggtggacgaagtcccatttcacccggcactcccacgcatgcatcccattccctttctttgggttcggattgcggaaatcttattgatgatgagatcgccgatcagccagcattgctatgcaacagtgaagcccatgaggtggccaccgatacgcccacattgatggaaaccctcacgcacacccaaacaggatccttgagatccttgaagagtcagtcgaaggcacgtaccgctctgcagcaggccatcgagttgagtttaaggactccggcagcggtacgaaaggcagttatggatcgagccgaatccttggatactctatcgccatgcgaatccatttgctccgatgacctgatgatggacttcgatatgaacagcagcgtggactcgatcgatcacatggccagttcaacgggacgcagtcgcagtggctcggatcttcacaagattggtggtcaggatatcgatcccatgcaggcggaaactgaggcggaacttctatccgagttggaacgcaggggcagtgatgtgatgaaggagctcaatactttgctgcgaggaaggaggcagcgcggaggaccaagggagaggattagaaatgcgctggcggtatcgctttga

SEQ ID NO: 14733 - protein, 1157 aa, DROSOPHILA
MQWQWTSPRGLVFGAPFELKKDFAKQKEHKTTKDAMGKCVSRQSAPLHELASPDAQHHQSVLTIALSHEDLAQALKIWQQLTGSNEYIAAGPSSHQEEEPFYYTIRRQRQPEQQQQREQEQEQAVLHIESLYNDAAIAPAEPVTSASEPEYSTCQEFLLHELLQVIEEHAASTTTTTNHILNQSRIRPEPQLPVENNGWLAVSGPILYQDQDDSAGAQQTDGGSPEKRVPSPTARKMDECDNPVVVSLGKLESQQLNEGVAEPSAENSDQEQALCDYKEPNIDDKEALIEQDLHKSSVEEDAANDAEVEAGQAESKKQGSKSSRRHHNGNGNSNGNPTEAMEQNQTVHTKGTAMSFGFRKKLNGTPKKFKKLLEGGDKSATRTDTKDDNGNAAVPIHFEKVGAAAVQKAGTLATGAAGGRFGYRGAVPRPSSAGFTAPSEDSESESMANAQNNINNNNNNNNGRGTENGPVLVSNLKRRSKSAHAGRSGDGEPKIAQPKTLTFNLNQNTTIEYQRRQFFGEIADETSGSGSGSGTGSRAMQPRYNYNNLASMHANVIVRPTPRPTPASYAKFTLQTVSLPRPEYPVAISLTATTPTTPSSSVQSPVPAHSTGARAKDISTSSRQHPLTSVHVQPQSRHLDQKSVKQLTNNSTRRGFSGSREISADSGIASMDMALDSSSGSSVGSKRSRSRPRNLKMVMSGRHTFEVRDADDPPSSESNSFVEPLALPKLPTDGSQSIPLPLLGLDQQDSEKPKTSGSDESESVDEEKLYLDSSTSEKSAKHQSQSSVASTWRHQAGESLAAQDCSSMSMSISSDTHAPENPRDNDKEEDMSLGLDEITSMTETPPKVGQESLLNLHLVDNREAGTSRPRSFNNALNESKFAELALASSSCLLLDDETSPTDSLVSSTEDSEEAGGKLQKHKLNEERQQKDIDDIDIDDISPVLELDLDPPGGRSPISPGTPTHASHSLSLGSDCGNLIDDEIADQPALLCNSEAHEVATDTPTLMETLTHTQTGSLRSLKSQSKARTALQQAIELSLRTPAAVRKAVMDRAESLDTLSPCESICSDDLMMDFDMNSSVDSIDHMASSTGRSRSGSDLHKIGGQDIDPMQAETEAELLSELERRGSDVMKELNTLLRGRRQRGGPRERIRNALAVSL

SEQ ID NO: 14734 - DNA, 4487 bp, DROSOPHILA
cggggacagggcgacgacgacgccaaaacaagcatttagtttattaatttgacgactgccgcagggggagcagtgggccgaaacaaaaacataacgagcgaggagcgtcgtgcacccttaacgactgatgccacactaccactaccccctcgtaccgactgagtcccccttacttcacacgtacatggtgaaccctccgacgcactaagccactatatgaaccaactactcctacggccagccacctacccactagaccattcccattcccaatccccggactcagctcttggtattaacaccgtattatcgattgatttccagcacaagcacacaacaaaaatcaataggctgccagagccaaaatcaaatattgtacagttctgtgattgtttagttcagtgttgtcgtaaaagttataaacaatttgtagactcgaatgtatacttacgccttaataaatggattttcaaagtacgcgcccaaaacgtttaaatgctacatttaactggaaattcaccttgtctcgcctcttggtttttttatttggtttaaaatctctttaaatcactggatgaattggatggagtccgtggatttttgggggaccgtgcttgttcgttatttgttgtcaattaataatttgttattgctcttcattgagaacgctggggaaaaccgtgcgacttggacttttgagctggggaaactgcgcagcgcgtcgcttgagctttcgcgttggtggccaccgaacgaataaaatcgcagtcaaagaaacaggaccaaaaggactctcccaggcgagagagagagagagagagagagcgattgagattgacggggtgcgagccacgggatgcgacagtgagagagagagagagagggagcagccctcgtcctcacgtgcgcattgttattgttgtggttggttcgaagttggatacgaagcgcgcgtaaaattgatttcctgagcatattgattttcggtatctcacttggcctacaccgcctcctcggccccctgagtttccgcctgctcagtttcctgcccatcctcgtcggccacctcctttaccacctccatttgttcctcctgggttcctaccgccttcttttcattgtcctccttagccattgcctgtttctccaactgcgtttgcgatgctgacgatgtgtcctgctttaagagttctcgcaaaaacatggtggcataggcagccgtgggcagcgagaactccagcaggagtgccatgtaattggcctcagcttcagctggttctggtgcaaccggaatgttcttcaatagctcccagtcggaggcgataagtgtatcctccggcgtattgtacattctaaagctccacttgagatcactggacgatatgatcatcttgcggtaggcgccagccaatgcgtatgtcttctccttgtgcttcagttgatccgaggaaagacccacttcggcgagcatttcctcgtaccacgcgccgcactcgttgctgggataggtgatgtcgtgtccaggcaggggaaggaccacatcgcaaagtttgtacttgccgctagcgatgtcttctgctgtgagcgggcgaacctttcgcttgaaaatcgactcctcttcgatggcttcatccccttcggggacttccagaggttcatcgttaggctcctcttctttttgctcttccaaggcctcgccctgctgcgcctgctcttccgaggcttccgactgatcctgctccacataaaccaaatccccgggtatcaatttcaagccgaactccttaattcgtctagacgctatcctgttgaagatcaggctttggtaagcatgtggatatagcatgagcatgttgcgtggtatctgccgcagagctgatgagtaatctgattcaccaaatctggccaagccgtccagcagcttcttttcgatgaacttttcgccgtagatctgtgcagctgccgccgcggagtcgcgatttttccaccactcctcgcgtatgggacgcaaaaactccacatccgagtcccggggtttcaggatcagttcgcaggccagtttgtaatcgtgcttgagcagagcaacacccacctcataggttgggacactggcgctgttgccgaaccgctgcaagccatagtagttgatgaagccgcgttccttcaatgattgcagtgcctgctcgatttcttctcgcttctccttggcaatgtgtcgcaaggcaatacgaaaacgattgccctgcaaatcgcctagcttcagtgtattggattcgaatccaaagttgccgatatgaacattccgttgggagcgagctgcaaccaaaatgctctctggtgtacgacgcttgacggagaacttctgggtggttttggcccgcttgtccttgatgccgctgtagttcacctgcgatggtcgtaagctgtagaaaaataatgttttcttagtatattaaagcatttaaaatttgatcaaacttacttcagtcgcgctgctaaagtagaggccacatcgctggtaaccaaattggttttgtgcaccaggaaggtcacgtaatccgccggaaagctccagcgtttgtcacctatggaattcgatgcataaaaaaaggaattccctgggtaatcatttctactaaccgcgtcctggctttggtttaaatacttttatagtcttcttctcctctgccggcacctgtgagtctttctgggttgaggtttcaccttcagccgcatccttattttccaaagatgcctcctcctggaccttcggcttagcctgctgctgtccaatggttgtggacagtagcttgcccttgtaaagctgttttatcatctggtggacttgtgttcgctgctccttatccagagtggtcacatcaatctccaccttttgctcgatcgcgggatcgtttttggccttagccagattggctatatcctgccaaacttccgggccgattactgcctccagttctttccgccagttgtccagttcgttttcggccacagctgttatagtatgagatgcatgagcataagcaagtatgcaggataattggtgaatacagacccacaatagccactttaggcacactgagatcgttcagttccagaacctttccattgctatcaatctcgttcacgtgaaaatcagagaagcgagacttaagtattcccgtgaagccaggtgcctccgggttagtgaactccgtaatgcccacttgggtctccagcagcgtggatttctgttgtggagcacttttgtccaacgaaaaacgccggttaacaacgatattatttatgggatttaatttgtacctgttgcgctgaccgccaccattgttttgggggcgatccttcttctgaccacgccagttgctcttgttgtatggcccggaatggttattcctacgtcctctgccccgatccttgcccatcttggttcaaaattcgcgtttgaaaatttgtcggcaaatgaaatccacgttttgcacaacatatgatgtgcccattcacaataagctttttaggtttattagggtggccgcatgtgccatttattcgggaaatagatttcttaaatggttgttagcataagttcatccgcaaatattcctctttttttatattgtatgataaatataatttaaaaacatgcttaatattaacatatcataaaacttttgttagtatattttcctcatttatacttcagtattttttggtatttttctggtcccagatcaagttcacactgcgtacgtaatgtaaagaaaatgtgcaatacaaagaagcattggaaagaagtgtaaaaattgagaaataaccaaaaattggaacggattaattcattaggttaagccaaggaagcaacgaaatgttgccgcatataagtgccgacgaggcacagccgtctatgtcgcgaaaggtgtacatcaatccgaattttcagctgcaaggtcaaacggcgcatcagctgccgttccaagtgcccttccaggcgttccaggcgccactgcagcctcagcccgcgatccatatcaatccgcactttctgaatcgccagcgggccatgtacgaccaataccagcgggagcagcaggagcagcttatgatgcaacaagtttccgcctcgcactatcgactggatccaacgatacacctactggcgactccacctcctccgcccgccaagatcatcagcaaagtgagcacgtgtctcgtgcgcaagccatcagtggtggcaagtggtccggcggtgaagctcgctgcttcagtacctgtgcccactgtttccagcctggtgcagcctccattggtaagcatttccaagcggaaaattgtgaggcaaggagcattgaaagcagcgccagcggttgctgccctccatcctcctccacctgctaaacgcactaggtacaaattagtgcgttccatatcacttacctgcacaccgctggtcaaaaagcgtcgtcctctacgcg

SEQ ID NO: 14735 - DNA, 2252 bp, DROSOPHILA
tggatttcatttgccgacaaattttcaaacgcgaattttgaaccaagatgggcaaggatcggggcagaggacgtaggaataaccattccgggccatacaacaagagcaactggcgtggtcagaagaaggatcgcccccaaaacaatggtggcggtcagcgcaacagtgctccacaacagaaatccacgctgctggagacccaagtgggcattacggagttcactaacccggaggcacctggcttcacgggaatacttaagtctcgcttctctgattttcacgtgaacgagattgatagcaatggaaaggttctggaactgaacgatctcagtgtgcctaaagtggctattgtggctgtggccgaaaacgaactggacaactggcggaaagaactggaggcagtaatcggcccggaagtttggcaggatatagccaatctggctaaggccaaaaacgatcccgcgatcgagcaaaaggtggagattgatgtgaccactctggataaggagcagcgaacacaagtccaccagatgataaaacagctttacaagggcaagctactgtccacaaccattggacagcagcaggctaagccgaaggtccaggaggaggcatctttggaaaataaggatgcggctgaaggtgaaacctcaacccagaaagactcacaggtgccggcagaggagaagaagactataaaagtatttaaaccaaagccaggacgcggtgacaaacgctggagctttccggcggattacgtgaccttcctggtgcacaaaaccaatttggttaccagcgatgtggcctctactttagcagcgcgactgaacttacgaccatcgcaggtgaactacagcggcatcaaggacaagcgggccaaaaccacccagaagttctccgtcaagcgtcgtacaccagagagcattttggttgcagctcgctcccaacggaatgttcatatcggcaactttggattcgaatccaatacactgaagctaggcgatttgcagggcaatcgttttcgtattgccttgcgacacattgccaaggagaagcgagaagaaatcgagcaggcactgcaatcattgaaggaacgcggcttcatcaactactatggcttgcagcggttcggcaacagcgccagtgtcccaacctatgaggtgggtgttgctctgctcaagcacgattacaaactggcctgcgaactgatcctgaaaccccgggactcggatgtggagtttttgcgtcccatacgcgaggagtggtggaaaaatcgcgactccgcggcggcagctgcacagatctacggcgaaaagttcatcgaaaagaagctgctggacggcttggccagatttggtgaatcagattactcatcagctctgcggcagataccacgcaacatgctcatgctatatccacatgcttaccaaagcctgatcttcaacaggatagcgtctagacgaattaaggagttcggcttgaaattgatacccggggatttggtttatgtggagcaggatcagtcggaagcctcggaagagcaggcgcagcagggcgaggccttggaagagcaaaaagaagaggagcctaacgatgaacctctggaagtccccgaaggggatgaagccatcgaagaggagtcgattttcaagcgaaaggttcgcccgctcacagcagaagacatcgctagcggcaagtacaaactttgcgatgtggtccttcccctgcctggacacgacatcacctatcccagcaacgagtgcggcgcgtggtacgaggaaatgctcgccgaagtgggtctttcctcggatcaactgaagcacaaggagaagacatacgcattggctggcgcctaccgcaagatgatcatatcgtccagtgatctcaagtggagctttagaatgtacaatacgccggaggatacacttatcgcctccgactgggagctattgaagaacattccggttgcaccagaaccagctgaagctgaggccaattacatggcactcctgctggagttctcgctgcccacggctgcctatgccaccatgtttttgcgagaactcttaaagcaggacacatcgtcagcatcgcaaacgcagttggagaaacaggcaatggctaaggaggacaatgaaaagaaggcggtaggaacccaggaggaacaaatggaggtggtaaaggaggtggccgacgaggatgggcaggaaactgagcaggcggaaactcagggggccgaggaggcggtgtag

SEQ ID NO: 14736 - protein, 734 aa, DROSOPHILA
MGKDRGRGRRNNHSGPYNKSNWRGQKKDRPQNNGGGQRNSAPQQKSTLLETQVGITEFTNPEAPGFTGILKSRFSDFHVNEIDSNGKVLELNDLSVPKVAIVAVAENELDNWRKELEAVIGPEVWQDIANLAKAKNDPAIEQKVEIDVTTLDKEQRTQVHQMIKQLYKGKLLSTTIGQQQAKPKVQEEASLENKDAAEGETSTQKDSQVPAEEKKTIKVFKPKPGRGDKRWSFPADYVTFLVHKTNLVTSDVASTLAARLNLRPSQVNYSGIKDKRAKTTQKFSVKRRTPESILVAARSQRNVHIGNFGFESNTLKLGDLQGNRFRIALRHIAKEKREEIEQALQSLKERGFINYYGLQRFGNSASVPTYEVGVALLKHDYKLACELILKPRDSDVEFLRPIREEWWKNRDSAAAAAQIYGEKFIEKKLLDGLARFGESDYSSALRQIPRNMLMLYPHAYQSLIFNRIASRRIKEFGLKLIPGDLVYVEQDQSEASEEQAQQGEALEEQKEEEPNDEPLEVPEGDEAIEEESIFKRKVRPLTAEDIASGKYKLCDVVLPLPGHDITYPSNECGAWYEEMLAEVGLSSDQLKHKEKTYALAGAYRKMIISSSDLKWSFRMYNTPEDTLIASDWELLKNIPVAPEPAEAEANYMALLLEFSLPTAAYATMFLRELLKQDTSSASQTQLEKQAMAKEDNEKKAVGTQEEQMEVVKEVADEDGQETEQAETQGAEEAV

SEQ ID NO: 14737 - DNA, 7189 bp, DROSOPHILA
taaatataatttacaagttatttacggatcgcaatgcgctcgtgtgtgggtgcattaccgaagtaaacgggtttgccgcacttgtggcacttccacattctggattccaaacaggtcggtctaatgcttcctccgggaatgggcgtgtttcactcctcctcctctacttcgccgattttaaagagttgtgacgtaaagccgtcgagttgtatgcaaatgaggcgatttaaagcggacacgaaacgcaaatagaacgctggacaaggggtaaacacatgaggcgaggggggacgtgagactctgatcggtcagtcggtcagctgcgctggttgccgtgcgaaactcatagttttataaatgaaactggcactgggcactcccacacttggtgcacggtgcaggtgcatcggttttcggtgcgtacttgtgtggataattgcacttaaaccaaaacagcaccagcagaaagagaacagaacaatgaaatgaaaaatggcacttgtgcagcactggccgcggattcttgtcgcacaaggcgggcaccctaaaatccagcggtgctgtcagctgatctgttttgtagctagatttgacttggctggcggtagcttgaaacggatttgcttgttttggtgtttaaaattgtcatcgtttgtactttaaatacatctacattgattatggctagaacccaaatcttttttgggctgtatcttcttttagggaatttaagttcctaattagcttcttcttagctacaaaagtttccaacactgataaaccgtgctgacaatgtcaatgtgcgttgttttatgcctttgaattgaaatcttcgtaactaatcgagttttaaaacgaaaatcagcacaaggaaaacactaagcattcaatacatttaaaattttaaaagatatgagcaaaagcaaataagcccgccaaagtgtgtgaccattcgcgctgctagatttgttttcgctgcgagtgcgggcacaccgatctgctctagtagaaagtgagacgttttaatttgttgtctctgcgcgctgtgtaaatttggtaaattcggccccgaatcgcgtaaattggcgagtttcgctaattagggccagtgctcaacgtgtgtagccgtcgattgccaaggatgcgactaatcaccatatctcctgctgcccgcaattagcttctcccagagccgccctcgaaaatcgcgcatcgaaatccccacttcagcaaggaaagcaaagcaaagcagagcagcagcaacaggccaacaaagattcacgggcctcaattagcgtagcgaaatagccagcagtgcagtctaggtgctgcttgcgtggtggccaaaatgcgcgccaccatcgagttcgaggagtgcctgaaggattctcccagattcaggtgcatataagctgcagccccgcccccactgtgtgcccatcctgagccgcatttggcgtgagattcgaattgctccatgtagcgtgactggttactatccaaaaccagatacagcccaacaccgccccacctgctccacctgaaaacgcggcttaatcatccatcgaacaaactttgtcccgtcagcagtgtggaatgtgcctgcctgcccctttatttccgcaattaaattgccgatgctctcgtctccgtccgcgaacgcttcaatgcccgccgctgattgataagatttcacccaaattgccgcttctccactaatcgtgtccaaagacaaaagctttccctcgtaaaacggtgcacaaacgcggcgataacttgtttgcccagcagccccatcacatcttccccactttttcgcacctgcagcagcttcacttgaaagaaaacaggaaatcaagactatcttggattctcctgcacttcggttcttttatcatttgtggaagtgccaacttgaccttggtgtttcgaaaccgaagtacactacaataaattatgtgaatcatatgtgaacttttctgccatgcatataaaaaataagaaatctaaggatctgtaaagtaggacatttctattgcttcagaactaggcagatattatcgcaaccatagtaaaatgtatcaatgttatgcatttttttaaactagcttaaactagtttccagttttaagtagaattaaacgatttattttttatcaaaaacttcaactcattgtgcatttggctcaatcgtttgaatgacgaacacatatttgaagatatatgaagctttcgaaagccattagtttaaaatgaaaactgtgtatgatagcaatattatcacggaatacgacttttcaaagccactctcagaatgaattgactgctgaaatagacagacctccattcgaaattaccatgtagctagcctctggaacgagtacgtccaagaaaataaacacaaagttaaaacaaaagcaatgcccgacaaatcgatggatgacacaggggaaaaagacgagaaaaacccgaagaagacgcaacagagtgatacaaaaacttgtccccagagatggggtatcctcctccttcttcacttggtggcgactcgtgttcaattggaagagcaaacagcgctttaataagtccgcataaattaaaagtgtcaacataaacagaggcagagtgagagcgtcggatcatccgctgcccccgcgataacttctttgattaagctggttgattatgtttactctgctcagccagtcaaagacgattttaatcaccagctcactcgcaagccgatgcccatcttttgtttacatctcgacgatattgtgctaacgttttcgatttgtttttttttttgtgcttctcgccccgcagacaatttgtttccaaggaggagagcgacatcgagcacttggagcagcgcttggagaaaatcatcaagctgtgcaatgtggccgtggactcgggcaaggagtatgtcaagaaccagaggtaaacaacacactgcgccattatcctagctcattcatattcattggcatcgattcgccatattctcgactttttagcgcctttgccatgtccctgtgggatctacaacagcactttctcgacaataagaacgcgcacaatgcgctgggcaagctgattcactgcttccaggtaatcgcttcagtgacatcctatatgggctatataaaccttgtgtgctgtttgttttccaggagatgaacaagttccacaccatactcttggatcaggctagccgcacggtgcttaaaaatctcagtgtgttcgtgaaggacgacattaaccaggtgaaggactataagggacattttctcaaggtttccgaaggctatgacaatgcgctgattaaaaacgctcaggtaagctggacatgcagtaaaggtgatatgatagccttatccttgatttctgcattgcaggccagcaaaaaccgaccgcaggagatgcaggaggctgccaatatcctttctgcctcgaaatcgtgcttccaacacaccgctctggattatgtcaactatataacgctagcgcaggctcgcaaggtcccctcaatactatccacggtaaggaaagggcaagtattgcttgccaataaagtattgcttatcggcgttcgattgctatgaatgccatgaatgaagtgctcaacttccactaagtaaataactttcagtggtttgttattgctatgacgtcactgttgtgatatcaacatgagcatgtatgggtttcatatctaaaaccaatgatcagcatgttgagtcagtcggtgcgctggccaattcgctcagttgtctatcgggagtgcgctgagctggattgccgctgtcggtaaaggctggagaacaatagccgttattctttgcatttggcacgttttcatgttggtctcctctgctcttttttttcggcagctgttggattactatcaggcgtgcgtgacctattaccaccagggcttcgatctgtgcaacgacttcgacgagttctttaagaatatcagcgaggatttgaacgctttgcgcggtgactatcagcagctggagaaggccatgcagaatcgccatatgagcgttaatcgctactgcgactcgaacaccaatagcacgtccaacaagatcgagggctacctattcaagaagaagtccaagggcttcaagacctggtgccgacgatggttctacctcagcgacaaccagctcgtatataggtgagtggacgctcccttacaactgctattcacgtagtccatccagatacatacgtatgccatcccatctgcttgcttagttaatcaatcgtcttcttttcgtttgcaacttttgatttttgtgatgtttttgttgtgtggtgtaatgtgatgtgttgtggccgtacgctgaagtgatttggattcgcattgcagaaaacgcagcaacgaggactcgttctcggtcatggaggaggatctgcgcatctgcagcgtgcgcccggtaaacgagggtgaccgccgtttctgcttcgaggtcatctcgccgaccaagtgagtatttcgtgtttgatttgtcatttgtcagacaaaggaattcatttgttcccctttttttttagatctcacatcctgcaggctgactccgctgacatgctttccctgtggatttccgcgctacagcacagcatcggtgctgccatccagcatgactccacgcatcactcgcgaccacaatcgacgaacgcacccaataattcgctgcccgcaaagcgtagaatgtatgtttgaatcacccgtattatccagttttataataatgaattatttcccatttctcagccactgggaagagttcctgaagataccgggcaacgcatattgttgcgattgcaggagccccgaaccacgctgggcctccattaacttgggcatcaccctgtgcatcgagtgctccggagtgcacagaagcctgggtgtgcactacagcaaggtgcgttccctgacgctggatgcctgggagtcggagaacgtgaaggtaatgatggagctcggcaacgaggtggttaaccgcatctatgaggcacgcatcggcgatgattgtgggctcaaaaagcccacggagcagtgcgagatcggagtgcgcgaggcttggatcaaggcgaagtacgtggagcggcggttcgtctgcggtatgcccaaaccgcaggagctgctggccagcgagacagccgaagtgctgagcatagacagtggcggcgtggtagaggacggcgagagtggaggcagtggtatcgctaagcgagctactctgtcgctgggcggcacgcgaaagtgggcggtgaagaaacttcgacgaaggcagaagcagcgctcgatcccaaaaacgttgagcgatgatccgagcatctataacacagccaaaaccggcgacgagttggaagatgacgatgatgatgaatccatcaacattccctcgatgtcactaagcatttcacgcgacgatttgcttgtgatcggcgatgacctggctcttgacagactagagactcccggcattctgggcagcgatcaagagagcaccgatggcgagtcagatgcggagtcgccagaggaactgcccttctcccagctagacgccaatcaattgctgtacatggcttcggtggtgcacaatctaccagtgatgtgcatggccttcgcattgggtgccgacaagatgtggaaaaatccccaagaccggcaacgatcgtttctgcaccaggccgtcatttccggctccgtgatggcctgcgagtttttgctactaaacggagccgccatcgatgctgtggacgagatgggctacagcgccctgcacatatcaacggccaagggtcacatcgcccaagtgtatttgctgttgaagcataaagctgcatacgacctctcctccagtgacggaaagaaggctctggacattgcagtggaccaggaaaacgcagacattgtaacgctgtgagtaagaaagcagagcttcaatccggcagatacataaccattcttgtttcagactccgattgacacaactgaatgacgagattggacccaacgacgagtacaatggcgaagatgagacgtacaagaacgtaatgaaggacttctccaagttaccagccagccagacgcgagttctgcgccagcggcacgactcaaatacactcgaatcgcagcgcagctcgcttacaaactccgactagcagtggcagaagggccgcaagagttaggaccttactggatattatggaataatttgttccaattattaggatagcgtgatattggattgttattggctttataacgcattaaccaggaatgttaaacggtttcgacctctaaggatgtcgttgcgggcttgtttcccttggtaatctcatttgaaaagcgcttccgattatacaagaaaatattattcattgcatttggcattcgaatggcaggcacgatcgttcgttttctcttaggcgcattttgaatccgtttttggcgattagcttaagtttaaagtattcgtagagcagttgagtttattaaaaatacgtatatttgcctataaaattgtacatcgtcttatgtggtatttattaaacgatattgtaaaatgtacgtctagctatatgtatcttgttacagagctgttccaaatgttccgatttgtatttgtttgctaaactgtttaatgctgcatgtttctaaatgttttaacgctatcatgttgatgatttttggtgccaactgttgtgagcactctaggttcgcgaataaagttgtaaaatattcagatcaatcaaagttggtctcttcaggtgtaaaacatggtggtccaatctgcggtgtattggtaaaacatgtccagggactattctaggccacagcttgaaactcgttcgtctcggatatgtagtctgtgagcttgttcttcaccttgtgcattgtggttacatgtctctggaccgcactgcgatcgttaaactgacggccgcactgtttgcaggagaacatgacgccagcgtgggtgaccagatggcgactgaggcccgaaacatgattgaagctacgatgacacagatgacacttgtgcgtccgagagttgcccatatgcacgcggccaatgtgctgctgcaggttggacttctgggcaaagcagctcgagcattgggggcactgatggcgctttactcccgtatgggtgtccat

SEQ ID NO: 14738 - DNA, 2835 bp, DROSOPHILA
ctctagtagaaagtgagacgttttaatttgttgtctctgcgcgctgtgtaaatttggtaaattcggccccgaatcgcgtaaattggcgagtttcgctaattagggccagtgctcaacgtgtgtagccgtcgattgccaaggatgcgactaatcaccatatctcctgctgcccgcaattagcttctcccagagccgccctcgaaaatcgcgcatcgaaatccccacttcagcaaggaaagcaaagcaaagcagagcagcagcaacaggccaacaaagattcacgggcctcaattagcgtagcgaaatagccagcagtgcagtctaggtgctgcttgcgtggtggccaaaatgcgcgccaccatcgagttcgaggagtgcctgaaggattctcccagattcagacaatttgtttccaaggaggagagcgacatcgagcacttggagcagcgcttggagaaaatcatcaagctgtgcaatgtggccgtggactcgggcaaggagtatgtcaagaaccagagcgcctttgccatgtccctgtgggatctacaacagcactttctcgacaataagaacgcgcacaatgcgctgggcaagctgattcactgcttccaggagatgaacaagttccacaccatactcttggatcaggctagccgcacggtgcttaaaaatctcagtgtgttcgtgaaggacgacattaaccaggtgaaggactataagggacattttctcaaggtttccgaaggctatgacaatgcgctgattaaaaacgctcaggccagcaaaaaccgaccgcaggagatgcaggaggctgccaatatcctttctgcctcgaaatcgtgcttccaacacaccgctctggattatgtcaactatataacgctagcgcaggctcgcaaggtcccctcaatactatccacgctgttggattactatcaggcgtgcgtgacctattaccaccagggcttcgatctgtgcaacgacttcgacgagttctttaagaatatcagcgaggatttgaacgctttgcgcggtgactatcagcagctggagaaggccatgcagaatcgccatatgagcgttaatcgctactgcgactcgaacaccaatagcacgtccaacaagatcgagggctacctattcaagaagaagtccaagggcttcaagacctggtgccgacgatggttctacctcagcgacaaccagctcgtatatagaaaacgcagcaacgaggactcgttctcggtcatggaggaggatctgcgcatctgcagcgtgcgcccggtaaacgagggtgaccgccgtttctgcttcgaggtcatctcgccgaccaaatctcacatcctgcaggctgactccgctgacatgctttccctgtggatttccgcgctacagcacagcatcggtgctgccatccagcatgactccacgcatcactcgcgaccacaatcgacgaacgcacccaataattcgctgcccgcaaagcgtagaatccactgggaagagttcctgaagataccgggcaacgcatattgttgcgattgcaggagccccgaaccacgctgggcctccattaacttgggcatcaccctgtgcatcgagtgctccggagtgcacagaagcctgggtgtgcactacagcaaggtgcgttccctgacgctggatgcctgggagtcggagaacgtgaaggtaatgatggagctcggcaacgaggtggttaaccgcatctatgaggcacgcatcggcgatgattgtgggctcaaaaagcccacggagcagtgcgagatcggagtgcgcgaggcttggatcaaggcgaagtacgtggagcggcggttcgtctgcggtatgcccaaaccgcaggagctgctggccagcgagacagccgaagtgctgagcatagacagtggcggcgtggtagaggacggcgagagtggaggcagtggtatcgctaagcgagctactctgtcgctgggcggcacgcgaaagtgggcggtgaagaaacttcgacgaaggcagaagcagcgctcgatcccaaaaacgttgagcgatgatccgagcatctataacacagccaaaaccggcgacgagttggaagatgacgatgatgatgaatccatcaacattccctcgatgtcactaagcatttcacgcgacgatttgcttgtgatcggcgatgacctggctcttgacagactagagactcccggcattctgggcagcgatcaagagagcaccgatggcgagtcagatgcggagtcgccagaggaactgcccttctcccagctagacgccaatcaattgctgtacatggcttcggtggtgcacaatctaccagtgatgtgcatggccttcgcattgggtgccgacaagatgtggaaaaatccccaagaccggcaacgatcgtttctgcaccaggccgtcatttccggctccgtgatggcctgcgagtttttgctactaaacggagccgccatcgatgctgtggacgagatgggctacagcgccctgcacatatcaacggccaagggtcacatcgcccaagtgtatttgctgttgaagcataaagctgcatacgacctctcctccagtgacggaaagaaggctctggacattgcagtggaccaggaaaacgcagacattgtaacgctactccgattgacacaactgaatgacgagattggacccaacgacgagtacaatggcgaagatgagacgtacaagaacgtaatgaaggacttctccaagttaccagccagccagacgcgagttctgcgccagcggcacgactcaaatacactcgaatcgcagcgcagctcgcttacaaactccgactag

SEQ ID NO: 14739 - protein, 828 aa, DROSOPHILA
MRATIEFEECLKDSPRFRQFVSKEESDIEHLEQRLEKIIKLCNVAVDSGKEYVKNQSAFAMSLWDLQQHFLDNKNAHNALGKLIHCFQEMNKFHTILLDQASRTVLKNLSVFVKDDINQVKDYKGHFLKVSEGYDNALIKNAQASKNRPQEMQEAANILSASKSCFQHTALDYVNYITLAQARKVPSILSTLLDYYQACVTYYHQGFDLCNDFDEFFKNISEDLNALRGDYQQLEKAMQNRHMSVNRYCDSNTNSTSNKIEGYLFKKKSKGFKTWCRRWFYLSDNQLVYRKRSNEDSFSVMEEDLRICSVRPVNEGDRRFCFEVISPTKSHILQADSADMLSLWISALQHSIGAAIQHDSTHHSRPQSTNAPNNSLPAKRRIHWEEFLKIPGNAYCCDCRSPEPRWASINLGITLCIECSGVHRSLGVHYSKVRSLTLDAWESENVKVMMELGNEVVNRIYEARIGDDCGLKKPTEQCEIGVREAWIKAKYVERRFVCGMPKPQELLASETAEVLSIDSGGVVEDGESGGSGIAKRATLSLGGTRKWAVKKLRRRQKQRSIPKTLSDDPSIYNTAKTGDELEDDDDDESINIPSMSLSISRDDLLVIGDDLALDRLETPGILGSDQESTDGESDAESPEELPFSQLDANQLLYMASVVHNLPVMCMAFALGADKMWKNPQDRQRSFLHQAVISGSVMACEFLLLNGAAIDAVDEMGYSALHISTAKGHIAQVYLLLKHKAAYDLSSSDGKKALDIAVDQENADIVTLLRLTQLNDEIGPNDEYNGEDETYKNVMKDFSKLPASQTRVLRQRHDSNTLESQRSSLTNSD

SEQ ID NO: 14740 - DNA, 2876 bp, DROSOPHILA
gaggaagtccagtggattcagcaactacgaaggatgttatccatcgccaccgctctcggccaatcccaactcccagcaattgccgccaatacacaacctctacggatctccagttgtgggcggattacccttaccggaacctggaagcttctgcacatcaccgtccgcttcatcgtccgcctctttggattataccaataactttgatgaacctcaaggaaagcgtttcaagcacgagtcctcctgctctccgaatagctcaccactgaagaaccactcttcgggaggtcccgtcgagatcacgccgctgatcaacgattatgccgattccagcaaaaggatccgcactgccttcaccagcacccagttgctggagctcgagcgagaattctcgcacaacgcctacctatcccgcctacgtcgcatcgaaatcgccaatagattgcgcctttccgagaagcaggtgaagatctggttccagaatcgccgagtcaagcagaaaaagggcggctccgaaagtcccaccttcaatctgtccaccaactccaatggaagtccgcaagcatctccagtgtctccccaagtcaaagtccacgaattgaaggttgaggcgtagaatcaatcacctattaaaccataagaataatgtaattgtacagtagattttagtctgttttcagtcataagtatgttaaagtaaataaattttaatcaaaatgaaaaacgacgtttttgggatagataaaccataatagaaagcaatgatttatttatgcaaagtgggttcacatctagcagctaagttggcccaagatggctttactaaaaaatactaaataattttaaattacgaaccaattaaatgaatataataaatatatagcagccctggaatatccctaaaaataccaaacgctagtgtcgatatttcgttccaaatttgtgctgtcaatcaaaacgaacaaaattttcattcccaaaaatttagtcgttgtcgagactttgctgtaatcatgtcgaatctgtacaccgaattgaagaacgagtggagcaaacatgcgcccaacctcacccactgctcccgcctcctggatggcttcaaactggagctggtgaggtcaaactttggaacaatccaaactgcatcgagttccaagcaaaaggatcagctaatcaaatcgcgggagatgctggaaatcgccgtggaacatagcatcaccatcaaggattatgctgccttcgagagatatatggcccagttaaatacctactactatgattacgataagtacttggaatcatcgaagcacatgtacaagttcatgggcctaaatctgctctatatgttggctaccaatcgccttgccgacttccacatcgaactggaacgtttgccgacggctttgctgctccatgatagcttcatccaacccgttttggctttggagaactactacatggagggcagatacaacaagatactgcaagccaagaaatctatgccctcggagatctattcgaattttatggacatcctggtgaacacggcgcgtgaggagatcgcatcctgcatggagaaatcctatctgaagatggcgcccaaactagctgctcagcgtttaggccttcgtcccggttccaaggagcttttcgagctggccactaagcgccagtggtgtctggacgaggaggggaactacgactatgctggacttcataccagacctatggagaaggttcctgccaaggacatcgccacgcataatctcacctatgcccaagagctagagaaaatagtttgaattttctcattagatcaattcttgcttctaatcccctcaaccggaaaataatatccagaatttatacattcgtccaaaaatcagtaaatagcgaaccggaaatttgtcagatttaatttttcacacatctcaatggcttcactcgtttattttttggcataaaatgtgcaaaaattgagttgctcagagggccgctaagtcgacaggcttgacaaattatgcgattgggaatgttttccggcgaaatctcatttgcaaatctttcataggatgattgttagagctgcttagtgagtggcagtctaatatgatggttgttaggataaggatatgtgtttcataggaaggtagttaggcctaaaaatttttgttcccaagggattttagggttccttttgggaaaaataatctataaaatcacagcttttaatatgttctttttgatgaaattaaagtatttaataagtatttaattttacaattttgtttggaatgttatcgaagttaggtatacagaatgaaaccatttattaattagtttcgccagaacattgaatatatccccaggcgaaatgtgtggtctgccacctataaagaaccgcaaatgatgacacctcatcatttttgctgaatcatcaaaacttataattaatcaaggacatttttcgcctctggagtggggagagtttttatccatttcccacgacacttcaaattgcacaaaccgatgatgccaacttggccgatgcctatcagccgagatatggcagtgatttgcccaaaatcgagatggttgacaaacccaaaacgaatcatgcgcaacaaaaccagacggagccgactcattcagcattcattgaacggcggactgacaatttctcaatgggtcctctaacttggaaccgaaacgaggactaactcatccttttgtgcgatcccaaggggtgcggtgctaataaacgcaattgcacctacgcccctctgggccttcggtccgaaaatggaaatcggaatgccaatgggcaaaatagcccagtcggcggttttaaacggaatttcggtattccattctcc

SEQ ID NO: 14741 - DNA, 876 bp, DROSOPHILA
ctttgctgtaatcatgtcgaatctgtacaccgaattgaagaacgagtggagcaaacatgcgcccaacctcacccactgctcccgcctcctggatggcttcaaactggagctggtgaggtcaaactttggaacaatccaaactgcatcgagttccaagcaaaaggatcagctaatcaaatcgcgggagatgctggaaatcgccgtggaacatagcatcaccatcaaggattatgctgccttcgagagatatatggcccagttaaatacctactactatgattacgataagtacttggaatcatcgaagcacatgtacaagttcatgggcctaaatctgctctatatgttggctaccaatcgccttgccgacttccacatcgaactggaacgtttgccgacggctttgctgctccatgatagcttcatccaacccgttttggctttggagaactactacatggagggcagatacaacaagatactgcaagccaagaaatctatgccctcggagatctattcgaattttatggacatcctggtgaacacggcgcgtgaggagatcgcatcctgcatggagaaatcctatctgaagatggcgcccaaactagctgctcagcgtttaggccttcgtcccggttccaaggagcttttcgagctggccactaagcgccagtggtgtctggacgaggaggggaactacgactatgctggacttcataccagacctatggagaaggttcctgccaaggacatcgccacgcataatctcacctatgcccaagagctagagaaaatagtttgaattttctcattagatcaattcttgcttctaatcccctcaaccggaaaataatatccagaatttatacattcgtc

SEQ ID NO: 14742 - protein, 262 aa, DROSOPHILA
MSNLYTELKNEWSKHAPNLTHCSRLLDGFKLELVRSNFGTIQTASSSKQKDQLIKSREMLEIAVEHSITIKDYAAFERYMAQLNTYYYDYDKYLESSKHMYKFMGLNLLYMLATNRLADFHIELERLPTALLLHDSFIQPVLALENYYMEGRYNKILQAKKSMPSEIYSNFMDILVNTAREEIASCMEKSYLKMAPKLAAQRLGLRPGSKELFELATKRQWCLDEEGNYDYAGLHTRPMEKVPAKDIATHNLTYAQELEKIV

SEQ ID NO: 14743 - DNA, 4746 bp, DROSOPHILA
cacccacacgcggatgtccggatcaatcagcagctccgtcatattttaattgatctgtgagattttcctgtttttcggcccaattttcacccaactggctcaattggattggggatgacagtcgattatttatccgataaatgtgacaggtcacgttcggaacatttatcgatagcttatttcacttttaaaaacataggaacacttatttaattgaacacattaagtgaataagtgattaattacctgtgatttgtacccaaatccagtatattcaaatgcatgtaagctgatatatttacgataatatatgtttttacacaatattcacagggaataccccaattatgtgaacaaatcacaggaattcgatgtataagtaaattttcgtgtcatcgattcccgacatgaatgcgacaactctgcagaccgagaatgtaaattttgatcgaatcgaatttgttggactgctgcaaagacgccaagtgaaaaccgagatttgctgaacaaaaggaacacattgccatggaggccaagaccgacgcacccatctcaccagcgcccacaacaaatccgccggcagaagctggcaaggagccaaatgcaagcagcaatgcgcaagcaaacccgaccgctgcgccgggagctcctccatccggagccattgccgttggccagtccacaaatccagtggcgcagcagcaacagcagccggcggtggccaagaagcccagtagcgagacaaacaacatgcccacgcgacagtacctcgaccagacggtggcgccggttctgctccacggaatgcaggccctggctcgcgaacggcccacggatcccatacagttcctggcctcctacctactaaagcatagcaacgggtgcgacgagaacaacgcctccgccgccgccgtggacaacaactcctaagccctccatcctacctacctcccatttgtccccctccttagttgtataattgaacagtgaataaataataaacgtttaaagttagaatgtaatcgcaaaacacacaaatgtactaggattgctaagttgttataggatagccccatggatccagtttcgagttgagcagctccagggaggcgtccgcgatcttggccagaagctctgccagcttgtgcttcgtatagactttgtacaactgccgattctcgctggatatttcatctgccaggcgcacgcaacccgcaaagtctcccgacttgaacatcacttcgttcagaaacagggcgatctcaggaatgcagatggagcgcaatttctccatctgcagtaggcgatgatcccagctcagctgcacggcgttctcgggcagcttggcgatgaacggatccaccagccaacccttgtccgggaacatgagcacattgtacaggagttcgatggtttctgcagggaaagaatgcgggttatatgccaaaagatctcattaatgggtatgcgatccacttacgcttggcctgctccttaaccttgtgctcccagcgcacgacttccgatcggtgagcctgctccttgcgctcactcgccatgcgctccgtgaagttgtcctgcgaggaagctgcgtgtgaagtctgtggcttcttgggcctgttctgctgcaggcggttccattcgacgaaactgtcgacgccagacagatacgccttgtagcagagatactccttcaggcagcactcctcacgcggtggtatgttgtccaccgagccgtacaagctgactagttgctgcactatgtcggccggcaccatgcggaaggtctggcgcatgcactccaccttgctgctggccagataggtgcgtatcatggcgttggcctgccacagcaactcaccgcgctgctccggcaaatggattagccactccaatgctgagatcttgcgctgatcgattgcagagatctcgccggactgcggctcaccgaattccccgagtggctgatgtgcgaggcgaatattctgcacggtgacgcgtgtgatctgttccacatccaagcccgcctgcagggcggcatccacagctagctcccgcggacgcttctgctccacttgctccagaaaccgcgagtagagctgaacctgcagcggattcgaaagcgatgcagtatagtaggctattagctgcggttcgcccctggcaatcaatgcctccacatatgcggctacgatcttctccgcctgtcgctcctgctccacacggccgatttgacgcaggaagagcactatgtgggccataaagcgcaattgatggggcgattgttgggaggtatccttctccacccagcgcaccatgtgttggatcagctcgccgcaagtatccaggattaaatgacgctggataatgcccagttgactttgggcgaaatcccgcaccgacgcatccttggcaacgttcagttcctcgaagatctgctccatcgtcatcctgccgttccagtaatcatcgggcatcggttggtagtttttgaggcagcagccgcgtatctccgattccacacggatgtcgatctgcaccttcagatgggcccagagcaaatcgtgccagttgctgtgcaaaagggttttcagcgagcccaagtggccggagaagacacccgccgtcgcgcggctgtactcgtcatagttcttggaatcggccagcatccacgcgcagcgcttccagatatccctcctgggattgccctcgatgggcagcttttcgtgcagcaccgagacattctgctcgaagttgggatcctcgtggagacgccagccctcaaggatcgccgcccgccacgtctgtccgaagtgcttgcacaacttgaggccatcgtcgacgcgtcccgctcgtatcaattcgaaaatggcgcgggacaggcgcaggttgtcctcctcgtcgagggcgtgcaacggtcgtttctcgcgtacgggagcatctggatccagacgcgttacgatcttatggcccttgccaaaggcggcgccctgcaggttctccagttggaagagcgtgttctcccacgccatcatacgatcgtgggcgtggagtgggttttgttgctccccccggtcgtagcacgcctccagccagtccaccaccagctggtactcacgcagcgtcgcattgagggcgtacaactgctgtatgacctccttctcgctgccgccgagcgtggggccatcttgcatctcatcatccgcctgcctgtccgtctgcagcaggatgcggtcgtagaagagggcgtgcagcaggcgccacgtgtttatctcctgtcgcagccaggtgagcatagactcgcgttgccgcgcgccctgttccccacccatgccgtgatcgatctccagctccagctgctccaccacgccgcgacagacttgcgtcagcgattggatcacctcgaatgcctcctgcccgttaccctgagcctgcagcacgtcgaagaactgcgggaagagcacgtccatgcggctcttgccccgatccagatcatcgccggtgtcctccatcagcgagagctcattctgctccgcgttgctcttctcgaggatgagcagcgagtgggagagattttgcggcggcatcgagctgttcagcgtcgtgcgtagcaggccactgcggctgctcctcgggaacgggctgtcggccatggctgcactatgcgtttcttggctatcagctacggcacatcaattcaattaatttaatcaaaacagaaattcacgcgctattcgctaaaaatgccgggagcgttcagtgttaccagatgacggaacagcaagaaagctcccttgcacatacacttgtaaataagcgattctcactgaattcaagcaaatttcgtaagaaacaaattgatttaaattgtttacatatctagtaattcggcaaagctgctaaagaataaggtaccagcattccgtagaatcattagtatggggtacctccatcgcgtaccgcaacggcgtacctgaaatgagtaccacaatcgcgtaaagaaattcaaaaggcatttcaaatattaaagatcgataaaaacgtttcttaacgaattaaatattttagatataacaaattctgctacttaatgttgaccgtgtacaaataaatcccaatgatcaggccgtagagaccgagcacctcggcgaaaataaggatcaggatcatgccgataaagaggcgtggctgcagggcaatgtgccgcacgcccacttcgccgacttcacccactgcatatccggcagccagtccagcaaatcccaccgaaagtccagcggccaggtgtacatagccggtgggcagcgagtatttgggagcaggcgctagttccccagataggagcacggataccaccagaccgtatatggcaatgatgcccgccatgaccaccggaatgatggacttcatcaccagctcgggacgcatcaccgctgtggcggcgattccagttccggaaacagcagttccgtaggccgctccagcggaggtcagcacactggagaatacgacgcccatcacgccatagaacggggagtacggcggatagcgatccagcacgattggcgatatactggtttccttcagcttgagactttcaatcagccccggcacgtccaccgaatttgatccgttatacactggcagatagtaatccatttccattttggtagcctttttcgtatttacttgaaaaggaacgatccacgttgcttgctttctggattttccaacttgttagtctga

SEQ ID NO: 14744 - DNA, 2682 bp, DROSOPHILA
catttttagcgaatagcgcgtgaatttctgttttgattaaattaattgaattgatgtgccgtagctgatagccaagaaacgcatagtgcagccatggccgacagcccgttcccgaggagcagccgcagtggcctgctacgcacgacgctgaacagctcgatgccgccgcaaaatctctcccactcgctgctcatcctcgagaagagcaacgcggagcagaatgagctctcgctgatggaggacaccggcgatgatctggatcggggcaagagccgcatggacgtgctcttcccgcagttcttcgacgtgctgcaggctcagggtaacgggcaggaggcattcgaggtgatccaatcgctgacgcaagtctgtcgcggcgtggtggagcagctggagctggagatcgatcacggcatgggtggggaacagggcgcgcggcaacgcgagtctatgctcacctggctgcgacaggagataaacacgtggcgcctgctgcacgccctcttctacgaccgcatcctgctgcagacggacaggcaggcggatgatgagatgcaagatggccccacgctcggcggcagcgagaaggaggtcatacagcagttgtacgccctcaatgcgacgctgcgtgagtaccagctggtggtggactggctggaggcgtgctacgaccggggggagcaacaaaacccactccacgcccacgatcgtatgatggcgtgggagaacacgctcttccaactggagaacctgcagggcgccgcctttggcaagggccataagatcgtaacgcgtctggatccagatgctcccgtacgcgagaaacgaccgttgcacgccctcgacgaggaggacaacctgcgcctgtcccgcgccattttcgaattgatacgagcgggacgcgtcgacgatggcctcaagttgtgcaagcacttcggacagacgtggcgggcggcgatccttgagggctggcgtctccacgaggatcccaacttcgagcagaatgtctcggtgctgcacgaaaagctgcccatcgagggcaatcccaggagggatatctggaagcgctgcgcgtggatgctggccgattccaagaactatgacgagtacagccgcgcgacggcgggtgtcttctccggccacttgggctcgctgaaaacccttttgcacagcaactggcacgatttgctctgggcccatctgaaggtgcagatcgacatccgtgtggaatcggagatacgcggctgctgcctcaaaaactaccaaccgatgcccgatgattactggaacggcaggatgacgatggagcagatcttcgaggaactgaacgttgccaaggatgcgtcggtgcgggatttcgcccaaagtcaactgggcattatccagcgtcatttaatcctggatacttgcggcgagctgatccaacacatggtgcgctgggtggagaaggatacctcccaacaatcgccccatcaattgcgctttatggcccacatagtgctcttcctgcgtcaaatcggccgtgtggagcaggagcgacaggcggagaagatcgtagccgcatatgtggaggcattgattgccaggggcgaaccgcagctaatagcctactatactgcatcgctttcgaatccgctgcaggttcagctctactcgcggtttctggagcaagtggagcagaagcgtccgcgggagctagctgtggatgccgccctgcaggcgggcttggatgtggaacagatcacacgcgtcaccgtgcagaatattcgcctcgcacatcagccactcggggaattcggtgagccgcagtccggcgagatctctgcaatcgatcagcgcaagatctcagcattggagtggctaatccatttgccggagcagcgcggtgagttgctgtggcaggccaacgccatgatacgcacctatctggccagcagcaaggtggagtgcatgcgccagaccttccgcatggtgccggccgacatagtgcagcaactagtcagcttgtacggctcggtggacaacataccaccgcgtgaggagtgctgcctgaaggagtatctctgctacaaggcgtatctgtctggcgtcgacagtttcgtcgaatggaaccgcctgcagcagaacaggcccaagaagccacagacttcacacgcagcttcctcgcaggacaacttcacggagcgcatggcgagtgagcgcaaggagcaggctcaccgatcggaagtcgtgcgctgggagcacaaggttaaggagcaggccaagcaaaccatcgaactcctgtacaatgtgctcatgttcccggacaagggttggctggtggatccgttcatcgccaagctgcccgagaacgccgtgcagctgagctgggatcatcgcctactgcagatggagaaattgcgctccatctgcattcctgagatcgccctgtttctgaacgaagtgatgttcaagtcgggagactttgcgggttgcgtgcgcctggcagatgaaatatccagcgagaatcggcagttgtacaaagtctatacgaagcacaagctggcagagcttctggccaagatcgcggacgcctccctggagctgctcaactcgaaactggatccatggggctatcctataacaacttagcaatcctagtacatttgtgtgttttgcgattacattctaactttaaacgtt

SEQ ID NO: 14745 - protein, 845 aa, DROSOPHILA
MADSPFPRSSRSGLLRTTLNSSMPPQNLSHSLLILEKSNAEQNELSLMEDTGDDLDRGKSRMDVLFPQFFDVLQAQGNGQEAFEVIQSLTQVCRGVVEQLELEIDHGMGGEQGARQRESMLTWLRQEINTWRLLHALFYDRILLQTDRQADDEMQDGPTLGGSEKEVIQQLYALNATLREYQLVVDWLEACYDRGEQQNPLHAHDRMMAWENTLFQLENLQGAAFGKGHKIVTRLDPDAPVREKRPLHALDEEDNLRLSRAIFELIRAGRVDDGLKLCKHFGQTWRAAILEGWRLHEDPNFEQNVSVLHEKLPIEGNPRRDIWKRCAWMLADSKNYDEYSRATAGVFSGHLGSLKTLLHSNWHDLLWAHLKVQIDIRVESEIRGCCLKNYQPMPDDYWNGRMTMEQIFEELNVAKDASVRDFAQSQLGIIQRHLILDTCGELIQHMVRWVEKDTSQQSPHQLRFMAHIVLFLRQIGRVEQERQAEKIVAAYVEALIARGEPQLIAYYTASLSNPLQVQLYSRFLEQVEQKRPRELAVDAALQAGLDVEQITRVTVQNIRLAHQPLGEFGEPQSGEISAIDQRKISALEWLIHLPEQRGELLWQANAMIRTYLASSKVECMRQTFRMVPADIVQQLVSLYGSVDNIPPREECCLKEYLCYKAYLSGVDSFVEWNRLQQNRPKKPQTSHAASSQDNFTERMASERKEQAHRSEVVRWEHKVKEQAKQTIELLYNVLMFPDKGWLVDPFIAKLPENAVQLSWDHRLLQMEKLRSICIPEIALFLNEVMFKSGDFAGCVRLADEISSENRQLYKVYTKHKLAELLAKIADASLELLNSKLDPWGYPITT

SEQ ID NO: 14746 - DNA, 4400 bp, DROSOPHILA
cccattatcagccgttgtacaacagcaacaagatgacaagcccaaccgtaactatagtctgatttggataccagttttcagttcttcagttatcgaaccacaactaatttgtcttctgactggcgctcccacatggaaacgcagaattcataattgtgaaaatagacctagtacaagatcttaattttttgtaagcgccaatatattgtatttgcatcttagccaagagaaaagtcctggaaaagcagtttagtaaaatattttcgtattaggcatacgtactttaaaatatctccatatatgtatatgtatgtgtatgtccattgcttcaatataatgttaaacttaaatttaatcgtctttctgctggcttagttttggcttccaaatgaaactttgttagccagattaaaacatacatatatttaataaccgccaatctgagcattttcaagagcctccaaacggaataatacccattagcacaagggctatatactctttgcatatatgtataatctaaagttagatcctagttaattttccattgttacttgtttttgcctaagttttagtctaagctagtgagtttttcttgtttcaatattcccataatttgtacaatatgtctaatctcgctaaagaggagaaaaattgataagagctaaattgaatatattttctccaagagcacaataatcgtcaagtaattaaccgatattatataacgcatactgtatgtaaaccactattaaagttatagaaagtacctatcaatagagaaagataaactagcgtgcgtgtgtgtgtgtgtgtttgatttggaggcatttcacagctgttgagtgtggacggccctctgctcgagatcccattgatgacgccccaaaccggcttggagcccactaccttcgcctccgcctccatccaaactggatttgcattcccattcgcattctgcggctgttcgcggatcctcagttgagaccgaactctggagcaggaatgtcgcagactgccaactgggttctgccgcttttgctgtggcttctctgcatgggattccccattctgcatggcgccgatctctgccagcccatcggatggcggaacttccagtgcagcgaggtcgcttctctgcaggatctggtggacttgggcgccgaaaactggcacacgctcgccatacggaatgtgcaaacggaactggaggtgggatcaggtgaggtcggaaaaaaaagggggctaggcttagtcgggataaatttttagtgcagctattataataattacatgatgaagctataatggtacataacctaagttcttcatcttcataaaacgcaacataattgctattctataaatagttgcttccatgaaagtcaaaccagtttggatttgattttccatatcttggacttcctttattaagtattacattggcaatcaaacctatttaggcgaaaatgccgatcacttggccaacttgctagacttggatctgactggcgcggctccaataaatgtgcataccaacggattttccattctgcccaatctgcggcaactgaatctcagtggctgcggtctcgttgacatccggggaaatcactttgcgcctgagtcagcgctccagcggatcgattttagtcacaatcaaatggagcttctggatcgcgacttttttggcaatctaaggaaattgatctatgcgaatttttcgcacaatgctctaaagcaatgcgatctgccgcacatgccactgctaaatcgactggaattggggcacaatcgattggtgaatgccaccttcggagtttgtccacagctgcaggagttgattttgaatgacaatcaactgatacaggtgagtagaacctttactaaggagaattaagtaattcaaaccttgaattagtatggatagtgtaatcttctatatatggaatccatcggcatctattgatcagctcagctttattttgatcttcccagttaaccggatcgaactttaatattgttaatgtgtacctagttggattggcatttcaatttgttaaattggtcatggtgatctgtggcattttggtcgagttgtaaaataagacttgcatattttttgtttatctccatgagttataaaacttagaactgaaaagtcatattcgaaaacagtagcatcttaatggcaatgagaaaatcgattctaattttaaagctgatcaaaatatttgccaacctcttttctcacacaacggaaattgttttgtaaacaaagtttaatgatttttaaactgagaaaaaaaaatggaagctttctatgagttgataataagacaatttctatttttcttccttttagttggacgtgaatgcctttcgtggactccatggtctgttggagctgcagctaagcgggaatagattgagctccattggcctggaaacctttcagccgctcgcccagctgcgaaagttgaacctttcccaaaacgccctcgatgcactgcgtccaaatgtgtttggagcggttcagaactttgtgttgcatctacagcagctggatttgtccggcaatcgcatccgcctgctgttcgacaaccagttcagagtgttggccagactgcagatgctggatgtgtccaggaacagcatcgccagcctcagtcctgctcactttgtgggcttgggctcactacggaagctgtatctgcagtacaatgctatattggaaatcaaaccggccacctttgccgccctgctgaacctggacaccttggatctgtcgtacaataacttggaattcctggaggaacagatcttcggaggcaacaccttgccgcgcatgcgaaggctcaacctgaatggcaatcgtatgaagcatctgcatccactggctttctcatcgttaccatttttggaatacctaaaactgggtcacaacgaactgaaatccttggacgtgcgcatgtttgcaccaatgcggcgtcttcagaagctccacttgggtcacaatctgctggaggagatcaacctcgatgtgctggagagcctgagtagcgtacaggagatcctagtggacaacaatcgccttacctttctggccaaggtgaatgtgagcttcccgaaccttaagcgcgtggccatcgagggtaatccctggcagtgtccttgcttcgtgaagctgcaacactggctggccaccagggatgtggtctatctgcgcgataacacgggctactacaagggcgaacgacccctgtgcatagtgaccaatgtggactactgcatccagaatttgcaggcggtacgacgcctgggaattttgggcgatttccagggtgaacaggtggaggcggatgctttcgatgacgatgccagtgcagctcaagactgattgctaccatttaatcaaaactatttacgtagactaaataaaaccgtgccaaactgggaaaaccctaaaagataccactctgtgtgccctgggatttgctagcaaattggtccacaaacaacgatcttaaatttaaatacgaaaactttaaatataacacaaaattgcacaaaaagatcttttcagacacggacattttgaagatatattggatcgatttatcatctttcgggcatattcatggttccagcgtctcgaatgggttttaatttacaaataaacaactaaaactcgaatcgtttaggcagacttgacgcgcagtgccagagcgctcagatcggcgatgcacttgttgagagtctccttctcctgctggggagagatgctggccaacacattggtggtgatccagttgaccatgtgcttctggctaaggcgacgctcgacgtggcggcactccacctggtagtcgagacgacgcttcacctccgagtacacattcatggcgcgctcacggaacgcggcctccagctgcaatgcaatgttctccttcttggcttccatcagcagcagggcaccgtcggcgcgccactgctccttcttctcggcctcgatggcgtcggagaggaccttcagctcagcctcgcgtccctccttccactcagattcgattttctgcggcagagataatttaaattagcggctgggttttaaagtccgtccaattatgataatccagctccaactcgaactgggctaatactcacatcgatctcgccatcagcccacttggcgatgaccgggccgagcttcttgacagcaatgatggccatgataccgagcgacagaccgctgtagtactcgtgctccatgacgtagatctccttggagcagagataggtgatcagacccacgccgaaggtgtagggtccggtgacaccggtcttgttgtagaagaactggaaccactcctcgggcaggaatcccagacggaccttgc

SEQ ID NO: 14747 - DNA, 1664 bp, DROSOPHILA
caggaatgtcgcagactgccaactgggttctgccgcttttgctgtggcttctctgcatgggattccccattctgcatggcgccgatctctgccagcccatcggatggcggaacttccagtgcagcgaggtcgcttctctgcaggatctggtggacttgggcgccgaaaactggcacacgctcgccatacggaatgtgcaaacggaactggaggtgggatcaggcgaaaatgccgatcacttggccaacttgctagacttggatctgactggcgcggctccaataaatgtgcataccaacggattttccattctgcccaatctgcggcaactgaatctcagtggctgcggtctcgttgacatccggggaaatcactttgcgcctgagtcagcgctccagcggatcgattttagtcacaatcaaatggagcttctggatcgcgacttttttggcaatctaaggaaattgatctatgcgaatttttcgcacaatgctctaaagcaatgcgatctgccgcacatgccactgctaaatcgactggaattggggcacaatcgattggtgaatgccaccttcggagtttgtccacagctgcaggagttgattttgaatgacaatcaactgatacagttggacgtgaatgcctttcgtggactccatggtctgttggagctgcagctaagcgggaatagattgagctccattggcctggaaacctttcagccgctcgcccagctgcgaaagttgaacctttcccaaaacgccctcgatgcactgcgtccaaatgtgtttggagcggttcagaactttgtgttgcatctacagcagctggatttgtccggcaatcgcatccgcctgctgttcgacaaccagttcagagtgttggccagactgcagatgctggatgtgtccaggaacagcatcgccagcctcagtcctgctcactttgtgggcttgggctcactacggaagctgtatctgcagtacaatgctatattggaaatcaaaccggccacctttgccgccctgctgaacctggacaccttggatctgtcgtacaataacttggaattcctggaggaacagatcttcggaggcaacaccttgccgcgcatgcgaaggctcaacctgaatggcaatcgtatgaagcatctgcatccactggctttctcatcgttaccatttttggaatacctaaaactgggtcacaacgaactgaaatccttggacgtgcgcatgtttgcaccaatgcggcgtcttcagaagctccacttgggtcacaatctgctggaggagatcaacctcgatgtgctggagagcctgagtagcgtacaggagatcctagtggacaacaatcgccttacctttctggccaaggtgaatgtgagcttcccgaaccttaagcgcgtggccatcgagggtaatccctggcagtgtccttgcttcgtgaagctgcaacactggctggccaccagggatgtggtctatctgcgcgataacacgggctactacaagggcgaacgacccctgtgcatagtgaccaatgtggactactgcatccagaatttgcaggcggtacgacgcctgggaattttgggcgatttccagggtgaacaggtggaggcggatgctttcgatgacgatgccagtgcagctcaagactga

SEQ ID NO: 14748 - protein, 552 aa, DROSOPHILA
MSQTANWVLPLLLWLLCMGFPILHGADLCQPIGWRNFQCSEVASLQDLVDLGAENWHTLAIRNVQTELEVGSGENADHLANLLDLDLTGAAPINVHTNGFSILPNLRQLNLSGCGLVDIRGNHFAPESALQRIDFSHNQMELLDRDFFGNLRKLIYANFSHNALKQCDLPHMPLLNRLELGHNRLVNATFGVCPQLQELILNDNQLIQLDVNAFRGLHGLLELQLSGNRLSSIGLETFQPLAQLRKLNLSQNALDALRPNVFGAVQNFVLHLQQLDLSGNRIRLLFDNQFRVLARLQMLDVSRNSIASLSPAHFVGLGSLRKLYLQYNAILEIKPATFAALLNLDTLDLSYNNLEFLEEQIFGGNTLPRMRRLNLNGNRMKHLHPLAFSSLPFLEYLKLGHNELKSLDVRMFAPMRRLQKLHLGHNLLEEINLDVLESLSSVQEILVDNNRLTFLAKVNVSFPNLKRVAIEGNPWQCPCFVKLQHWLATRDVVYLRDNTGYYKGERPLCIVTNVDYCIQNLQAVRRLGILGDFQGEQVEADAFDDDASAAQD

SEQ ID NO: 14749 - DNA, 4396 bp, DROSOPHILA
agcatttgcccttaagggccgcggaatggagctatctgagctagtcaccttcaacgggcgcctgctcaccttcgacgaccgaacgggtttgatatacgagattgtgaatgacaagcccattccctgggtgatcctgctcgatggagacggacacagtgccaagggcttcaaggccgaatgggccacagtgaaagagcaaacgctgtatgtgggctccatgggcaaggagtggacgacaagtgcgggtgatttcgagaacaataaccccatgtacgtaaaggccatcactccgtccggcgaggtgaggtcgctcaactgggtggacaatttcaagcagttgcgcctgcagtcgatgcaaataacctggccgggctacatgatccacgagagtggaacctggtcagaggaaaggaatcgctggtttttcctgcctaggcggtgttcgaaagagaagtgagtaagcgtgtcagcctttaaatccttaactcatcgatctatctttgaaagatacaacgaaaccaaggacgagcacatgggctgcaatgtcctggtctccgccgacgaaagcttcaccaacgttgagactgtacggctcgatcctgaaaatacaacgcccacgcatggtttctctagctttaagttcttgcccggcaccgatgactcaataatcgtggctcttaagtcggaggagttgaatggcaagacggccaccttcatcacagccttcgatattgcgggcaagacactgctgcccgaaacgaggatcgagacggactacaagtatgagggattcgagttcatttagctcgccattccaagctaccgcactccactctacttcgatccaggtgcttcagttttaaacgtgtacatattgtattattgtcccatacggtaagctttatatttatagtcacctagattagtccagagatgctcatctgcctcatgaaccgtgactccttgtcccgtcttgtaccatagcacaaaaaaaaattttagtttatttttattaaaattgaaatataaaacgtacaaagccggtggcaaactcagaaaagccctgcatcacgtttctttaatcttcgcatccaatccggccaccataagatcggctttatcgatgcgaccctcgctggcgcgaacttccagtcgatcggcattgtggttgacattccagagttcgggcaaaaagcggggctgcattgtgtgcagaaagtgctgccgccataagcgctccagctccaccaggccgccgaaatgatcgcgatattgctgcaccacccgctcgccatgctgacagtagtcggagttttctacgcgatattccacgctggctgcttgccgcaggagatcttctgtgatgtccgtttgatcggagtagtaatcgaggagagtcttttccatttcggccttctttgcagcgggtattttcgcgccatgatgaagtagtgccttgccagcggattggactcgtctggaaataataaaatgcaattcagattcattgagaactctatggagattaattttatcatatatcagggtatgttttggaaagttaggtgataaaaaagaggcaaaatatgtctggtaagataactgataaggcaatctacattcctcgcaatgtataatttacttttacttttaacttagttctgaaaatgtatggcatacttacttgagctgcggatcatcatggtacttgacagatccgtcttcctgcttgaaaggagcttcgcactgcacggccagtttgctgcgaacccttagatccgagatgttgcttagctggtggcaggttgggcacaggagcagcacatcgtcggaggtgtgagatttcatgaccaatgggaaatgctttctgtattcccgcggtaccacgttcttccgaatgtacgcatcccggtcaccacacaccacgcactggtttttcttgattgtttgatagaagcgccccacatctccgaccgctcgacccgctggctcgaagttaaggcggacagtgaagggctcttcgcttatatgcgtgcccagattttgattgagataccaggacgccttgcgcctgtcaattgtacacaggagttcgccatcgggcgcctgcagcaggcagttatcgtagaagtctttggttcgggtagctatttgccggtacggttgcttcttgggcacccatttattgcttttggattgggtggagccctttgaacgagttactccgctgccggacgggttgagtgtgaagcctttcgtgaagtccacgtcgagaaagggttcgaatttgttgtgcatgctattgtcgtccagttgccttcgttgccaaaagtgttttggctgcagatccctgcacaatttttgataaatggccaccgccataagtgcgtcgttggcagcgtaatcaagctgttttggctccaaagtcttggcctcccagttggagcaggccaggcgccagtgcttgtccagtgtatagttcaggtgagttttggagagctttcccagtccctcaggtttgtggcctgccattacgcagaggaagcgcagatccagtgtgctggccacgcctactccatagtcgtgcgaaagtttcatggcatcctcctggggtgccacgcccactttgatcacggaatcgtcctcgagaagctcccgcagatcctggggtatttgtttcatatggcacagtcggaataaggcacatagaccccgatgggagctcaattggagcaaggccactggcctgcggctgccgcccacggtgatccactcgcaatcgaatccaaggactttaaaagtctggcagtgactaagaggcagaatatatatatatatttccattgtcgtgaaattaaagtggtttttacttacttcttcagttcattcaaaacccattgcgtggtcggatcctggacggagttgatcacttctatgcgtcgctggggcaccaggctgccgaaggaccagacgcgacgcagtggacacagcagtcggtgcctgtgccgcaccaggacgtataccaagccaactcctgcggccagaatcgcccaatttcttttggtggcgactgccgattcccgagtcattgttctcctttcggagttcagcagctgattggctggcctgccaacttacgttttcacaaaccgtaaaagccggtctaaacaagtttcggaatatttataaccgtaatttgaatgtgctatgccaaaatagttttacagttttaatacattttaagcaaaacttgtttcaaatcttttaaaagttcataaaaatatatcgaaataaaaccgttaaacatgacgagtcgtttaaaaaggtggcattgttggctggactaagatcttcggggtggcaatactggcccacagggttttccggaatctccattcgcgaaaagaattaaaaatgtttaattaaacgcagtcggagcgtgcaaacaatgaataaaactcagtgaaactggcggcggggaaacgatgtgccattgaaaacgcagaaaaggcggcagcagacagtgacacagcgcgtaaataaggaaggcaatcgaaagaaatcgatttttcagggcaggtgggctaccattagactccccacactcatgcacacatattgatgcaaatcccatttgcaggatgctgaaactttgaaggaatccagaaactgtagagaagaaaccccacagaatgccggaaaacctcgagcttcagcagttccaggagggcgccccgcccccagatcccgccccccgttggctggagcgcttgcagcgacgattgggcgccgattgtccctacttgggtatcctgctggccacgctctcctcgctcttcttctccctgtgctcggtgattgtgaagggactggtggacgtgaaccccatggagctggcctcgtttcgattcgtcggagtcctgttgccggcactgcccatcctgatatacacgcgacagccggtgtttccggagggcaagagggtgatactgctgctgcgctgcttcatgggcacaacgggtctgatgctcagcttctatgccttccgacacatgcccctggccgatgcgagtgtcatcatcttctccacgcccgttttcgtggccatatttgcgcgtgccttcctcaaggagccgtgtacgctgttcaatgtcctgaccatcaatatgacattgctcggcgtggtcctcatcacgcgcccaccctttgtgttcggtgacacggcggagagtgaggatgtcgctgggaagacgtacgacatctggggaccagtggccgccatatcatccacactcttcggagccaatgtgtacatcctgctgcgggcgctcaaaaacctgcacttctccgtcatcatgacgaatttcggtaccatcgctctggtctacacactgat

SEQ ID NO: 14750 - DNA, 1980 bp, DROSOPHILA
atggagattccggaaaaccctgtgggccagtattgccaccccgaagatcttagtccagccaacaatgccacctttttaaacgactcaccggcttttacggtttgtgaaaacgtaagttggcaggccagccaatcagctgctgaactccgaaaggagaacaatgactcgggaatcggcagtcgccaccaaaagaaattgggcgattctggccgcaggagttggcttggtatacgtcctggtgcggcacaggcaccgactgctgtgtccactgcgtcgcgtctggtccttcggcagcctggtgccccagcgacgcatagaagtgatcaactccgtccaggatccgaccacgcaatgggttttgaatgaactgaagaatcactgccagacttttaaagtccttggattcgattgcgagtggatcaccgtgggcggcagccgcaggccagtggccttgctccaattgagctcccatcggggtctatgtgccttattccgactgtgccatatgaaacaaataccccaggatctgcgggagcttctcgaggacgattccgtgatcaaagtgggcgtggcaccccaggaggatgccatgaaactttcgcacgactatggagtaggcgtggccagcacactggatctgcgcttcctctgcgtaatggcaggccacaaacctgagggactgggaaagctctccaaaactcacctgaactatacactggacaagcactggcgcctggcctgctccaactgggaggccaagactttggagccaaaacagcttgattacgctgccaacgacgcacttatggcggtggccatttatcaaaaattgtgcagggatctgcagccaaaacacttttggcaacgaaggcaactggacgacaatagcatgcacaacaaattcgaaccctttctcgacgtggacttcacgaaaggcttcacactcaacccgtccggcagcggagtaactcgttcaaagggctccacccaatccaaaagcaataaatgggtgcccaagaagcaaccgtaccggcaaatagctacccgaaccaaagacttctacgataactgcctgctgcaggcgcccgatggcgaactcctgtgtacaattgacaggcgcaaggcgtcctggtatctcaatcaaaatctgggcacgcatataagcgaagagcccttcactgtccgccttaacttcgagccagcgggtcgagcggtcggagatgtggggcgcttctatcaaacaatcaagaaaaaccagtgcgtggtgtgtggtgaccgggatgcgtacattcggaagaacgtggtaccgcgggaatacagaaagcatttcccattggtcatgaaatctcacacctccgacgatgtgctgctcctgtgcccaacctgccaccagctaagcaacatctcggatctaagggttcgcagcaaactggccgtgcagtgcgaagctcctttcaagcaggaagacggatctgtcaagtaccatgatgatccgcagctcaaacgagtccaatccgctggcaaggcactacttcatcatggcgcgaaaatacccgctgcaaagaaggccgaaatggaaaagactctcctcgattactactccgatcaaacggacatcacagaagatctcctgcggcaagcagccagcgtggaatatcgcgtagaaaactccgactactgtcagcatggcgagcgggtggtgcagcaatatcgcgatcatttcggcggcctggtggagctggagcgcttatggcggcagcactttctgcacacaatgcagccccgctttttgcccgaactctggaatgtcaaccacaatgccgatcgactggaagttcgcgccagcgagggtcgcatcgataaagccgatcttatggtggccggattggatgcgaagattaaagaaacgtgatgcagggcttttctgagtttgccaccggctttgtacgttttatatttcaattttaataaaaataaact

SEQ ID NO: 14751 - protein, 583 aa, DROSOPHILA
MTRESAVATKRNWAILAAGVGLVYVLVRHRHRLLCPLRRVWSFGSLVPQRRIEVINSVQDPTTQWVLNELKNHCQTFKVLGFDCEWITVGGSRRPVALLQLSSHRGLCALFRLCHMKQIPQDLRELLEDDSVIKVGVAPQEDAMKLSHDYGVGVASTLDLRFLCVMAGHKPEGLGKLSKTHLNYTLDKHWRLACSNWEAKTLEPKQLDYAANDALMAVAIYQKLCRDLQPKHFWQRRQLDDNSMHNKFEPFLDVDFTKGFTLNPSGSGVTRSKGSTQSKSNKWVPKKQPYRQIATRTKDFYDNCLLQAPDGELLCTIDRRKASWYLNQNLGTHISEEPFTVRLNFEPAGRAVGDVGRFYQTIKKNQCVVCGDRDAYIRKNVVPREYRKHFPLVMKSHTSDDVLLLCPTCHQLSNISDLRVRSKLAVQCEAPFKQEDGSVKYHDDPQLKRVQSAGKALLHHGAKIPAAKKAEMEKTLLDYYSDQTDITEDLLRQAASVEYRVENSDYCQHGERVVQQYRDHFGGLVELERLWRQHFLHTMQPRFLPELWNVNHNADRLEVRASEGRIDKADLMVAGLDAKIKET

SEQ ID NO: 14752 - DNA, 4040 bp, DROSOPHILA
atcatcatcccgagctcgccaaatggtccactcagtactaattcgactacggtctcttaataatcattccatgtggatccagtggatccctggtactcgtagtatcagcagcaacttataaaccaaaagtgctcggtcaagtgatcgcgttgatcttgcgaatacctgaagtactcgtagtatcagcaattgataatcgccaatgtttccatggttataactaaaatcctgcacaaattccagggtattaaaagtgatcgtcgtaaccctggtacccgaaatctcatcaattgaataatcgccaaatgctcctcatgctgttcttttttatcggtctagtgtttgtagtgtgcttctcgagcatattgctccaagctatgatttggtaaataaatcagatattcgcataatatattcgcactactgataactatatattgtatttgtattatcggtgagagagacaagcctcagtggttttttgtcttttgacttcctgttgttgccatcctttatcaaaaccgaacaaaggccggctataatggactgatatatgtaaatatgtgtgcattgcacccaattcagttcagttcttcttcttcttattgttatagagggtgtgttccacaattaaaacatccagggtttttatatcatttttcttacatattatcaaattgtgggtgcaaatggagaccttaaggcagttactacgttaaaaataagtgctattgactatataaagaataccttacattaaaccaatagtgccaagtgctcgatacgaaattgttctccagtccaaaaacaagtggattcttatctaaacagcaaatagacttggtacgcaaatatagcttttgtgagcccctttaaagattgtgtaaatgataagagccatccatccgctacacttgaaagtgaaatggccaatcgaaggcttacccaatagatcatccctagcatctatttccgtgccacacaaatgtgccaatctacaatgtacatcttgttgttccgtttcaggtaccggcagacacgtttcagttcgcggcgtgttcgaaaacgtgtggtcttcaagcacggcgagtgcaacgttgtgcagggaaatgtggccaagagacggcgtcgctatctgcaggtgagcggtgggcggtgggcggtgggagttacggggcgtggcagtgcgtggcaatatctagttgccggcccacttgcgttcgatttgtggggtatatttagacttccttcgcgggtttgcataacgcctgtcgccgcgagactcgggacggcaattatgtaaattgatttgtgctccaaaattaaatgtatgtcgaaagtattcaaagaatttatgggacttaaccatctagtagaatagactatatatggatacactataattgcaatagctattgattgatttgtatctgaaagtaaatgttgttttcatcttttacaagcttttagttgaagtttgcaacaatcattattaaccttaaacatttttttttccttttccaggacatcttcaccaccctggttgacgcccagtggcgctggacgctgctcgtcttcgccgccagcttcgtgttctcgtgggccttctttggattcatctggtggatcatcgcctacgcacacaatgatctggagtacaccaatctcaagaaccagtcacccgatctggtggccaacataacgcacacggtctgcgtaacacaggtctccaatatgatgtccgccttcctgtactccgtggaaacccagacgacgataggctatggtaatcgctatgtgacggaggagtgcccggaggcgatattcacgatgtgcatccagtgcatcacgggtgtcttcatccaggcgttcatggtgggcattgtgtttgccaagttgtcgcgtcccaagaaacgtgcccagacgctgctcttctcgcgcaatgctgttatctgccaccgggatggagttccatgcctgatgttccgtgtgggagacatgcgcaagtcgcacatcatcgaggcccatgtgcgggcccagatcatccgcaagaaggtgacaaaggagggcgaggtgctgcccttctaccagcaggagttgcacatcggagccgatggtggagaggatcggctaatgttcatctggcccactaccatagtgcacaaaattgataggaacagtccactgtacatgctctccgcctccgatatgctaaaggaacgcttcgaagtggtggttatgctgggtgagttttatcatattcacttcctagaaatataaactaaatagcttatcgatttcagagggcgtcatcgagtccactggcatgaccacacaggccagaagcagctacttgccctcggaggtgctgtggggccatcgtttcgtgaatgtggtgtccttccgcaaggagaccggcgaatacgaggtggactacacgctattcaacaacacctacgacgtggacactccgctgtgcagcgccaagcagctggacgagcttaagtcggagtactcgaagagcgccaagtgtgtgaatgcaccctttgcggatcgcacgctctcggccagcttgttccagcgtattgcctccgccgcctcggtggatcatctggatccggctagcgacgaatcgctggactctggccgcctgcagatacgctcccattccatacccaacggcgtgctggccagcgagctggagccgctgaataacaacaagcatggcgcttcgttcaccatgggtggcctgaccatcacgacgacggcgcccagcatccccaacctatccagtattaacgagaagaccaactccggaaattccataaacagcagcaattacagcaataacaatagcctgagcacgctgaccggaggaggaagtgctgccagcggacccggaggaggcatcaccattgtggccggttccgggaaccatggcggcgctggtggaggaggaggaggcggcggtagacacaagtcgaatccccgccgtcttagcatcaagcaggatcagctgcccatcgattccatttgttgatattattaattgagttagtcagttatctgatgttgtattctagttaagcataggctcctcccaatatacataattctaactcaaactaagctaagcgaaattccatggagagctcatctgtcatagccatagagctgctgcagctgtgaacatccctcaaaaaaatccccctatcctgctgaagtggaggcaatctgattgttatccacctatctactatacttactactaaccctgaaacgattgtacatgtttatgtctaggctaagctgatgaatgattcacgttgttagctttagctttgtgttgaatttactatagttaagttacaaattgatattaacgcaaagtaagatgtgagacccagaaaccaaaatgctgcaacttagacaactagataagtcattaaacggctcacttaacatgaaatttatgcgaagacgcagcggaattgaaaattccctttaagtcgattattgtttaatattactcacttcaatgagatataaagaatgtacattttaatccatatactgtttcaaaaacaagagcttcaattatcataaggagtggacaataaaattgtatgcgtatgtgagagtgattgataaatgaattttatttttaagcttcgcccagattgtgcaaatgaaagacggtgaattataccataaaatggaatgaaaagaatctaaccgatgcgttttatttggaatactcccgggtagtgcataatatgaatccaatgaaagacagttttatatatttttgtagtgtttttttctttaattttgacgttctttgtttagctgagggaaagtttatcatttttaaagcatacaaatttctcatatgaaacatacacaaatatatagcgacatacaagtacagggattggtcaaaggtggtcagagatccttggaagcttttgatagcatatcaaggatattcttggtatctaaacactcctcttaccaaattttatgttaatagaatacgc

SEQ ID NO: 14753 - DNA, 1599 bp, DROSOPHILA
atgtacatcttgttgttccgtttcaggtaccggcagacacgtttcagttcgcggcgtgttcgaaaacgtgtggtcttcaagcacggcgagtgcaacgttgtgcagggaaatgtggccaagagacggcgtcgctatctgcaggacatcttcaccaccctggttgacgcccagtggcgctggacgctgctcgtcttcgccgccagcttcgtgttctcgtgggccttctttggattcatctggtggatcatcgcctacgcacacaatgatctggagtacaccaatctcaagaaccagtcacccgatctggtggccaacataacgcacacggtctgcgtaacacaggtctccaatatgatgtccgccttcctgtactccgtggaaacccagacgacgataggctatggtaatcgctatgtgacggaggagtgcccggaggcgatattcacgatgtgcatccagtgcatcacgggtgtcttcatccaggcgttcatggtgggcattgtgtttgccaagttgtcgcgtcccaagaaacgtgcccagacgctgctcttctcgcgcaatgctgttatctgccaccgggatggagttccatgcctgatgttccgtgtgggagacatgcgcaagtcgcacatcatcgaggcccatgtgcgggcccagatcatccgcaagaaggtgacaaaggagggcgaggtgctgcccttctaccagcaggagttgcacatcggagccgatggtggagaggatcggctaatgttcatctggcccactaccatagtgcacaaaattgataggaacagtccactgtacatgctctccgcctccgatatgctaaaggaacgcttcgaagtggtggttatgctggagggcgtcatcgagtccactggcatgaccacacaggccagaagcagctacttgccctcggaggtgctgtggggccatcgtttcgtgaatgtggtgtccttccgcaaggagaccggcgaatacgaggtggactacacgctattcaacaacacctacgacgtggacactccgctgtgcagcgccaagcagctggacgagcttaagtcggagtactcgaagagcgccaagtgtgtgaatgcaccctttgcggatcgcacgctctcggccagcttgttccagcgtattgcctccgccgcctcggtggatcatctggatccggctagcgacgaatcgctggactctggccgcctgcagatacgctcccattccatacccaacggcgtgctggccagcgagctggagccgctgaataacaacaagcatggcgcttcgttcaccatgggtggcctgaccatcacgacgacggcgcccagcatccccaacctatccagtattaacgagaagaccaactccggaaattccataaacagcagcaattacagcaataacaatagcctgagcacgctgaccggaggaggaagtgctgccagcggacccggaggaggcatcaccattgtggccggttccgggaaccatggcggcgctggtggaggaggaggaggcggcggtagacacaagtcgaatccccgccgtcttagcatcaagcaggatcagctgcccatcgattccatttgttga

SEQ ID NO: 14754 - protein, 532 aa, DROSOPHILA
MYILLFRFRYRQTRFSSRRVRKRVVFKHGECNVVQGNVAKRRRRYLQDIFTTLVDAQWRWTLLVFAASFVFSWAFFGFIWWIIAYAHNDLEYTNLKNQSPDLVANITHTVCVTQVSNMMSAFLYSVETQTTIGYGNRYVTEECPEAIFTMCIQCITGVFIQAFMVGIVFAKLSRPKKRAQTLLFSRNAVICHRDGVPCLMFRVGDMRKSHIIEAHVRAQIIRKKVTKEGEVLPFYQQELHIGADGGEDRLMFIWPTTIVHKIDRNSPLYMLSASDMLKERFEVVVMLEGVIESTGMTTQARSSYLPSEVLWGHRFVNVVSFRKETGEYEVDYTLFNNTYDVDTPLCSAKQLDELKSEYSKSAKCVNAPFADRTLSASLFQRIASAASVDHLDPASDESLDSGRLQIRSHSIPNGVLASELEPLNNNKHGASFTMGGLTITTTAPSIPNLSSINEKTNSGNSINSSNYSNNNSLSTLTGGGSAASGPGGGITIVAGSGNHGGAGGGGGGGGRHKSNPRRLSIKQDQLPIDSIC

SEQ ID NO: 14755 - DNA, 2876 bp, DROSOPHILA
tacactgccccagcgaatgcaaggagcagctgggcatcaagttgcccttcctggtgctccttataaagaacatgcacaagtacttttgcttcgaagttaaggtaaggccaagtgctatgaatttatagtaaactctggactgcacaatgatgacaatatatccttagattcaagacgatcagcgcttcatgcgccgtttccgagtgtccaatttccagagcaagacctccgtgaagcccttctgcacggcgatgccgatgggcatgtcaccggggtggaaccagatccagtttaacctggccgacttcacgcgccgtgcttacggctccaactatctggagacggtatccttgcagctgcatgccaacgtacgcatccggcgcatctacttcgcagataagctatacacagaggctgaattgcccaatgactaccgtctgatgggcaagccgaaggatctgaagaagccggagaagcagttcaaggtgcaggccactgcgcgtcctccgtcgcctttgaacacgggtcgcggtgaacccggaccctccaaagacacggacgcagaggcaacaggtcccgccacggatccgatgagtgagccggagcccgcgctgcagaagtctccgtcgccgcctgttccgcagaaggttccgtcgccagcagcttccgctcctccagagccggccaccgaggagccagctccacaaacggaggccaccgaagaggcctactattaagttacgttgcacagttgcttgtttttatcgttctgttgacacgcgactgggagtggcacatagtttaaatttccagtcatagcaatcataatcgaaagtgtttctttaatacaaaacttgggaatgggcattacatttggatttccatgcagaacggattggtttcccattgtagtcacacaacttgctttattttaaccctctctgactcgaaacaaaatctactttgttacattgtgaatttgctaaaatacataacttaattaggatgatgccgcgggtgcactggcgatagccagcatgtcagcgtcaatgttcttgagtgcgttgtggtactcggttatctcgagcgcctcccactcggccttgaaggcggcctttggatcctggggcatagtcatggcggcgcccgtcatggcatccgcctgtgcctgcgtctgatcggcatgattgttctcgccaagaaccagtgtgtagatggagcgcaggccgaacacgttgaggaagtaccaagaggctgaggagacccaggcggcgtccagcgaggccagctccacgccccgctggagcatgggcttaaagcgcagggtcaacgggaagggtaccttggtggtgacgaagcccgaaaacatccagttgatccagccaccgatcacgaccatgggcagcacgttaataaagtttcccttgaccatgtcggtgagcatggcggatgagttttgggctacaggcgcccgtttctgagtcttgaagtagccggtctcctcgttgttgaagtagttcttacgcatggagaagctctgggcgctgagatacttgccgttctcgcgtagcaagcgtgcccggatcattgcctggctgtgaacggaatggtaggtgtcactaaaaggtgcctcgctgcactttgctcactctcacctgtcctggatttgggtgatctcggccttcttctgcgtggatatcagtatagagacgtagtggcgcacaatgcccaccaggaacgtgatcagcacgatgggcaggaacacccacacgcggatgtccggatcaatcagcagctccgtcatattttaattgatctgtgagattttcctgtttttcggcccaattttcacccaactggctcaattggattggggatgacagtcgattatttatccgataaatgtgacaggtcacgttcggaacatttatcgatagcttatttcacttttaaaaacataggaacacttatttaattgaacacattaagtgaataagtgattaattacctgtgatttgtacccaaatccagtatattcaaatgcatgtaagctgatatatttacgataatatatgtttttacacaatattcacagggaataccccaattatgtgaacaaatcacaggaattcgatgtataagtaaattttcgtgtcatcgattcccgacatgaatgcgacaactctgcagaccgagaatgtaaattttgatcgaatcgaatttgttggactgctgcaaagacgccaagtgaaaaccgagatttgctgaacaaaaggaacacattgccatggaggccaagaccgacgcacccatctcaccagcgcccacaacaaatccgccggcagaagctggcaaggagccaaatgcaagcagcaatgcgcaagcaaacccgaccgctgcgccgggagctcctccatccggagccattgccgttggccagtccacaaatccagtggcgcagcagcaacagcagccggcggtggccaagaagcccagtagcgagacaaacaacatgcccacgcgacagtacctcgaccagacggtggcgccggttctgctccacggaatgcaggccctggctcgcgaacggcccacggatcccatacagttcctggcctcctacctactaaagcatagcaacgggtgcgacgagaacaacgcctccgccgccgccgtggacaacaactcctaagccctccatcctacctacctcccatttgtccccctccttagttgtataattgaacagtgaataaataataaacgtttaaagttagaatgtaatcgcaaaacacacaaatgtactaggattgctaagttgttataggatagccccatggatccagtttcgagttgagcagctccagggaggcgtc

SEQ ID NO: 14756 - DNA, 816 bp, DROSOPHILA
ccccaatccaattgagccagttgggtgaaaattgggccgaaaaacaggaaaatctcacagatcaattaaaatatgacggagctgctgattgatccggacatccgcgtgtgggtgttcctgcccatcgtgctgatcacgttcctggtgggcattgtgcgccactacgtctctatactgatatccacgcagaagaaggccgagatcacccaaatccaggacagccaggcaatgatccgggcacgcttgctacgcgagaacggcaagtatctcagcgcccagagcttctccatgcgtaagaactacttcaacaacgaggagaccggctacttcaagactcagaaacgggcgcctgtagcccaaaactcatccgccatgctcaccgacatggtcaagggaaactttattaacgtgctgcccatggtcgtgatcggtggctggatcaactggatgttttcgggcttcgtcaccaccaaggtacccttcccgttgaccctgcgctttaagcccatgctccagcggggcgtggagctggcctcgctggacgccgcctgggtctcctcagcctcttggtacttcctcaacgtgttcggcctgcgctccatctacacactggttcttggcgagaacaatcatgccgatcagacgcaggcacaggcggatgccatgacgggcgccgccatgactatgccccaggatccaaaggccgccttcaaggccgagtgggaggcgctcgagataaccgagtaccacaacgcactcaagaacattgacgctgacatgctggctatcgccagtgcacccgcggcatcatcctaa

SEQ ID NO: 14757 - protein, 247 aa, DROSOPHILA
MTELLIDPDIRVWVFLPIVLITFLVGIVRHYVSILISTQKKAEITQIQDSQAMIRARLLRENGKYLSAQSFSMRKNYFNNEETGYFKTQKRAPVAQNSSAMLTDMVKGNFINVLPMVVIGGWINWMFSGFVTTKVPFPLTLRFKPMLQRGVELASLDAAWVSSASWYFLNVFGLRSIYTLVLGENNHADQTQAQADAMTGAAMTMPQDPKAAFKAEWEALEITEYHNALKNIDADMLAIASAPAASS

SEQ ID NO: 14758 - DNA, 10114 bp, DROSOPHILA
gatcgtttgcgcatctattggagctgtgtgctggccaagctgcggacgggatcgttggctggtcgttgtactgggcgtattcagcttcctgggccagatcctgctcacgctatcgctgcagatcgaacaggccggaccagtggccattgctcgctgcgccgacatcgtcttcgccttcgtctggcagatgctcttcttcggagagacgcccaccgcttactcgctggtgggtgcggtgatggtgatgggatctgtggttctgacggccctgaagaaatgggcaggcaccctgccacgcgagtcgtcgctgcggaagcgattcaggctcatcctgctggaatagtgtggttccagagcaactaaaagagttcgcggtttctccctcgtcttgtcacatcgttctcacccaatcccggcaagcatcagtggccggcagcaaacccggttcattcatcgtagactctacttatatcaaggctcagatcgtagattaatcaaaatatataagaagggacgcgtgatatccactccactcataagtaaatactcgtagtgcgtgtttagtttagccaatttcgccgatttgttgttttgtacattgttatacatgcttaaaatacggtaataaatacaacttatgaataaaataaaaacaagttataatttgcatttgaatttcacgctcttctacatgcaaatttgcactacatttttatataattcatttaaatagttataaataaacaataaaatttcaaatctacagcgacacaacattttacattactttgtaaaaattccgttacatgtagaatacagacggcgcgacatcgatacatacatcgacatcatacatcgattgcagaattaattttacatccacctctagtttttcgtttgtttgtttgtttattattgtttatgtttatattctcgaagcacacacactcgaaaaaacagagcaaggaacggaaacagaaacggaagacaagctgagggactagaagcccaaatcggcaataaccgcgtccagttcgtcctgcagattggtggcccgcgatcgcacctgcacaatttgatcctgcaaattgtcgacgttcgcctggagcagcacattgcacttcttcatcgccgcgaaccggctctcgtgcttcttcacgcgcggctccacattcgccttcttcgcggagttgggcgagtcctgcggaatacggtacaggtgagctggctaaatagtttacgattctctggggctaactcacctctggctcggactcgctgcccgtctccgcctcactttcctccgattcggactcctcggactcgtcgtcggattcctcctcttcttcgctggcgtgctcctcctcggcctcctcttcgtcctcgtccttctcctcgccgtccacatcgtcttcgtctagcttcatggaggcagccatcttctgcacctccttctccagcttcttaaacttcttgttctcctccctgtcatccagagttgtttccagtttaagaacaatactacattacaatttgtactcacttgaggatactctggttcttcttcatggcttgcttgagggcgtccttctccttcttggccgcctcctctttgaccttcagtttggtaagcttgctacgcaggatcttgagctccttgccagagcgacgctccctgcgctccaccttcttctcctccggctcgtcaggatcgctttcgctgacctcaggctccagttccggcgagctatcccttccaaagtttgcatcgcttggtcgacgcgatccgtccaaggatccaccgccctgcagccgcagttaatgcaaaacggaaaacgggaaagaagggatacacacattggattagtgagggcatccttgagcggggcctgattttacctgatgccgtgctgcatggtagtggtcgtagtggaagcaatcgtcgtagtcgtcgtcgtcgtaagcaaagcaattactaatgtgcggtctgttagtgcttggtgtcgcctttgcaagagagcgtgaacgggttaatcggttagttgccgcggagtgcaatagcaaagctttcagggggataggaatcgggaccggacgtgtcctagacgggtcataacaccgctttggtctgggcggaagcagaatgcgggtggcgggagtctttcatgcagcatgcgtccggcagttggagtttaaggtcgtctacacacgagatcttcggacattgtttatacctctcgtttcgttttgataaagattacattttttaatgtctaccatggcatggccaggtccattatttgcttaaagaaaaattctggaaccttttgagcatttccccagaaacttgattttgttttgtctggaattgtgtgcaagcaaacagatagcacaggtaagggatgaaggcaccttacttgaaaagtatggcttccgaaatttaatacaaattgagctttgataaaatatggtcagttttgaatttcatttttcgctttctcttgataataattttactattcaacttgtctgattccttctcaacagcaagctgtctgctggcttcaatcagatttctggtattttaagtctcgtgtgcaaaccgtttttaagaaggaagaaaacaaggtgtatccacgggtaatcctttcccagacccattccacatttgtgtcaagtgttgtcagctgatctgtttctctggctacagtggctactagggacaactaacgagggatctaaggcggagtctacgaattgcggtggcttcgttagctgctcccgtctacttgccgccctcagcggacgcagcgaggcgacgccggcgacactaaaaacaagaaagaaggactagcttcggagtccgatgctttgcatacccttggagatagttatgttgtaaatggttgtaatccaaaatcctaatctcaactgacaacactttgagcagcatcccattacctacatatacatattaccgaacccgttctgcaaaaggaattacctgaagagctgctgccaacttgcgttcgagcaactgaatctggcggcgctgctcctcgatctccgtcttggcctccaccagctgctcggcggtgctctgatagttttgctccacctccttggacaccttccgtgcgtcctctacctcgcgcttcagggagttgacgtaggtctgttcggcggtgggcgtaggatccatggtggccacaatcacattggatccgtactcgagattcttttcgcgtgacttctcgcgttccagttcggtctctagggtgcggattttggccagcagcttcttgttctcgcgatcctgcgcctcacggtttcgcaactccagtgccagcatttgtttggtgctctgcagatcgtcgcggatcttgtcgatgtcgtccagctcgtcggggctttcctcgtcgatggacatagccgatacgatgctgggccgggatcctccggctcccaaggccgtggcactgcccggtccgagtgcatggctgctaggcgcctcgctgagcatgttgatcttcgactgcgacttctgcaactgctcctcgatggtcatctgtcggcggaacttgcgcagaccgtccagcaccggcttgctgcgatcgttggtcttcgttggcttcaacttgatgccgccctggatctgcttgagcagcttgttgtgcgagttgcccttctccgtctcgtagatgaacttgtcgtccaatttggttatcgacttgcacgtcaggatgggctgagatctattaggatttgaattgttataaaagagatttttgaacattttcgtgcagagttatctattatttggctgctggtacttctgcacacttaaaatttaagtaaaagtcattaacatttgccggataaagtggcgtaaacgcagtaagatgctctaggtactctttcctgtggccttaaataacttcagttttcattccctttttaattatcgggagtattgcagtcggtaattactgcacagcatgcggacaccactcacctatcgttgcaggccacatggcgcagcttcttgccgctctccacctccttcatcatctcggaccagtcggggcgccttcggggtcgagtcctgcgaatcgaagcgaatcggaattatggccattctgcgccttcaaggtaaaaactatcccgatgccaggatattcgggtatgcaagcactggcggtggtcagggttcatgggtcagtcgtcgaggtttccactcacctgagcttctcgagggtctccttctgtgtgctgctgagcactctcttctcaccgggagctaggggcgggggcggcggtggcggggccttgggcaccagcgagggcagcggcggcggggcgggaactgcaacaataaaacacggaatgcacccaagtgggcggcggttattctctgccaaatggtgggtggggcactcgctgcaagtggtgcaagtgggcgcgaggtttggtcgttgggcattagagcaaatcgccgggcgctgcgtgcactcgcggttattaaatataattttaatttaatgagtttgcaatttgtttcagttgtttgttgttctttcggctcccggggggttccttagtcaacccgccagaggattcgccaccccagtatttagctgtgctttgcgagcaaagttgcaccatacatatcaatacagggcaaagagaatggaatggatggctttacactccgaacattaagggttatttattccttttcggtttttgttttaaaaggttctgactctatcaattccccaattgtattagtttaaatctattttcatcttttcagctagtacattttaaatcacttaaatgccaatcttaagcatatctaacattttccttacaaaacagaggacccaaactattatgtcagctggattatacattttagagaatacattttgggaattgtctagtgttttgaaaaatgtcagttcatcatttcgccttttagccaaacacaatatgaatagaaaaggcttatagtctgtttatctgaagtttcgcctggtgtatggggggctcctaatagaatgagagcctagacacatggctgtctctgtcggaagttgcagcagagattgaaaagttagtgcctgcctccgttgcggcctccgcctacgtttcgtcctcgtcctcgtcctgctcccccgacaccgtcttgtcgtggaacgtggacctggctttgatggtgttttattgccttaacaccattcattcgatttctttgggactcatacacaggcatgcatcaagatgggtttctttcataattttttatcgaatactttgcattccttcatgctttttcctttcggcttgttgttcaaaagtgtaaaagtcaaacaacaaaaagaagagaaaaacaatgaaggcaccaccaccagcaccatcaccatcaccatcaccaagtgatgaaaagctgacaaatctgttaattagctttgtttgagtgagtcctggcaggaagcaggggcaggagatttgatgccttttgggtgggactgtgttaccaaggccacaaccgccagggccttatcctttgtctgagctccggctccggctccggctccttctccgtctccggtttagtctgccttctcctttttcggttttccagtttttcggtttctcggttgcgcctggctggatctgcacttaatctttaagtggttggctgccttttgcggtgcattagtatccgaaataccttccgaaaccccctcgacctgagtgaaaaagaggtggataacttggccaaactggagaggtaatgaaactaatccgaactcgtgttactttgccgaataaaatcagagcaaacgaccaacttgattattgtctagagctgcttcacctcaagctaccgatcctgcagctcctcatgaattttcccccaatgtctgcatgttaatgaactgcttccatgggggcagagaagctctgattaaaatacgtggtcaacttttcggacagccaattgaggacgcgtttagtgagttgcgctcaattcggtttagtaatttatggacaaaagctctccccctaaccactaaacccgccctcgaatccctggcagttatcctaaatcagtggcaaacaaaagtggaagcgggcaagaaacaaaagaaagcacaacaacatcacgcgaagagaaacgaggcaagggtgccgggcagataaaagtcttcattcattcatgtcgacaaaattatttcttatttaaataaaaagcaagcactgccactgccacgactgaagatgaagagcaggagcaggtcctggttctcggagctccgagttgagatgaggctacccacttaatataccgcaaagcccgcacttacgacgtcgcagaatgaatagcggtgtatgtaaacataaattttgcgagctcactctcggtgaggcatggcaccctcctcataaagccccctcctggctcattgtgttatcatcagcggaatattctatgcatgcacaaatgttgccgttgtcattgaatcaacccggagtgtggagtgtggagtgtcggatcgggtcttcaaaaactggcgaaccccaggcaactggagtgggtgagggaaatctgctgctgctacagggtactggttactgcttactactggctggttactggttactgggaagtggagttctggtcatggactgctgccagcccagccgcccgatgagtgacttcccagcttccaggctgtgctcattcattgtctgccggggcatgatgaagcaccgctcagccagctcatatatttcatgacacagaatggtagggagtcgttcccccaaagctcctttgtatgattagcgtttctgccttggccggaacgctgtgcgaaagggctaaccagggattacatggggctttttgtaaactatttggaacccgattagctcggaaatgatgctgttggtttaccgcaaaattctaagtatttctctaggatttcacctcgaaaccaagttcattttcctctctatgaagtgcagcttaaatttatatatctttggaagccgctttggtataaacgaattcggtaatgttttcctttcacaatcattattaaccctaaaataaatacagctcaaatttcgaatttaaagcaaagttttacatctgaggttgtccaatccaacgataattctgctttatattgcagcatttgtgtaatataagctgtaacgtttttataaaataaattagatatcatattattttatttgtttatttatttttgtttaccgaatacttttgctgtttccgctggacggtaatctttatttaatttcctttgtgcctccggagacgagccttaagtccaattagaaaattcaatttcaatttggatttgttgtggcgtcgtttgggggacactaatccaattatgcagtcaaccatttcattgtcgcccagtataattatggccaacagcaattggccaatattagcaagtgtgtatatatatatatgtgtgtgtgtgccacagaactttgaaccattttcctttacgtcattttgaccacgctacatctaaatttgaaagagcctaatcatcttttatgcttcaccgggtaggtcacacacagaaaacccaaaatgaaaatcaccctcacctattgaaagtcgacgtttctaatgacgggcagaccctagccttcaccaccaccaacaccacccaccgcttgaccctggaaacaaaaaagagccaagagtttcccaaaaaaaggaaggaaatatggggcgcagccgttacatgtctcgcatctacagagggatacatagagatgaggctcatttaaataaaagaaaatatttttcgtcctgccgctgtttgtcctttgaagacattcgagcctcttaagaggggaacttgcggccagcgccgtcttttatttcgttttgttttttagtggcggatatttgaatataaatggcgcatttagttagactctatcaagctcattcccatatatctttggctgctttcggctcggccacattctcccccccacgaggattcacttccaattggagtccgagttgccttttatcattcgatagttgccagttttttctttttttttttttttgggaatgaaacttaagagaccaggacgctggccggccatgtccttgtgtctcctcaccattgctcatctggctttaaaacattctattttatgttgtagttttgacagaatgagcaataatcatgaattttgtcttagaccataaaaaaagcccactccactgcggacccttcctcacaagatttcacccgaacacattaaataaatgtttcgctctcttttttcctagtgtccttctatgctgctccctttttttgttcgcttctgtttgatagggtgacagctttaaaacggacgaacgatgctctgttttatttttggcggacatcgttttttggtcattttatttagtgacctctttggccagtctccgcctcttcgatccttttgtttgtcggtcaagattaggaggcatttgcggtcacgttattgcccactgattaggtcgggcacaaaaggcaagttaactgcctcacacgtaggcgtagcggtagcggtagccgttgccttagccctttcacccaaaccatttggccagatcctaacgagcttttcacttcattttagttgactgccccaggggaaaactggaggcctggcccacggacacgggctttctgcaattcaattttgaggccaggtgacagcatgcttatgcaacatttggttgctttgttttttgaaagtcttgcccctgccgacttgccgccaatcgagcccagcctcgcggcaggaaagtccattgcagaattacaaccttctttagttgagagtgtgtgtctgtgtgtgtggcaataaatacggaattagagaggaacatttgctccggcatacctttgtgctgttatgtcgaacgcccttaccgacgagcggatggatcctcgccggaaaacgagatggttgcccaaataaaacccactcgcaactgcagtcaggcagtgaaacactttgcgcctctttcggctcaatgcacaacacccactaaaatttaataaataaaaaatgatatttatattgctttatagccttgtttttcccactgttcgttccttcgttgtgctcgtcccttgtctgtgtgcgctttgtggtttttgtttgggcgaaacattttgatgaaatattttttacacattcatttcaagtatataaattcccatattcctcccatacgagtgtgtgccttctgcatacagacactagaatatcgtatattttcctgcgtttttataaatgagcagacagcgatggttgtgagcgacaggttacagacattgatggcagcgtgaagctgtattggccgttggaaattaaatcttacaatggaaatggatatcttgaccaaactagtttcatattttttgcttaaatgcccactggttttaattgttgtgttttttatggcggaagcattagcacgatagctatcctttttaaaaggcatctcacattcaggaaataactgaatattgcagtgcgtcggctttcatggcgtatgagtaatttttgttaaaatgcattaaacggaatatatattgaaagcaatcacaatcttttgtgtaattacaaaagcacgttttttaaaacaaataaatatatataaaataaatattatataataaaatattactcatacgccccgtacaacccctaaatgtttgttcaatcgttaagcttataaaaaatatttaccaaaaatatcttaactgtgacacatctaatcttttaaaaatattctcacgttcccatcccaaatgcgaatttttttttgcacatatcgctcatccgccatggtgacgcattatttgttttgtttgctgctcccctagtggtggccttgccttttggccagggccgacgaaaatcggagaggcagaaagcgtaaaaatataaaatacatatccccacagccgcccgcaacgtaaattaaacatttctggttagaaattagacattaaagaagcaggggcaaaaa

SEQ ID NO: 14759 - DNA, 1898 bp, DROSOPHILA
tgcattgagccgaaagaggcgcaaagtgtttcactgcctgactgcagttgcgagtgggttttatttgggcaaccatctcgttttccggcgaggatccatccgctcgtcggtaagggcgttcgacataacagcacaaagttcccgccccgccgccgctgccctcgctggtgcccaaggccccgccaccgccgcccccgcccctagctcccggtgagaagagagtgctcagcagcacacagaaggagaccctcgagaagctcaggactcgaccccgaaggcgccccgactggtccgagatgatgaaggaggtggagagcggcaagaagctgcgccatgtggcctgcaacgatagatctcagcccatcctgacgtgcaagtcgataaccaaattggacgacaagttcatctacgagacggagaagggcaactcgcacaacaagctgctcaagcagatccagggcggcatcaagttgaagccaacgaagaccaacgatcgcagcaagccggtgctggacggtctgcgcaagttccgccgacagatgaccatcgaggagcagttgcagaagtcgcagtcgaagatcaacatgctcagcgaggcgcctagcagccatgcactcggaccgggcagtgccacggccttgggagccggaggatcccggcccagcatcgtatcggctatgtccatcgacgaggaaagccccgacgagctggacgacatcgacaagatccgcgacgatctgcagagcaccaaacaaatgctggcactggagttgcgaaaccgtgaggcgcaggatcgcgagaacaagaagctgctggccaaaatccgcaccctagagaccgaactggaacgcgagaagtcacgcgaaaagaatctcgagtacggatccaatgtgattgtggccaccatggatcctacgcccaccgccgaacagacctacgtcaactccctgaagcgcgaggtagaggacgcacggaaggtgtccaaggaggtggagcaaaactatcagagcaccgccgagcagctggtggaggccaagacggagatcgaggagcagcgccgccagattcagttgctcgaacgcaagttggcagcagctcttcaggcgacaccaagcactaacagaccgcacattagtaattgctttgcttacgacgacgacgactacgacgattgcttccactacgaccactaccatgcagcacggcatcagggcggtggatccttggacggatcgcgtcgaccaagcgatgcaaactttggaagggatagctcgccggaactggagcctgaggtcagcgaaagcgatcctgacgagccggaggagaagaaggtggagcgcagggagcgtcgctctggcaaggagctcaagatcctgcgtagcaagcttaccaaactgaaggtcaaagaggaggcggccaagaaggagaaggacgccctcaagcaagccatgaagaagaaccagagtatcctcaaggaggagaacaagaagtttaagaagctggagaaggaggtgcagaagatggctgcctccatgaagctagacgaagacgatgtggacggcgaggagaaggacgaggacgaagaggaggccgaggaggagcacgccagcgaagaagaggaggaatccgacgacgagtccgaggagtccgaatcggaggaaagtgaggcggagacgggcagcgagtccgagccagaggactcgcccaactccgcgaagaaggcgaatgtggagccgcgcgtgaagaagcacgagagccggttcgcggcgatgaagaagtgcaatgtgctgctccaggcgaacgtcgacaatttgcaggatcaaattgtgcaggtgcgatcgcgggccaccaatctgcaggacgaactggacgcggttattgccgatttgggcttctag

SEQ ID NO: 14760 - protein, 533 aa, DROSOPHILA
MMKEVESGKKLRHVACNDRSQPILTCKSITKLDDKFIYETEKGNSHNKLLKQIQGGIKLKPTKTNDRSKPVLDGLRKFRRQMTIEEQLQKSQSKINMLSEAPSSHALGPGSATALGAGGSRPSIVSAMSIDEESPDELDDIDKIRDDLQSTKQMLALELRNREAQDRENKKLLAKIRTLETELEREKSREKNLEYGSNVIVATMDPTPTAEQTYVNSLKREVEDARKVSKEVEQNYQSTAEQLVEAKTEIEEQRRQIQLLERKLAAALQATPSTNRPHISNCFAYDDDDYDDCFHYDHYHAARHQGGGSLDGSRRPSDANFGRDSSPELEPEVSESDPDEPEEKKVERRERRSGKELKILRSKLTKLKVKEEAAKKEKDALKQAMKKNQSILKEENKKFKKLEKEVQKMAASMKLDEDDVDGEEKDEDEEEAEEEHASEEEEESDDESEESESEESEAETGSESEPEDSPNSAKKANVEPRVKKHESRFAAMKKCNVLLQANVDNLQDQIVQVRSRATNLQDELDAVIADLGF

SEQ ID NO: 14761 - DNA, 4480 bp, DROSOPHILA
gcgtactcagtggcggtgagatcggcatcacgatggtccagttggtcagcgggttgcttattgcggagcaggattggcccgtgttcttctatctggttggtggaggagccgtggcctggttcttgggatttgtaagtctatacgaagtctaaagtcatgataatcatagtttaaaccaatttgttcccaagaccttagtttgctatagcactccggatcattgtccgtttattcagagcgaagaaagggaatacataaggtgcaatactagcaactcctttttgttgaccactggcagagaaagagaggagatggacggggaagatggatatgaaggtgaggatagggagcaccgcagagaagtggaagcaacgtgcaacactgcaccttggcggagcatgcttaacagcacgccactctgggccctggtttccacctccatgcagcaggaattccaacagaaattgccccaggagctgcaaattgcgctagaggaagtaagagcccgtggcaccagtttctcagaactaaccaccatcatcgaaacgatagcaccgtccgttggaaactggatagcttcactgacaacagggcggctgagcgacgtgctaatcgagcagcagattctcacgcgcactcagacacgccgcctcatgtcctggttggtcttcctatgcggatccatgtacatgctacagatcaagatgagcggagcacgaatctggagcgttcttggcatgggagcctactatgcgagcattaagctgctaccgctggatatgagtcccaactatgctggcactttgatgggcatttcgggcggcatgggcgcgcttccagcacttctgatgccctatctggaacaactggagaccgactacaagctggtgagcagtgtgagggccgccatgtgggtaatcggcgccagctacatatccggcgatgtccaggcgtttaaccaaccggaacgggagccacaatgaggagacttgcttgttttaagtttaatcttacgcttaaacataagctactggatttgtcttagtggattccttaggcaacagattctagtttacatatgtaccataatacatgacaatttctatgctaaagctaggagcataaacgtaaacaagctttatatatatatatataaataacaggtatggtcgatattaacttaattagagtaggactgctggctaaatgctccgcgctggctcttattttctcgggatatcaatcccaacacacaccggtttcatactctatgcaacgccctgggccatcaatccggattgggccattgccgacactgagttcatgtcgatacccagctttttggtgacgttgatttgggccactgccgcgttgcgcagcgagtaaacgtgcaccaactccgcctgactcttggcataaagcagtgccttttcaaaaagctcgacggcccgtgtgagttgcgcccgctgaacttcgactgttccgagtgtctcgtaggccagctcgcatttgggatctacttcgatcgccttgttgagcagctggacagccaaattaatgtctccgcgccactgaagcaccatgatggcctggtgaacgataagtgcaggatttgttggcgccaataccatggcctttttgtagtattcctccgcctgggtaaactgttgctggtcggccaacacctgagccgttagactatagcactcaacgcagctcgggaaacgctcgatggcattttggaaggtgtgcattacgctctccaagcgccgctggtcgccggccaggagggatagtcggtactcggcatagcacttctggacgaaggcgatggcgtggttgggtgcaatgctcaccgccttttcgaactcggccaaggcgggctctatctgctccagcagcagaagtatctgggcgcgctggtggtacacatctgggttctctgggttcaggcgttccgcctcagcaaaatcggctatacccttttcgcgctgatccagctggatgtagagagctgcccgctttatgtaggcatacgcacgcaagttgggatcagcatagtctgtagtgaaataaagttaatagaatagaaatcaaaaaacaactgaagaaaaccgactaattaatgaattaaacttaaacaaattcttaccattagctataatagcatcaaagtcctgctggctttctacataggagccgcacagcagatggaaagttccccgcataagcagagcctccactttgtactgtgcttcggcctcggaggattcgatctcttcggtgcaggcgggaataatttcctcgtacttctcctcgaggaaagcgaggtgggcgcgcaggaaaccctttgggggtgcatcggatttaggggctgggactttcatggtctgcagcggatccgcgatgaaggaacgcgtgtaggtgtttacgaagcaagccgacggcacgactggcacccgattgcgcatacccttctcggcgtccagtcggccggtctccttgagcacacggtcagcgaacatgatagtttgattattttggaacatctccaggatacaggtggctgtgacatcgtccaagcactcgttcatatccttggtggcttcgtgagcacgggcacgacgataatatgccttggcgtaacgaggattgaactccagcgaggctgtgcagtcctccttgacgttggaccacttcttgagcatctcgtaagaggcggcgcggttctggtagaagatggccatgtcagtgcggtgctccttgggacacttgtcgatggccttgtcatagaatttaatggcctcatcgtacttcccattcctgtagcagttgttaccctccgtcttgtagttgttggcctccttaagaggcgacagcttctcgcccagctcagcggacttttgattgcgctctagctcctggtccggtgcggtgccgtccagggagatggcctgcttctcgatcttggcctttggtctcttcttctccccgtccaactccttggacgcagccgtccagctcttcaccgcataggtgcccagtccaatggccaggggagttccaaggatgagcgccagctgccactttgtcagcttcatcgagccaatgttcagagtcatcgccattgagccggtctttttatggatgtgtgttatgtgtgatgaactgcaagaaaagagctgaatcagtttgggtgccgccacaaattgtgtaatactccgctggcttatcgctcagcgccttttgagcttgctaaatgccgggcggggggcacgtttctgcagtacctaacccccaacccaattgatttttcacacccccaactggccgggatgtgaatcagtgcagtcagcgaacggaacttacacttttttaaaactttacactgctgtgaatttggcaattgttaaacgtcgattgttctattttcagttagaactcgggaaacttagattctattgtatatcagcctgctgagcacacgacatcgaaaaacgatagacatcgataggtatggagtaataacggcactgcgaatgcttattatggaagaagaagatcagtgagagaataaattgtgtgaatagtttaaaaaaaaactaaggagttcgaatatgatgtatttgtaataaagcctgaatttatactttacgaatactgtacgaataaatattttagatctctatattacattctatcagaccgaaacagagttcttaaattttaaaatcggtttcatccactttacaaattgaaatacaaatgcattgtaatattacaatcaatgtatttataggaattcactagaatacacggacagcctatgggtgattctcctcatctgtgctggaagttggagctggagcaggagcagaagcggaactggtagtcgacttatcggtttccgtaaccaagatcttgtccagattctccagtttaactaggccctgggaatcggcgttgtggatgagatcacatattgtgggcgactccacgaccaggatatactggcacgtcttcggctcaagcaggtacatggatacagcggtgccgctgttcgttacaggtgtgcaggttaacttcacgtccacttcgcggggcactccaatctgttcgcagtgggttcccttgccataatggtgccagatggatgtcgtgaagccggaacggcgtgcacccttgtccgggttggcgttggaccaagcacgatgcgcttcctctgagaagtagccaagaaagagctccacttcgctggtcttatctttgtggaactgacgcacatgtcggccatagcagaactcgtacttccaccagccattgccctaaaaaaaagagtattattgaagcaaatgcatgggtcagctgcatgttattcctaccccagttaggcagttcttgcccgatataaagtccttaaggggcgtcagatcagtgatgggtgttggtccagtttcagaggctgctatagacagcagga

SEQ ID NO: 14762 - DNA, 2143 bp, DROSOPHILA
tcagcaggctgatatacaatagaatctaagtttcccgagttctaactgaaaatagaacaatcgacgtttaacaattgccaaattcacagcagtgtaaagttttaaaaaagtatgactctgaacattggctcgatgaagctgacaaagtggcagctggcgctcatccttggaactcccctggccattggactgggcacctatgcggtgaagagctggacggctgcgtccaaggagttggacggggagaagaagagaccaaaggccaagatcgagaagcaggccatctccctggacggcaccgcaccggaccaggagctagagcgcaatcaaaagtccgctgagctgggcgagaagctgtcgcctcttaaggaggccaacaactacaagacggagggtaacaactgctacaggaatgggaagtacgatgaggccattaaattctatgacaaggccatcgacaagtgtcccaaggagcaccgcactgacatggccatcttctaccagaaccgcgccgcctcttacgagatgctcaagaagtggtccaacgtcaaggaggactgcacagcctcgctggagttcaatcctcgttacgccaaggcatattatcgtcgtgcccgtgctcacgaagccaccaaggatatgaacgagtgcttggacgatgtcacagccacctgtatcctggagatgttccaaaataatcaaactatcatgttcgctgaccgtgtgctcaaggagaccggccgactggacgccgagaagggtatgcgcaatcgggtgccagtcgtgccgtcggcttgcttcgtaaacacctacacgcgttccttcatcgcggatccgctgcagaccatgaaagtcccagcccctaaatccgatgcacccccaaagggtttcctgcgcgcccacctcgctttcctcgaggagaagtacgaggaaattattcccgcctgcaccgaagagatcgaatcctccgaggccgaagcacagtacaaagtggaggctctgcttatgcggggaactttccatctgctgtgcggctcctatgtagaaagccagcaggactttgatgctattatagctaatgactatgctgatcccaacttgcgtgcgtatgcctacataaagcgggcagctctctacatccagctggatcagcgcgaaaagggtatagccgattttgctgaggcggaacgcctgaacccagagaacccagatgtgtaccaccagcgcgcccagatacttctgctgctggagcagatagagcccgccttggccgagttcgaaaaggcggtgagcattgcacccaaccacgccatcgccttcgtccagaagtgctatgccgagtaccgactatccctcctggccggcgaccagcggcgcttggagagcgtaatgcacaccttccaaaatgccatcgagcgtttcccgagctgcgttgagtgctatagtctaacggctcaggtgttggccgaccagcaacagtttacccaggcggaggaatactacaaaaaggccatggtattggcgccaacaaatcctgcacttatcgttcaccaggccatcatggtgcttcagtggcgcggagacattaatttggctgtccagctgctcaacaaggcgatcgaagtagatcccaaatgcgagctggcctacgagacactcggaacagtcgaagttcagcgggcgcaactcacacgggccgtcgagctttttgaaaaggcactgctttatgccaagagtcaggcggagttggtgcacgtttactcgctgcgcaacgcggcagtggcccaaatcaacgtcaccaaaaagctgggtatcgacatgaactcagtgtcggcaatggcccaatccggattgatggcccagggcgttgcatagagtatgaaaccggtgtgtgttgggattgatatcccgagaaaataagagccagcgcggagcatttagccagcagtcctactctaattaagttaatatcgaccatacctgttatttatatatatatatataaagcttgtttacgtttatgctcctagctttagcatagaaattgtcatgtattatggtacatatgtaaactagaatctgttgcctaaggaatccactaagacaaatccagtagcttatgtttaagcgtaagattaaactt

SEQ ID NO: 14763 - protein, 587 aa, DROSOPHILA
MTLNIGSMKLTKWQLALILGTPLAIGLGTYAVKSWTAASKELDGEKKRPKAKIEKQAISLDGTAPDQELERNQKSAELGEKLSPLKEANNYKTEGNNCYRNGKYDEAIKFYDKAIDKCPKEHRTDMAIFYQNRAASYEMLKKWSNVKEDCTASLEFNPRYAKAYYRRARAHEATKDMNECLDDVTATCILEMFQNNQTIMFADRVLKETGRLDAEKGMRNRVPVVPSACFVNTYTRSFIADPLQTMKVPAPKSDAPPKGFLRAHLAFLEEKYEEIIPACTEEIESSEAEAQYKVEALLMRGTFHLLCGSYVESQQDFDAIIANDYADPNLRAYAYIKRAALYIQLDQREKGIADFAEAERLNPENPDVYHQRAQILLLLEQIEPALAEFEKAVSIAPNHAIAFVQKCYAEYRLSLLAGDQRRLESVMHTFQNAIERFPSCVECYSLTAQVLADQQQFTQAEEYYKKAMVLAPTNPALIVHQAIMVLQWRGDINLAVQLLNKAIEVDPKCELAYETLGTVEVQRAQLTRAVELFEKALLYAKSQAELVHVYSLRNAAVAQINVTKKLGIDMNSVSAMAQSGLMAQGVA

SEQ ID NO: 14764 - DNA, 4570 bp, DROSOPHILA
agtttgttaataatcacgcctgtttgtaaatatagatatattttgtttttacatggtttggggggagctttatttttgtttttaattgaacctcggaactactacgtacatttagagttttaagtttatgaacttttcgtaaaaagtttcgatcggcggactttcgaaatcaaacttaatctatgtacaaaaaagttctcgaaatttccgttcatgccttacaaaaaatacaaaaaagtattaatacatatacaacagagttgctgacatcattgagtcgcgataaatagttgttatcagtaattgcattcgaaaaaccaaattggaaagtaataaataatgacaactacacttgctgctggaattaattgtttatcaaaatgtaaaaagatcctttcgctgcttttggtcctacaaatgggatttcttttgatgcatccttttgaaaactcaagtggatgattaatttttagtttttaattcattttaaaaatgtccgcaaatggtaaacattaaaatttaatgattaaactgtatcgttttttttcccgaatcaattgcgcgttgttgttacggtaaatacatgggataaatagctaaaactaagtaaatacgtacacttaaaaaaattctacacactggagttaaatgttgctttgctttcgtttctgaatttcttgctttgtcttgttttgcatcgttgcctgacgatttccattctaagtttcgtttatagtttcgttaatttttttttgttcgcaatttgtattttgtttgttgctctataaaatatgcaaactggttgcattttgatcacggttcttgctgttgcatataaacatccatctcacttttgattattggaacgacttgagatttttgaaaatgaatgaagaatatggctgttttcaaatttatccatgggcatccggtttcgaatccttcagcttcattcgccaatggtccaatggttctttgaagttgatccctatggctggccttagccattcggtgaggtggatgctccaggagatgtggttgtggccactgcatcgctgttgctcatcttgtgcagcatgagggagtgcgtcgatctggtggcggtggagctgggatactttggctgcatttggctgttggacactgtggaagagctgctggtcgccggcggtggcggtggctgctggctgcaagtgaacagagttcatcagtgtgcttttgctagcccttaggacacacaccccttctgctcgccatccttcttgctgttgaacatggccaactcgatctccgtgtgctggctgttcatgtggcgcacccactccgccggcgtatcaaaggatctgcacatgggaaagggagttagtatatattttgcttctataactccaaacacttacgtggaacacaaatcgcagagcagagttacgtgatcgtgatccatattgttctcctgttgctgaaaaacacaatatataatctggttttaatacatccaatagatattggtaaccgatcatcactacgagttaaaatcatacttcagtagatttggatttattaaagggatgagttgctgtccaagtactcaccgaaacgcgacgtcgtttctttggcacataggttttaacagatcgcagggcgaggttgctggaggcggatgtggtgctcccgctggcactggatggcaggagattcctctccgtgccgcccgtgggatcgccggcatgtgtgcccaggtgacggaccagcattttggtgtcctcgaaggacttctgacagatctcgcagaccagcagctgcttgaagttgttatagtcgcgcagcgtgtgctcctcgctctcctcggagggtgttccgcgatccctattcacctccagcttcacggcggacatcttgaagtcgagtggctgcttgggcgaagccaatggcaactcctccagattgttgttgttggacgcactggaggcgtttggtgggttgttgctccagtcggtcggctcctgtttgatggtgaggaagttgtgcggatgtcgaagggtcggcggatgtgatggtggtgcctgctgtggtggtggcggaggtgtggctgccaggcgagaggataccacgtgctcaaagtgtggtgcttcatagtagtcccgagctgaggggaataaaacatgggattagtcatcattagcagctgtgctgagtactcttactcacatctttcgcatgcgctctccctcctcagacgtcgctcgaagaccaggcccacctcgttccgctcacgaagtgcctgctcctcgtactctgtccgccgcagcgtggtctccgcttggtcagcacctggtccggcggtcaggggacaactgctgcagcccacctccgtgcaaatggaaatgggctgcgatggcggggcacctgaacctccaactgatcctcctcctcctcctactgttgtcgttgtggtggttggtggtggtgggtgagactgcgactccaactgaccgggtgccgcgaaacagcatttgtcctccggatcgatggccacctccttgttgacggaaatgcccaacttgctgctgctcgcgacggttagtagtcctgtgtgggcggccaatttgggtgacttaatgatcacaggcgagtccttgggcatcacggaggcaccaagtccacgaaactgctgctggggattatggtgattcaggtggctgtggtgtgacgacaggtggtggtgatccaaagcgaaacgtgtcgatccacccggcttgctggcatatagatctccctgaagttgcgccgacatggttgattgtggcggcggcggagggggcggcaaagcggttcgagtgccattcgacatgtacatggtgctagcctctcgcggatgcagatgcccggccagtgaatggggatgatgtgtggtcgtgaccactgagccggatccaccgccattggaagagctggtgcggcagaggccacggatcttgaggatctcaccgccgcgcaggacctcgttaagtatgtcgttggaaactgtggcctcgccgctgtacatgtactgaaccaggatctggatggcgcgatggctaagatccggcggcaggaccacatacagcactccattgggattggtgatcggtgccgtttcgaacatggtggcgaagaactgggacgaagcactcaggatgaacttgtgggccgagatgcccactgtgggtatatccgaggggatgccgctgctgttgtaggagctgtacagaaccacatcggcgaacttttcgttcctaaaggggaaatatgatgcgttaatatagcatatctacgtattttgtagtactcttggagaatattgaagaagggttcttagaaaatgtgtgtttaatcctctgaccctgatacatttaatgtttttaacattaaacaattaaaaacgctgctagatcacaattacaaaaaacaaaaaacttcaaatatgtaccaactatggtacagtggtacttacttataaagtgtggctatggaagagttaagataggtgaggtgtgagtcccacttaaggtgatagttttcggcggccatctctgcggccggcagctcctgtacaacgataaaatcaataaataaatcaataaatgccgccagtggggtgtttattttgaatctcccgatcccaccacaccacccaaggagtggtgaatagagggtttagccaccatgctcttgtgacagcatatttctcacacgaagcaacggtcatacttattcgctagcttccatttgtttacatattttcatttgtgtttattttgaaaatatcaaaatgtcgcagttcgacacgcgacttattgagctggttagggctaatcccaagctttatgagcgcgaacttagaaacgcaccctacgaagcgcataagaagcgacatccggaaatctggagcagcatcgccacttcattaaattcagaaggtaagaaactgataaattgtataaatattccctaattcctcattatattttaacttagctagtgcctgtgtcagtcgttggaatcatctggtggccaaacagcgtcgggagctggccaaagaaaaggccggaggcactggctccgattggagtcttctgccgcatttgaaattcctgcagcatcaccaccatccgattaatcaccgaaattcgggtgatctgagtaggagcacactgaaatccagcgacgaggtcaacgatgatgaggatccgctccaggaggccatggatgagcagctggccgttgcgggagctgcaccagcaccacccacaaatcctgcccatgcaacgccagtggctcaagcagaaaagaggatagaagccctgcttgaaggactgggcgaagcaaaccgaattaaggcggagaaacgcattctggcctacctatgcaaatgcaatctgcgcgccctgaacgacgagcaaatcgatgatatagttatttaggaagattgccaagatgatatagttataaaggaagattgccatgatgataagttaaatacatacatgccgtgataggatatcaaaagtagcaaacatcactgatcata

SEQ ID NO: 14765 - DNA, 2046 bp, DROSOPHILA
atggccgccgaaaactatcaccttaagtgggactcacacctcacctatcttaactcttccatagccacactttataagaacgaaaagttcgccgatgtggttctgtacagctcctacaacagcagcggcatcccctcggatatacccacagtgggcatctcggcccacaagttcatcctgagtgcttcgtcccagttcttcgccaccatgttcgaaacggcaccgatcaccaatcccaatggagtgctgtatgtggtcctgccgccggatcttagccatcgcgccatccagatcctggttcagtacatgtacagcggcgaggccacagtttccaacgacatacttaacgaggtcctgcgcggcggtgagatcctcaagatccgtggcctctgccgcaccagctcttccaatggcggtggatccggctcagtggtcacgaccacacatcatccccattcactggccgggcatctgcatccgcgagaggctagcaccatgtacatgtcgaatggcactcgaaccgctttgccgccccctccgccgccgccacaatcaaccatgtcggcgcaacttcagggagatctatatgccagcaagccgggtggatcgacacgtttcgctttggatcaccaccacctgtcgtcacaccacagccacctgaatcaccataatccccagcagcagtttcgtggacttggtgcctccgtgatgcccaaggactcgcctgtgatcattaagtcacccaaattggccgcccacacaggactactaaccgtcgcgagcagcagcaagttgggcatttccgtcaacaaggaggtggccatcgatccggaggacaaatgctgtttcgcggcacccggtcagttggagtcgcagtctcacccaccaccaccaaccaccacaacgacaacagtaggaggaggaggaggatcagttggaggttcaggtgccccgccatcgcagcccatttccatttgcacggaggtgggctgcagcagttgtcccctgaccgccggaccaggtgctgaccaagcggagaccacgctgcggcggacagagtacgaggagcaggcacttcgtgagcggaacgaggtgggcctggtcttcgagcgacgtctgaggagggagagcgcatgcgaaagatctcgggactactatgaagcaccacactttgagcacgtggtatcctctcgcctggcagccacacctccgccaccaccacagcaggcaccaccatcacatccgccgacccttcgacatccgcacaacttcctcaccatcaaacaggagccgaccgactggagcaacaacccaccaaacgcctccagtgcgtccaacaacaacaatctggaggagttgccattggcttcgcccaagcagccactcgacttcaagatgtccgccgtgaagctggaggtgaatagggatcgcggaacaccctccgaggagagcgaggagcacacgctgcgcgactataacaacttcaagcagctgctggtctgcgagatctgtcagaagtccttcgaggacaccaaaatgctggtccgtcacctgggcacacatgccggcgatcccacgggcggcacggagaggaatctcctgccatccagtgccagcgggagcaccacatccgcctccagcaacctcgccctgcgatctgttaaaacctatgtgccaaagaaacgacgtcgcgtttcgcaacaggagaacaatatggatcacgatcacgtaactctgctctgcgatttgtgttccacatcctttgatacgccggcggagtgggtgcgccacatgaacagccagcacacggagatcgagttggccatgttcaacagcaagaaggatggcgagcagaagggccagcagccaccgccaccgccggcgaccagcagctcttccacagtgtccaacagccaaatgcagccaaagtatcccagctccaccgccaccagatcgacgcactccctcatgctgcacaagatgagcaacagcgatgcagtggccacaaccacatctcctggagcatccacctcaccgaatggctaa

SEQ ID NO: 14766 - protein, 681 aa, DROSOPHILA
MAAENYHLKWDSHLTYLNSSIATLYKNEKFADVVLYSSYNSSGIPSDIPTVGISAHKFILSASSQFFATMFETAPITNPNGVLYVVLPPDLSHRAIQILVQYMYSGEATVSNDILNEVLRGGEILKIRGLCRTSSSNGGGSGSVVTTTHHPHSLAGHLHPREASTMYMSNGTRTALPPPPPPPQSTMSAQLQGDLYASKPGGSTRFALDHHHLSSHHSHLNHHNPQQQFRGLGASVMPKDSPVIIKSPKLAAHTGLLTVASSSKLGISVNKEVAIDPEDKCCFAAPGQLESQSHPPPPTTTTTTVGGGGGSVGGSGAPPSQPISICTEVGCSSCPLTAGPGADQAETTLRRTEYEEQALRERNEVGLVFERRLRRESACERSRDYYEAPHFEHVVSSRLAATPPPPPQQAPPSHPPTLRHPHNFLTIKQEPTDWSNNPPNASSASNNNNLEELPLASPKQPLDFKMSAVKLEVNRDRGTPSEESEEHTLRDYNNFKQLLVCEICQKSFEDTKMLVRHLGTHAGDPTGGTERNLLPSSASGSTTSASSNLALRSVKTYVPKKRRRVSQQENNMDHDHVTLLCDLCSTSFDTPAEWVRHMNSQHTEIELAMFNSKKDGEQKGQQPPPPPATSSSSTVSNSQMQPKYPSSTATRSTHSLMLHKMSNSDAVATTTSPGASTSPNG

SEQ ID NO: 14767 - DNA, 4487 bp, DROSOPHILA
aagcgctgtgggatccagctgggattcgggcggatgcttgctgcgcagatctatggagataacctggcagaaggcgctcacctccttgtctgtgcgtccacagcggtgataattggaagtggcgcgagattcgatgaggcaggtacgagctagagcgcggaacaagttggattctgtggcaaagcaaaagatttagcaaaaatctataagatttgtgttcagaacctaccgatagtatcattggaatcctcctggcaggcaaatccttgataatcccaaccaaagtaggtaatcttaagcaagacatgacgcttgtgtgcactgaaaaaattgaatcatggagcttgatccaatctggaaatggttccacaacatacctgctccaatcgaacttacgtatcttctgcactttgctggatgtcttggccacctggctaactttgccctccgcttcgtttccaattaatccagagtattccttatcatgtttatctttctcgcttaactttttctgcagcagattccgcaactgaaagttataggcctccagttggataaccttgtcgatcagctcggtttgagtcagtttttcaagtgcctctcggcttaagccttttaatcgtttatttatcacaacttttttgtcatttgttgcactcattttggcggttaatgagaaataaacaatttaaaagcaacacgtgaaattactttggcttttgccattcgctacgaaacgcgcacaacagagatgagcaagctttgctaatagcgcaaatccactggatgttgcatgttgtttgttgtatgaaaaagctgtttggcaatttgaacaataaagtaggcgaatttacttgatttcacgtattttgaaaaataaaacctttattaataatctgtcattccaaagttgatcagaaataaatatatgatatgaagcctgtaattttggtatttttattgtgaccatttgtatgtttctgacttcagcacggtcacactgttcgcagctactgtttatgttataatttatttttgttgtataaaaacccgaaaatcatctggagttcaagccagcatataagttcagcgacttaaaatcattcgctgcctattgctgcttctgtggtgcagcatccgagggtgaagcacaccacgaaagccacgaagaaagggggcagcaaggacatcacaaaggatggacgcgagcagatacaaggtcgacggcgagaacgacaattgcggggcgaccttggccgctgtaaatctgaatgtccttcccgatgagatactggagttcatattcacctacctgccaccctacggcgacttggagcactgcagcctggtgtgcaagcgatggcacgccattgtgaagagtgggcatctggaaagtgcgaatataatacaacttaactaacttcttatcctttgcagaccttgtgcgtcgttccagacacaatctcgagaagggcctcatcgactttcgactgcgctgggaggtgttttcccagcagacagtcaatggcggggcaggagcactattatcctttattgccggaagatttgctcattcggctgtgcggcaagacaactccatgtacgtattcggcggtggatcctcgtcggacaccaccttcaacgatctgtggcgctttgatttgacgcacatgcggtgggcgcggccagtggccacaggaacctatccctcgcccaagggcagtgcatcaatggtggcgtggcggaaccagctgatactctttggcggatggcgatacccctcgctacatccgccctaccaaccatggtgcttatttgacgagctgcactactacgatcttggaaagaaccgttggctgctgcgaagctccctatcttccccaccaccgatggctggacactcggccacggtacatggcgatcggatggtagtttttggtggttaccagatcaaagacgatttcaatgtgaactcgaacgacacatgggtactggatctgccggagcagcgctggtggcagccgctctttgtgggcaacacgcgacccagtccgcgatacggacaaatacaggtggagttgggaaggaaccatctgctgatcgtgggaggatgtggcggtgccaatcgcgtgtacactgatgcctggctgctggacatgaccagggatgtatggagctggaagtctattgctgtgcgcaacaagcgctttggagccgtccacatgtggtgcaatcccggttgcaaggtcaacaactacctggtggtcgtgggcccatcgcccaacatgccgcaggacttccaaatgatgaagcaaagcagagtccccgtcgttggaggccgtggacctccgccgccgaatcctcttcaaaatgtacctccaaggggataccggataccagttccggatcgtcgactaggtggaggtggattgggtggacctggccaaaatcgcggaggaaacatccgtcctggagtgggaggtgcagcagctgcactgggtcctcaagaacagtatttggctaaccggagagcaattcttaatcaacacatgcagcaagcgcagcaattcctgcacaacagcaatgtgaacaataataacaataattaccaaccgcgctcgggaagattgagtgatctgcatgccccgccagctgcggctgcagctgcttctcctccatccccgccagtgcgaccaaatgctccgccatctcccgccgacggcgatgtggatgccgcacagcgtttgcaaagaaatttagctctaaggtgtcgtgataatgaacctaggctaccaaaacgtttcgatgagctctatgaggtgagtgattttaagtgcgcctatcatggacctcttatttatttcctgtttcaaaaggatccctttcgaatggccgccttcaatgtgcccacacgatcgcggagtgcttcgcgggatcacaacgagcgaatacgacgcatggaggagaagatgaacgccattcgcaattcgcgacgcagcgcaccggcggccgcccaagtggaaccacaaccgctgcgcgcaccctcgcccaaacgattgcgctgcaatgtgcaatccctgttcgtgtgtgacatctccggcattttggacagcagcgaacccgccctcgagtgggtggaatacaaaaacttcggagtgcttaagggtgctccggatcggctaatcctctcgagcctcattgctggcaacggcgagctcatcctcttcgggggcgtgcacaaggagacactaacggacatcacacatcatgtgtccaattccatacacttcctgagtgtgccacgtgatattatctaagctctgaaccgacgcccgtcctagtccaacgttacgcggatagcactttgttgctggtaaccccacttcccaaatccttcaaagttcggcgtaagaggttcatttaggcattaaattgagtgtaatgaagaatatgttttatgattataaacgattatttactagtggatctccaacgattggctttaattattgctttccagcacttttattaggtcgtaagcatgttggaaacgcatatcacagaagtcatcttggcatgctacacactgctccaggagcagctgcagcttttcgttgtccaaattcttaagcaagtaatcccttagcaaaaggcacgcctggtagatattggcatccagctgatggccggagcagaatgcagagacatcaaatgtgaatccctcgccggtcagcggctcgtacttttcggcatgtcctgctgcgaacgaagcgtccaccaggaccacggagtccaaatcaatgaggtacaccttcttggtgtcttcgtcgtaagccaaattatcggccgtgaaatcggttaagataatgcgaaagtccgcgaatccaaaagtcagcttgagggagagctggatcaactggagagccagctccacacgcaaaccttcttcagcatcgacgtaatgagctaaagtacgtcctgcattggattgaaaatgtgttagtccgcaggaggcgtaggtggtaggcactggaaatccctgcagatgcagttcctgcataagcagcggactaacgtagtacatcatgtagaaccacacactggcggcagcatgtccacgctgctccaagtacgaaacaaagcggggttcccttgccagagttcggcagagatgaaaaccaccaggtcgctcctctagttcatagaaatcttttttcacattttttatctgattactctgtgcatcaatgatttttcttttggccaccagctggacttcctgatcccggtcttttagccttagaaagtaaatcgctcggcgatcaacgagcaacgaaatggctttcacaagtctactccaatccgagggctctgcaattttctggaagatttccccgcacggctcactctgtccaacgaaacagtctggacacaagcgcagatccttctcgaaaagttcctggaacacctctcgctgcggcttcacc

SEQ ID NO: 14768 - DNA, 2372 bp, DROSOPHILA
ctgttcgcagctactgtttatgttataatttatttttgttgtataaaaacccgaaaatcatctggagttcaagccagcatataagttcagcgacttaaaatcattcgctgcctattgctgcttctgtggtgcagcatccgagggtgaagcacaccacgaaagccacgaagaaagggggcagcaaggacatcacaaaggatggacgcgagcagatacaaggtcgacggcgagaacgacaattgcggggcgaccttggccgctgtaaatctgaatgtccttcccgatgagatactggagttcatattcacctacctgccaccctacggcgacttggagcactgcagcctggtgtgcaagcgatggcacgccattgtgaagaaccttgtgcgtcgttccagacacaatctcgagaagggcctcatcgactttcgactgcgctgggaggtgttttcccagcagacagtcaatggcggggcaggagcactattatcctttattgccggaagatttgctcattcggctgtgcggcaagacaactccatgtacgtattcggcggtggatcctcgtcggacaccaccttcaacgatctgtggcgctttgatttgacgcacatgcggtgggcgcggccagtggccacaggaacctatccctcgcccaagggcagtgcatcaatggtggcgtggcggaaccagctgatactctttggcggatggcgatacccctcgctacatccgccctaccaaccatggtgcttatttgacgagctgcactactacgatcttggaaagaaccgttggctgctgcgaagctccctatcttccccaccaccgatggctggacactcggccacggtacatggcgatcggatggtagtttttggtggttaccagatcaaagacgatttcaatgtgaactcgaacgacacatgggtactggatctgccggagcagcgctggtggcagccgctctttgtgggcaacacgcgacccagtccgcgatacggacaaatacaggtggagttgggaaggaaccatctgctgatcgtgggaggatgtggcggtgccaatcgcgtgtacactgatgcctggctgctggacatgaccagggatgtatggagctggaagtctattgctgtgcgcaacaagcgctttggagccgtccacatgtggtgcaatcccggttgcaaggtcaacaactacctggtggtcgtgggcccatcgcccaacatgccgcaggacttccaaatgatgaagcaaagcagagtccccgtcgttggaggccgtggacctccgccgccgaatcctcttcaaaatgtacctccaaggggataccggataccagttccggatcgtcgactaggtggaggtggattgggtggacctggccaaaatcgcggaggaaacatccgtcctggagtgggaggtgcagcagctgcactgggtcctcaagaacagtatttggctaaccggagagcaattcttaatcaacacatgcagcaagcgcagcaattcctgcacaacagcaatgtgaacaataataacaataattaccaaccgcgctcgggaagattgagtgatctgcatgccccgccagctgcggctgcagctgcttctcctccatccccgccagtgcgaccaaatgctccgccatctcccgccgacggcgatgtggatgccgcacagcgtttgcaaagaaatttagctctaaggtgtcgtgataatgaacctaggctaccaaaacgtttcgatgagctctatgaggatccctttcgaatggccgccttcaatgtgcccacacgatcgcggagtgcttcgcgggatcacaacgagcgaatacgacgcatggaggagaagatgaacgccattcgcaattcgcgacgcagcgcaccggcggccgcccaagtggaaccacaaccgctgcgcgcaccctcgcccaaacgattgcgctgcaatgtgcaatccctgttcgtgtgtgacatctccggcattttggacagcagcgaacccgccctcgagtgggtggaatacaaaaacttcggagtgcttaagggtgctccggatcggctaatcctctcgagcctcattgctggcaacggcgagctcatcctcttcgggggcgtgcacaaggagacactaacggacatcacacatcatgtgtccaattccatacacttcctgagtgtgccacgtgatattatctaagctctgaaccgacgcccgtcctagtccaacgttacgcggatagcactttgttgctggtaaccccacttcccaaatccttcaaagttcggcgtaagaggttcatttaggcattaaattgagtgtaatgaagaatatgttttatgattataaacgattatttactagtggat

SEQ ID NO: 14769 - protein, 667 aa, DROSOPHILA
MDASRYKVDGENDNCGATLAAVNLNVLPDEILEFIFTYLPPYGDLEHCSLVCKRWHAIVKNLVRRSRHNLEKGLIDFRLRWEVFSQQTVNGGAGALLSFIAGRFAHSAVRQDNSMYVFGGGSSSDTTFNDLWRFDLTHMRWARPVATGTYPSPKGSASMVAWRNQLILFGGWRYPSLHPPYQPWCLFDELHYYDLGKNRWLLRSSLSSPPPMAGHSATVHGDRMVVFGGYQIKDDFNVNSNDTWVLDLPEQRWWQPLFVGNTRPSPRYGQIQVELGRNHLLIVGGCGGANRVYTDAWLLDMTRDVWSWKSIAVRNKRFGAVHMWCNPGCKVNNYLVVVGPSPNMPQDFQMMKQSRVPVVGGRGPPPPNPLQNVPPRGYRIPVPDRRLGGGGLGGPGQNRGGNIRPGVGGAAAALGPQEQYLANRRAILNQHMQQAQQFLHNSNVNNNNNNYQPRSGRLSDLHAPPAAAAAASPPSPPVRPNAPPSPADGDVDAAQRLQRNLALRCRDNEPRLPKRFDELYEDPFRMAAFNVPTRSRSASRDHNERIRRMEEKMNAIRNSRRSAPAAAQVEPQPLRAPSPKRLRCNVQSLFVCDISGILDSSEPALEWVEYKNFGVLKGAPDRLILSSLIAGNGELILFGGVHKETLTDITHHVSNSIHFLSVPRDII

SEQ ID NO: 14770 - DNA, 5096 bp, DROSOPHILA
tctccagcagctcctcgggcttagacagcaaaagaaggttgaaaagaccctctatgtagtagccgtcgagatcgcatttgtacttctcaatgaattctttggccttctcccttagtccactggcgaggatcttgaagtagatctgcaccagaattgggtacagaaccatggacagctcatgcttgtatatgtccagggagtcctcaacgaaagtgcgcagctccttgtatgcctgctcatagtgctgagcatcaaagctgtcgtcgtcgatgaacttggccagttcctctgcagcattggcctccgtcaccgcggactgtttatgaccctgcgccggagattggacatgtttccgctcccggttggcatcgccagctcccaaaactgcgcccagcacctgctgaacatcactttcgctgatttccgacaattccacactgctcacattcgcctcttggcagagcagctcctcagtgctcttcagctggtactttttgatgagtttcagcaggcacagcagctcacgcttgtcgtgggacaattgagtaccgtttcccccgtttatattgctcacttccaggctcattttcgcggaaaattgaaatatatggaacttgtgtactattttgttatgcgtggaaaagtgtgaccaggttggcatcggttgaaaacggccaagtggagaatgaaatatactaaaatgcaccaagtacagtcaaaatatacagtagccactagcgaagacggattctaaaaataaattgtattaatacattataaattatatctttttgccaatttttggaattacttaaaatataatgacatatttcattctttcattttactacaaaattaatatttaacttttatgcaggtcaaagaaattatttgaagatgtgcttataaaggtcttactgtggacagctgactgaatacttttagtattttttgagcaaatatcttaccagaatcaaaacattcgtaatgaagaggagagtaattgtgaaaaaggtaaaatacaaagtaactggccaaataaacaagctaatttttatagcagagggtaataatttgctgtgcattaacagaattaacttgccattgcatatttcagtgtatttgtctggcgcctatcccccaactccttgaactttgacaccgcctcctcgaaattaacccttgtactcgtgctttctgttgtgtttagtccatatttattgtaaaaaatgaatgaaaatgatgatgcggtaggtccatatgtaacatttaagccatattagctaatatcgtgatcaattcccgcagaaaaaagtcgtcggcaagcggaattcggtgtcgttcgatcaacaagatccaggacagccgagatttagcttctctgggagagtacaggagctagtcgagggctacaattcggccatacagctgctggcgcccaagtggccctggttcctctaccccggatatctgacatacgccgtatactggcgttacgccaaatattacaagggcaagtttctgctgacccccattccgaaccgcctctacgatctgctgatcaagaacgagcagattaagtcggagcacctggtgttcgccagtcaggaggtgtacgaaaactatgcggaatcgccggacgtcaactttgtcaacttggttatccgcggcaggagggtaagaatcggtaagccgctagcttcagacgaaggaaatatgacccaaacggttatcaagcaaatgctccaggaggcgccgcatacgattgtggcccagatcttgccggctgcacagtgccaacccaattgtctgtacgttcaggtgggtatctagttctaaataaatggaatattttctataattctacatcgtgtaaaatttcaggagaacttctacggcaacatattggatcgctttcaaatccgctccaactgctgggtgcaggtagagcattttgccgatgagcagacaatacctggaatagcaaccaaagcacatgtgtacttagtcgcagatccccatgaacttcccgccgaactgacagaggtcatcctgagcaactatttcaatacacctcgactcatgcatcgtggacatacctaccgcatcgaggtgaacgcagagttggtgggcactgcgacttatgcccactattacctgatattcgctcacctacgccacgtccacctaaagtgtattcacctggagacaaagggcagcgagttcgagctgcaagcgattgttgccaaaaactttagcaaccttgttcaagtgcctgcatctcacagtttcctgcctcgtcaagtgcttgacagcatggccatcgttgagaactatccaagtggacttcgaaagccctataagctgttgcgctcctcagtagatgctttcctgccaaaaaagtccgcctgcctgtcgtcaaagcacatatttcctgtgttcctcctgcaaggcgagcgaggatcgggcaaatcaaagcttgtgagcgccgtagcccaagagttggggatgcatatttacggagcagattgcgcagagatcgtttcgcaagttccctcccacacggagatgaagctaaaagccgtatttgccaagagccaagtttgtgaaccgcttatgatttgcttccataacttcgaggtacgtgggctttgagtaaatgtgcagaggttattacaattcatattttcagatttttggcatagacaacgagggtaacgaggatctgcgtctgctttccgccttccacgtgcaggtccaggaactcttcaacagggaccgcaagcatccgattgtagtggtggctttgaccagtgacagacaccttaaacccatgatccaaggacttttcttggagatcataaacattgacatgcccagcaaggaggagcgattcgagattcttcgctggatgcacgtgcgcgagactttcaacgatattatctacaatcagaaggctattgagcaattacccttgttctcgcgggaaaatcagtcgcaattcatgccacgcatttctcccagctggagggaaaccctcaatgtccttcaggatgtggctgcaaagtcacagggctttctgctcggcgaccttcagttgctgtacgacaacgcggttcgcatgaagattcgcaataggttgggtaggaccaccctggatatgtctcacttcgccaagaacctcactgacatgcagagctctttcgcggacagtttgggtgcgcccaaggtgccgaaggtttattggtcggacattggtggtctagccaagctaaaagatgagatccagagcagcattggtctgccgcttaagcatgttcacctcatgggcaagaatctaagaagatcgggaatcctgctctacggtcccccaggaacaggcaaaaccctggtggccaaggctgtcgccactgagtgcaacctgagttttctttccgttcaaggtccagagctactaaacatgtatgtcggccagagcgagcagaatgttcgcgaggtcttctccagggctcgttctgcggctccttgtgtactcttcttggacgaactggattccctggctcccaatcgaggtgtggctggggactctggcggtgtaatggatagggtggtgtcgcagctattggcagaaatggatggaatgagcgatggcgacactagcaagcccatattcattctggccgccaccaatcgcccggatcttattgaccccgctcttttgcgtcctggtcgctttgacaagcttttctacgtgggaccttgttcaactgccgaagacaaggcagccgttttgcgtgcccaaacccagcgattcgctttggacgccggtgtggacatggaacagattgccgagcgtttgaagagcgaaatgagcggcgcagatctgtactccatctgctcgaatgcatggctctccgctgtgaggcgcaccatagacggacacttgagtggaacaatatcagagaaggaactggtgccggagaacgtaattgtgcaggaggaagatttcacgaagtctttcaacaagtttgtgccctcgatcagcgccaaggatctggagtatttcaacaacctaaaggcttcatatagtgtctagagtatgcgcagatggttaactagttctaagagttagttttttacagacatttttcgttgtttttcaataaacccgttgatagttcacaattcccagcgagcttccactcgtttgaaccacttaaggtgggtggagctctcgtatgaaataggaaccagcgtgtggaagtgcgactcgaattactgtggaagacagcaggaggtaggtgattccaattaacctttgcgaagtggcttcttatcatttcggacaatagcttccccccatgtcgagtaggaaaattacgtcttttgatttaaatgatccctgcgctgatctgtacttcataatctcgggctggtgaggcatcccttatctacagtgtgtgcttatcgcgattccccggtttatggatttcgccggacaaaagcgttgatgctggcacctaatcttagtgggttcagtgcgagtctgggaggtgcgtcaagaggtgttgtcaaacattgtatatttccattctcctgttatataacagccatggctttggtttgcgtagaggactttgaaaagaaggccgttgggcaactggagaagaatgccctggactactaccgtagcggagccggtgagcagttcaccttgggactgaatcgcgaggccttccgccggctacgcttgcgacctcgttgtttgagagatgtctcccgcctggacattagtaccaagatcttcggcgagcagatgcagtggcctctgggcattgctccgacggctatgcagaagatggcccatccggacggcgaggtaggcaatgccagggcggccggaaaagccggctccatctttatactcagcacactgtccaccacttcgctggaggatttggcagccggtgccccggataccatcaaatggttccaactgtacatctacaaggatcggtgagttgattatctttatgtatgtaagcaaatacttctttattaaacacataacttcctaaatacagtaccataacgga

SEQ ID NO: 14771 - DNA, 2820 bp, DROSOPHILA
taattgtgaaaaagtgtatttgtctggcgcctatcccccaactccttgaactttgacaccgcctcctcgaaattaacccttgtactcgtgctttctgttgtgtttagtccatatttattgtaaaaaatgaatgaaaatgatgatgcgaaaaaagtcgtcggcaagcggaattcggtgtcgttcgatcaacaagatccaggacagccgagatttagcttctctgggagagtacaggagctagtcgagggctacaattcggccatacagctgctggcgcccaagtggccctggttcctctaccccggatatctgacatacgccgtatactggcgttacgccaaatattacaagggcaagtttctgctgacccccattccgaaccgcctctacgatctgctgatcaagaacgagcagattaagtcggagcacctggtgttcgccagtcaggaggtgtacgaaaactatgcggaatcgccggacgtcaactttgtcaacttggttatccgcggcaggagggtaagaatcggtaagccgctagcttcagacgaaggaaatatgacccaaacggttatcaagcaaatgctccaggaggcgccgcatacgattgtggcccagatcttgccggctgcacagtgccaacccaattgtctgtacgttcaggagaacttctacggcaacatattggatcgctttcaaatccgctccaactgctgggtgcaggtagagcattttgccgatgagcagacaatacctggaatagcaaccaaagcacatgtgtacttagtcgcagatccccatgaacttcccgccgaactgacagaggtcatcctgagcaactatttcaatacacctcgactcatgcatcgtggacatacctaccgcatcgaggtgaacgcagagttggtgggcactgcgacttatgcccactattacctgatattcgctcacctacgccacgtccacctaaagtgtattcacctggagacaaagggcagcgagttcgagctgcaagcgattgttgccaaaaactttagcaaccttgttcaagtgcctgcatctcacagtttcctgcctcgtcaagtgcttgacagcatggccatcgttgagaactatccaagtggacttcgaaagccctataagctgttgcgctcctcagtagatgctttcctgccaaaaaagtccgcctgcctgtcgtcaaagcacatatttcctgtgttcctcctgcaaggcgagcgaggatcgggcaaatcaaagcttgtgagcgccgtagcccaagagttggggatgcatatttacggagcagattgcgcagagatcgtttcgcaagttccctcccacacggagatgaagctaaaagccgtatttgccaagagccaagtttgtgaaccgcttatgatttgcttccataacttcgagatttttggcatagacaacgagggtaacgaggatctgcgtctgctttccgccttccacgtgcaggtccaggaactcttcaacagggaccgcaagcatccgattgtagtggtggctttgaccagtgacagacaccttaaacccatgatccaaggacttttcttggagatcataaacattgacatgcccagcaaggaggagcgattcgagattcttcgctggatgcacgtgcgcgagactttcaacgatattatctacaatcagaaggctattgagcaattacccttgttctcgcgggaaaatcagtcgcaattcatgccacgcatttctcccagctggagggaaaccctcaatgtccttcaggatgtggctgcaaagtcacagggctttctgctcggcgaccttcagttgctgtacgacaacgcggttcgcatgaagattcgcaataggttgggtaggaccaccctggatatgtctcacttcgccaagaacctcactgacatgcagagctctttcgcggacagtttgggtgcgcccaaggtgccgaaggtttattggtcggacattggtggtctagccaagctaaaagatgagatccagagcagcattggtctgccgcttaagcatgttcacctcatgggcaagaatctaagaagatcgggaatcctgctctacggtcccccaggaacaggcaaaaccctggtggccaaggctgtcgccactgagtgcaacctgagttttctttccgttcaaggtccagagctactaaacatgtatgtcggccagagcgagcagaatgttcgcgaggtcttctccagggctcgttctgcggctccttgtgtactcttcttggacgaactggattccctggctcccaatcgaggtgtggctggggactctggcggtgtaatggatagggtggtgtcgcagctattggcagaaatggatggaatgagcgatggcgacactagcaagcccatattcattctggccgccaccaatcgcccggatcttattgaccccgctcttttgcgtcctggtcgctttgacaagcttttctacgtgggaccttgttcaactgccgaagacaaggcagccgttttgcgtgcccaaacccagcgattcgctttggacgccggtgtggacatggaacagattgccgagcgtttgaagagcgaaatgagcggcgcagatctgtactccatctgctcgaatgcatggctctccgctgtgaggcgcaccatagacggacacttgagtggaacaatatcagagaaggaactggtgccggagaacgtaattgtgcaggaggaagatttcacgaagtctttcaacaagtttgtgccctcgatcagcgccaaggatctggagtatttcaacaacctaaaggcttcatatagtgtctag

SEQ ID NO: 14772 - protein, 897 aa, DROSOPHILA
MNENDDAKKVVGKRNSVSFDQQDPGQPRFSFSGRVQELVEGYNSAIQLLAPKWPWFLYPGYLTYAVYWRYAKYYKGKFLLTPIPNRLYDLLIKNEQIKSEHLVFASQEVYENYAESPDVNFVNLVIRGRRVRIGKPLASDEGNMTQTVIKQMLQEAPHTIVAQILPAAQCQPNCLYVQENFYGNILDRFQIRSNCWVQVEHFADEQTIPGIATKAHVYLVADPHELPAELTEVILSNYFNTPRLMHRGHTYRIEVNAELVGTATYAHYYLIFAHLRHVHLKCIHLETKGSEFELQAIVAKNFSNLVQVPASHSFLPRQVLDSMAIVENYPSGLRKPYKLLRSSVDAFLPKKSACLSSKHIFPVFLLQGERGSGKSKLVSAVAQELGMHIYGADCAEIVSQVPSHTEMKLKAVFAKSQVCEPLMICFHNFEIFGIDNEGNEDLRLLSAFHVQVQELFNRDRKHPIVVVALTSDRHLKPMIQGLFLEIINIDMPSKEERFEILRWMHVRETFNDIIYNQKAIEQLPLFSRENQSQFMPRISPSWRETLNVLQDVAAKSQGFLLGDLQLLYDNAVRMKIRNRLGRTTLDMSHFAKNLTDMQSSFADSLGAPKVPKVYWSDIGGLAKLKDEIQSSIGLPLKHVHLMGKNLRRSGILLYGPPGTGKTLVAKAVATECNLSFLSVQGPELLNMYVGQSEQNVREVFSRARSAAPCVLFLDELDSLAPNRGVAGDSGGVMDRVVSQLLAEMDGMSDGDTSKPIFILAATNRPDLIDPALLRPGRFDKLFYVGPCSTAEDKAAVLRAQTQRFALDAGVDMEQIAERLKSEMSGADLYSICSNAWLSAVRRTIDGHLSGTISEKELVPENVIVQEEDFTKSFNKFVPSISAKDLEYFNNLKASYSV

SEQ ID NO: 14773 - DNA, 4964 bp, DROSOPHILA
attcaaaacgatcaatgagcgctttgatggctggcttgggccaggcatgaacgctctgacgtccggccaactcgttgaaagatcgcagcacctgtatgcgtactggtgtccttaagtcctgcatgaaatccagcagaacatccagctgaccgggcactcccaccagcgttcgtgatgacaattgagtgagcgtgtctatgatggccaccacaaagctctgggctggatatttgggcagcagatccatgcacagtctgctaaccagtgacgctgtggtagcctcgtgatgcatgtgtcgcaacacgggaatcaggagcagcttcattggcaccggcacctgaagcgattcgatcatgtccgaaatcttggcgcacatgctgatggcaaaggaacttgactgggcggcaaagcagctgctggcatagatggcagcctccacctcgacggtatcgtggctatccagagcacgtcgaatggcatgatgaacctgttgcttctcgggaatcacacgggaaacggcgcccaaggtgcgcaggaggagagcacgcgccaccggatcgttggagtgcatcaccacaaagatacagcgcacaaagctgtcaatgttgaggatcttgtccagatgattctcgctctgctggcaaacacggagcacccagaagcgcagcagattcgatccgctgacaaagtaatcggccagcttaatgaacgacgagttgatgagaatgggaaacggatacttctcgaagaggcgcggaaagcggacgaccgcctcgcactggattccctgcttggtgctccgcagtcccttgtccagttccatgagcaccgcattcgagtcgtgctcattttcgttaaggaagctctcgttgaaggtgctcacgcgggtgccggtcaggtgagacatggttacaggtttcctcactcacatttatcgcagataaatcgtgtttattgaggttttcattagccaaacgacacaaaaacaaaccggctgcaaatgcttcttcttgctaatttgtcgttcgtaggaaactccggtatcattgcagcgatagctggtcacttaacagtaaaaaaaacgtttgaatccaaagtctatattgtcaattctttataagcgtttgtcgatcgataataaaattatcctgatttctaaaataagaaaaaaatcaatttaagaaacaactattaacttagaaaattatgtagaaagtgatgtagcctattattctcactccttctttgtctctgtgtagataatttgcaaatctgctaaggtcacactgctcgctatttgttgaatttgttaatgttttgaaattatgtttgttttgactaaaggcacgtaaaaatggtctaaaacacagagattattagtttattcattttttaaatactctttatagatgacgaaaagtttgtgttgtttcctggcaaaaaggtgtacaccattggtcgcctggccacggatttaattgttgcgcaggacctcagtataagtcgcaatcatgcccagctgctcatccaaacggaagcggatggcgatgacaccctgcatatcgaggaccttggctccagatatggcactttcattttccccaagaattcccaaaagccgcgcaaggtgcctgccaaaacatcgactccattgcctgtgggcacacgcttgcgatttggcgcaaacatgagcatttggcaggtgacccaactgaagttggttacaactgtctccgcattaacgcgttccgaggtccaggagctcacgaagatgcttgaacccatgggcggcacggtcacttcgaactggaccgaagagtgctcccatctaaccatgaacgaagtttcggtgaccgtgaaactactgcacgctatgctcgagaataagccgattgtgacattcccctactggcgaaagatgctgcaggcagcgcagagcatccatgtcaaggagggctggcctcagccggaggattaccagcccaccaacatagatgtcacctggcgtcctgagcgtacccgtctcttcgccggcaagacattcgtcttcatgaaccgcaaacactttgatatgtacggatcagttgtgcagaaggctggagccacgtgcaaggacatcaattcgggtgtgcgcaaaacattcctaacaaagagtgatgtgatagtcatacagtatgtgccatcgtcccagtcgcaggccactgaatcaatcaatagtatacaagataggtgtaaatatattgctcacatcacagcgtttaagtattattatgtattataatttttagatattttggaacagaatggtcgacgtattatccaggagtacgagattggcatggccctaatacattgctctataacagaattctgcaacccaacgcacaagttcatctccgattcattgcccaccacggagtctgtaacttcctcgatggcctttaactcttcgatcattgtgcccaacacggaacgccactcggcgcaatccaatgccacgcccatttccgaactggtggtgcctgagtcaattgaatgtgaaatggaacaagatgcttctaagccccattcggaggaccaagcttctttgcgtaagcggagtcatgcctcaacagttgactcctcggacgaggagaagaaatcaacattgtctaagcgagctaaatcggatatcgctacgaaactgaccatgaaatcaaagaatgccatattgttggactcgtctttggaagaagatgtgacaccagctccggcgcctgctccagttcaacgagtaacaaggcagagcaaagccatcgctgaggagaaatccgtacatccacctgttccagctgcgagtaagcacataacacggaagaccaaacaggttttttgtgttgactcatcggatgaggagaacgaaaatgctcggaaaccaaaagaaacgccagctccaactatcccttcgatggccaagaagaaaacggaagcacccgttgccaccaggatttcaccacgactcaatgggaaatcattggccacaaatattaccaaccaaccggctgacaaacatgcagtgcctgcaaaacgtcctgttttatcggtggcctcgagtgacgaagaagatgaaggggacctatttcaattccgtaaatctccacagaagccagcagagactgtggttcagccaagaatcgcaggcaaaggcaatgcacctgccagaatcagtgtagtcgactttctagagaaatcacaggcacaagaaccagctccagtgccaccccaattggagtcccaatcccagacacaaccgcgcaagcgtttacgccttgagctgctaaacgaaagcgacagcgatgattgtgataatctttttaactttgcagacagcaaaaagaaacgaaagacgcaagaggctcagagaaatgatgactccacggatggcttgtttaacttcaactctgaaagaccgtctgatcatgatgacgaggattcccggttaaccgaaccatttgtacccgaaacggaaagcaagaagcaatccaagtacatagtggcaccgcgtagagatagacccaagaaagtggacatcagtggttggttatcgtgtagcaggctaaacgataatatcaaatccgaaatagatgcagactcagttaagatggaaacctctattaaggcggatcccgatgaggagcaatggctggccgccatgaaagacagcattgaggtgcgcatgtgcaacttaaacattgtcattcgctcccaggaggaagtggatgcttctcttgaggattctgtgaacaagcatggcggccgcaagaactttaagaagtttgtaaaggtgagtctcgaattaataacaaatattaaaacgacttatttatttgtgtacctctgttagaccaaaaatcctcatccccaaaagcgaattgttgcgcttaagagtcttcggctggctgatggtatggtaacctgtgtttaatgtcgtgcctaaacgtaattaaccgtcgcttgtgaagttactttattttgctaacaataaacttgcgaaatatgttcaacgccttttccggctccttggacaacttgcgattgaacatcgtctgtgcggccagccactcgtgcttggctatctttctggtaaaacaactttctggaggaggattcagtttcctggcctgcgactcgcgttcaatgaacttctgtgcatccgccaccgtggccagaacgttttcattgaatgtgggtttctttgtatcttgaacgggtgtttccttcctggcaattatggtgcccacatcagatttggccaacagtttggctttttctactttggtgacgacttttttcggtatcaggacaatgtctggtgtttcgtctttctgcgtttggttattagttctcgttggaggttctaatctggcaggaagctcttgattctccgccagaaacttgtgcttctccacctgcggaaagttagcaatctgggggcgcagtttgttgtaaagtatggcacttttgccggcctgcaaggagctcagtttgctaatcttggcaatggcagcgattagcagcgtggtgaagtccatgaagaagttgttgcgcaggagttgagtgaagtatgcggctgcactgaggcagcattccctgatccgctcgtgcagatgataaaaacccaggagacgcaccaaaataaactcaaagctgcttcgcgtgggcatggctccgcccaaatcttcatcgcacacatccggcagcacaccgcgaaagtttttcagatccctggccaaatccaagcgcagcaggcggcacagtgccgcattaagtttgcagacggaacgaaatcccggcatattgcggaaggagttcttccggcgagccattagtcgtccaatcatcgccgccgtctcctcgaaatccttggcatccggttcggacaactgttgcaggaacctgttgatgaccacgaacacattttttgc

SEQ ID NO: 14774 - DNA, 2436 bp, DROSOPHILA
atgcttcttcttgctaatttgtcgttcgtaggaaactccggtatcattgcagcgatagctgatgacgaaaagtttgtgttgtttcctggcaaaaaggtgtacaccattggtcgcctggccacggatttaattgttgcgcaggacctcagtataagtcgcaatcatgcccagctgctcatccaaacggaagcggatggcgatgacaccctgcatatcgaggaccttggctccagatatggcactttcattttccccaagaattcccaaaagccgcgcaaggtgcctgccaaaacatcgactccattgcctgtgggcacacgcttgcgatttggcgcaaacatgagcatttggcaggtgacccaactgaagttggttacaactgtctccgcattaacgcgttccgaggtccaggagctcacgaagatgcttgaacccatgggcggcacggtcacttcgaactggaccgaagagtgctcccatctaaccatgaacgaagtttcggtgaccgtgaaactactgcacgctatgctcgagaataagccgattgtgacattcccctactggcgaaagatgctgcaggcagcgcagagcatccatgtcaaggagggctggcctcagccggaggattaccagcccaccaacatagatgtcacctggcgtcctgagcgtacccgtctcttcgccggcaagacattcgtcttcatgaaccgcaaacactttgatatgtacggatcagttgtgcagaaggctggagccacgtgcaaggacatcaattcgggtgtgcgcaaaacattcctaacaaagagtgatgtgatagtcatacagtatgtgccatcgtcccagtcgcaggccactgaatcaatcaataatattttggaacagaatggtcgacgtattatccaggagtacgagattggcatggccctaatacattgctctataacagaattctgcaacccaacgcacaagttcatctccgattcattgcccaccacggagtctgtaacttcctcgatggcctttaactcttcgatcattgtgcccaacacggaacgccactcggcgcaatccaatgccacgcccatttccgaactggtggtgcctgagtcaattgaatgtgaaatggaacaagatgcttctaagccccattcggaggaccaagcttctttgcgtaagcggagtcatgcctcaacagttgactcctcggacgaggagaagaaatcaacattgtctaagcgagctaaatcggatatcgctacgaaactgaccatgaaatcaaagaatgccatattgttggactcgtctttggaagaagatgtgacaccagctccggcgcctgctccagttcaacgagtaacaaggcagagcaaagccatcgctgaggagaaatccgtacatccacctgttccagctgcgagtaagcacataacacggaagaccaaacaggttttttgtgttgactcatcggatgaggagaacgaaaatgctcggaaaccaaaagaaacgccagctccaactatcccttcgatggccaagaagaaaacggaagcacccgttgccaccaggatttcaccacgactcaatgggaaatcattggccacaaatattaccaaccaaccggctgacaaacatgcagtgcctgcaaaacgtcctgttttatcggtggcctcgagtgacgaagaagatgaaggggacctatttcaattccgtaaatctccacagaagccagcagagactgtggttcagccaagaatcgcaggcaaaggcaatgcacctgccagaatcagtgtagtcgactttctagagaaatcacaggcacaagaaccagctccagtgccaccccaattggagtcccaatcccagacacaaccgcgcaagcgtttacgccttgagctgctaaacgaaagcgacagcgatgattgtgataatctttttaactttgcagacagcaaaaagaaacgaaagacgcaagaggctcagagaaatgatgactccacggatggcttgtttaacttcaactctgaaagaccgtctgatcatgatgacgaggattcccggttaaccgaaccatttgtacccgaaacggaaagcaagaagcaatccaagtacatagtggcaccgcgtagagatagacccaagaaagtggacatcagtgatgcagactcagttaagatggaaacctctattaaggcggatcccgatgaggagcaatggctggccgccatgaaagacagcattgaggtgcgcatgtgcaacttaaacattgtcattcgctcccaggaggaagtggatgcttctcttgaggattctgtgaacaagcatggcggccgcaagaactttaagaagtttgtaaagaccaaaaatcctcatccccaaaagcgaattgttgcgcttaagagtcttcggctggctgatggtatggtaacctgtgtttaa

SEQ ID NO: 14775 - protein, 811 aa, DROSOPHILA
MLLLANLSFVGNSGIIAAIADDEKFVLFPGKKVYTIGRLATDLIVAQDLSISRNHAQLLIQTEADGDDTLHIEDLGSRYGTFIFPKNSQKPRKVPAKTSTPLPVGTRLRFGANMSIWQVTQLKLVTTVSALTRSEVQELTKMLEPMGGTVTSNWTEECSHLTMNEVSVTVKLLHAMLENKPIVTFPYWRKMLQAAQSIHVKEGWPQPEDYQPTNIDVTWRPERTRLFAGKTFVFMNRKHFDMYGSVVQKAGATCKDINSGVRKTFLTKSDVIVIQYVPSSQSQATESINNILEQNGRRIIQEYEIGMALIHCSITEFCNPTHKFISDSLPTTESVTSSMAFNSSIIVPNTERHSAQSNATPISELVVPESIECEMEQDASKPHSEDQASLRKRSHASTVDSSDEEKKSTLSKRAKSDIATKLTMKSKNAILLDSSLEEDVTPAPAPAPVQRVTRQSKAIAEEKSVHPPVPAASKHITRKTKQVFCVDSSDEENENARKPKETPAPTIPSMAKKKTEAPVATRISPRLNGKSLATNITNQPADKHAVPAKRPVLSVASSDEEDEGDLFQFRKSPQKPAETVVQPRIAGKGNAPARISVVDFLEKSQAQEPAPVPPQLESQSQTQPRKRLRLELLNESDSDDCDNLFNFADSKKKRKTQEAQRNDDSTDGLFNFNSERPSDHDDEDSRLTEPFVPETESKKQSKYIVAPRRDRPKKVDISDADSVKMETSIKADPDEEQWLAAMKDSIEVRMCNLNIVIRSQEEVDASLEDSVNKHGGRKNFKKFVKTKNPHPQKRIVALKSLRLADGMVTCV

SEQ ID NO: 14776 - DNA, 4864 bp, DROSOPHILA
aaatttcaaacatacacctacaatgcttggcaatgagacctccatcgaagcagagttgctggttgtggttgttagagatgttctctttttttggccgcgcttctttggtttcgtctgtgtgggcacctccacagtcggtgaaacaggtggtggcgccatttctgacctatttaacgatgaccgtgtgcgtctggccacaggaccaacgtcattttctttggcgtgcttctccacatccgattgctggccatttttcttttccatctccaatatcaacagggataccggtgatagggagcgctctgttctcatatcctcttctggctccacagccttatgttctgcctgttttggtggcgaagcatcatcctgacttttgggtggatttttccgcgtcgctgcagggttctttcgtttgccagttttagttgatttcttggggaggtcttcaatgaaatcgtagtccacctccttggagaaggaatcattgccaagattgtaaggattcttgggcaaagctgataaagacgacaaaagcgaaggtatgtggaaaaacttggatttctgcagtttaaagctaacctatttcgggaatccgcttgcgagcagcactgaatatatcgcagtcgtcgtcggacatcgtgggcactcagtaacagtcagtaataaaccaataacggcgccaaacaataaacacaaacacaaaaccaaatagacgccacagtggttgcaaggaaaatcgatatccgataactactgtgaccagggtagccacacgacacgagaccacgatcaaagtatttgctggtagtcaaatgtaatttacaattcgattttatttaatgtgtgtatcgatgatttggacatgttaattatttgtattatcacgattgaattcactaaatgtttgtacaagcctactgtgacgtagagcaactctggccgacagctgtttggccagtgttgacaagcgccacgccgtcaaaagcaaatctcatttagtttccaacgctgctggcctggcaaaagcaaaaatcgaatgtattataataaaggcccgtaatgctattgaaaataacttagagcctcgcgaccagaggcttttccgcgtgtgtgtgtgcacttgtgcgtgtgcgtgtgtttgcccttgggtgcgtgtgtgtttacctggattccctaaaaaaaaatcagtaaactgaaagtgagaaaaagaaaacgggaagagacgacaaagtctgcctgcgtgccatttttttcatttcattttgcgtggaatactttgagacgacgcgatggcctccaccagcaatctgctggacgtggtgcgccactaccagcgcagcattgagaagcacggcgaggacgaacaacgggtgagctattaccctcattggcaccgccatcgcatcccttttgatccactgcttactgccttcctatcattcaagtcccccattttcctaaccatttaatcacccctatgtacctgacctggctggctttcccttacttaaccttgtgaaattcgcaaacatatgtacctccgccaaggtcacttttctcgactttaagtcgctcttcttttccgctgacctttcactcacacggtcttttgctaatctttcttaatcacctctttcgctacctgctctcccgtcgagcagctgctgcactgcatcaccaagctgttcaacctgccgatcaaattcgagcacctgcaggaaacgggaattggcaagacggtgaatgccctgcgcaagatcagcggggaagttggcgtggcggccaagacgctggtaaccaagtggaaggcaatggtggcgaaggaggacccttcgatcgcatctacgcctacagccatacataacgaagaggactcgggcaagaccaagtccagcgacgaggatcccgaccaggagaacaagggcggcaactcatccagcggcgaggacttgaacaccagcaagcacaagtcaaagcatgccaagagcaccaagcatgagcgtagcagcagcagccgatctcactccaagagtaggtctgactcggataagaagcacaagagctctcgccacgataaatccaaggatagagataaagatcgggagggtcagaaggaagctaaggagcacaaagaaaagaagtcaaatggcgagcacaagtcaaaggattccagcaaatccagcagcagtcacaagagcagcaaatccgagagccacaagagcgaacacaccaaaagcaagcacgaaaaggtatgctttcctcttgatcaaaagtggttattgttcttatgcatttttttttcaggacaaaacttctcacagtgaattaaaggaagtcaaagacaagtcgagcaaacacaaatcatcgtcctccaagtcatcaaagcgctcccatagtcccccacgccacgaggaggagtcccaaaaagcaaagataccaaaagttaaatcgaaatctgaggaagattccgctgatggttttgactccagcatgggcgcaaattttgacgatgttcttggtctgctaaacatacccataagtagcaagaagagcagcagcaacagcaagagcaagtttgtcgccaagccaactgcagccccttcctcgtcagctctatcagcacctacgactgctgggtcatctaaagaggcactctcaactagcagtcgaccgacctccaaagtaattagtagaaattcatttttataagttgtggtaacatatgtttattctttagaaacccgaactgttggcatccacagctaagctggagcccttggatccaaacattgcactagaacttcccaccatatccaataactacaagcccatgccattaaatcagacagttatggacgtcgtctttaaccagggtggctcacacaaggcgcaagcatcacgatactttaatgagtcagaagctctagcgcagggcatctcttccaaaactatgcggtgagctaggatattataatgtgatgcacaaagtatatcaactttttatactttgtagcaccaagatctattcgggtgtgagaactggtcaaatcctgcaggtcccttccctttttgatctctgcacccgcgtgctgcaaaagaatattgatggtaagatcttactaatggtcatatcgaatgtaaataaccatcttaattgtttttcagcattggagtatacgggtggcgttccgtttgaggtcctacgtcccgttttggagcgagctaccccccagcagctgcttaactttgaggagtacaatccttatttaatggatgacagtgatgtcctatggcaacagcatgtccaacgtcactgtcgcagtcagcggcgtgaagagatggaaacgtggcgcgaaatgtttttggtagggacgcaaagaccctaaattaatgcaaactaaactaagctgacacaaaaatttcgttctagcgctgccaagaggaaaaggatcgcaaacttagcattctggccgagagcatcaaggcatcgcaaaagataagcgaggcgcctgtgcgcaagacgcaattggcctttgtggactcaatggtgaagccgccgcgtagtgtgcagcgcaagcaagagcaatatggcaccaagggcaagctaattgccactccagccgcccgagtggccgccttgtccagcgtgactccaaatgcagccaaggtgggcgatgcccgactacgtgtgctggccgctgccagggacacggcccaagtgggtaagtattgtaatgattgtggttaagaattaaatttacctataatttttattgaaaaggggctggaccagcgcgatcgaagaaggcacctctaatggcgaagaccttgcagtttatgcgcggacgtctcaaacgatagatgcgcttactcattatagctacaatcttatactcaacttcttcagcgacaacttaagcagcagcagtagcagcaacctcgatctattaggcattcacggtgggattaccttccaactttattggcaaagactttcaggtctgaataaagtgacattgtgatactagaccttctacttcccagtgcgctgtggaatcagactgctgctgtcggcatgcgtagcatatgcatgctatttattatttattcatgttctgccctcttttattacgctgtataagtcactatatttaagccaaccggataaagataaagcttttgttgcatcccgctgggtcgtagacaagctcatttacataagttatgatatttgattatagttgttcaattcattgattgcatgtaacttacgatcagaaggctgatcactccaacattatttaaaaattaagttcaatgttctttgttcaaaagggctgtgcgtatgtccaaaatcatagaggttccaagctgtatataaatgtatttacacaatcctaaacctatatgaaactacctaaattattgaagaacagtaaaatgtctcttaatgcatcgctaattaaattcaaccaaaaaattctatattacctttagatttatttagttttgcacatttttaggtattgggtaaaatgttaatatattaaaaaaaatcacttcaacaattgaaattcgattcgaatgctcgtcttatttttaatagttacacatttttcaacttttgtggaaattggccactcattacttatgccatgacttcgttttgaaagacattctttagctgtgaccagtagacgatgcaggtaaaggcattacactgtaaccaactcgttttattccacaagaaagctaccaggattgttaaatcaaaagaattatttatataaagaattgtttcacacgatagtaacaataatatacaacttattacaaaataaattattttcaaacataagtc

SEQ ID NO: 14777 - DNA, 2224 bp, DROSOPHILA
agtttccaacgctgctggcctggcaaaagcaaaaatcgaatgtattataataaaggcccgtaatgctattgaaaataacttagagcctcgcgaccagaggcttttccgcgtgtgtgtgtgcacttgtgcgtgtgcgtgtgtttgcccttgggtgcgtgtgtgtttacctggattccctaaaaaaaaatcagtaaactgaaagtgagaaaaagaaaacgggaagagacgacaaagtctgcctgcgtgccatttttttcatttcattttgcgtggaatactttgagacgacgcgatggcctccaccagcaatctgctggacgtggtgcgccactaccagcgcagcattgagaagcacggcgaggacgaacaacggctgctgcactgcatcaccaagctgttcaacctgccgatcaaattcgagcacctgcaggaaacgggaattggcaagacggtgaatgccctgcgcaagatcagcggggaagttggcgtggcggccaagacgctggtaaccaagtggaaggcaatggtggcgaaggaggacccttcgatcgcatctacgcctacagccatacataacgaagaggactcgggcaagaccaagtccagcgacgaggatcccgaccaggagaacaagggcggcaactcatccagcggcgaggacttgaacaccagcaagcacaagtcaaagcatgccaagagcaccaagcatgagcgtagcagcagcagccgatctcactccaagagtaggtctgactcggataagaagcacaagagctctcgccacgataaatccaaggatagagataaagatcgggagggtcagaaggaagctaaggagcacaaagaaaagaagtcaaatggcgagcacaagtcaaaggattccagcaaatccagcagcagtcacaagagcagcaaatccgagagccacaagagcgaacacaccaaaagcaagcacgaaaaggacaaaacttctcacagtgaattaaaggaagtcaaagacaagtcgagcaaacacaaatcatcgtcctccaagtcatcaaagcgctcccatagtcccccacgccacgaggaggagtcccaaaaagcaaagataccaaaagttaaatcgaaatctgaggaagattccgctgatggttttgactccagcatgggcgcaaattttgacgatgttcttggtctgctaaacatacccataagtagcaagaagagcagcagcaacagcaagagcaagtttgtcgccaagccaactgcagccccttcctcgtcagctctatcagcacctacgactgctgggtcatctaaagaggcactctcaactagcagtcgaccgacctccaaaaaacccgaactgttggcatccacagctaagctggagcccttggatccaaacattgcactagaacttcccaccatatccaataactacaagcccatgccattaaatcagacagttatggacgtcgtctttaaccagggtggctcacacaaggcgcaagcatcacgatactttaatgagtcagaagctctagcgcagggcatctcttccaaaactatgcgcaccaagatctattcgggtgtgagaactggtcaaatcctgcaggtcccttccctttttgatctctgcacccgcgtgctgcaaaagaatattgatgcattggagtatacgggtggcgttccgtttgaggtcctacgtcccgttttggagcgagctaccccccagcagctgcttaactttgaggagtacaatccttatttaatggatgacagtgatgtcctatggcaacagcatgtccaacgtcactgtcgcagtcagcggcgtgaagagatggaaacgtggcgcgaaatgtttttgcgctgccaagaggaaaaggatcgcaaacttagcattctggccgagagcatcaaggcatcgcaaaagataagcgaggcgcctgtgcgcaagacgcaattggcctttgtggactcaatggtgaagccgccgcgtagtgtgcagcgcaagcaagagcaatatggcaccaagggcaagctaattgccactccagccgcccgagtggccgccttgtccagcgtgactccaaatgcagccaaggtgggcgatgcccgactacgtgtgctggccgctgccagggacacggcccaagtgggggctggaccagcgcgatcgaagaaggcacctctaatggcgaagaccttgcagtttatgcgcggacgtctcaaacgatag

SEQ ID NO: 14778 - protein, 643 aa, DROSOPHILA
MASTSNLLDVVRHYQRSIEKHGEDEQRLLHCITKLFNLPIKFEHLQETGIGKTVNALRKISGEVGVAAKTLVTKWKAMVAKEDPSIASTPTAIHNEEDSGKTKSSDEDPDQENKGGNSSSGEDLNTSKHKSKHAKSTKHERSSSSRSHSKSRSDSDKKHKSSRHDKSKDRDKDREGQKEAKEHKEKKSNGEHKSKDSSKSSSSHKSSKSESHKSEHTKSKHEKDKTSHSELKEVKDKSSKHKSSSSKSSKRSHSPPRHEEESQKAKIPKVKSKSEEDSADGFDSSMGANFDDVLGLLNIPISSKKSSSNSKSKFVAKPTAAPSSSALSAPTTAGSSKEALSTSSRPTSKKPELLASTAKLEPLDPNIALELPTISNNYKPMPLNQTVMDVVFNQGGSHKAQASRYFNESEALAQGISSKTMRTKIYSGVRTGQILQVPSLFDLCTRVLQKNIDALEYTGGVPFEVLRPVLERATPQQLLNFEEYNPYLMDDSDVLWQQHVQRHCRSQRREEMETWREMFLRCQEEKDRKLSILAESIKASQKISEAPVRKTQLAFVDSMVKPPRSVQRKQEQYGTKGKLIATPAARVAALSSVTPNAAKVGDARLRVLAAARDTAQVGAGPARSKKAPLMAKTLQFMRGRLKR

SEQ ID NO: 14779 - DNA, 14449 bp, DROSOPHILA
tgcgggtaagaaagggcagagaataacaatcagaattttcaaaatttttggttccgatccggcagcgctaccggcccctgattcgattttcttttgtgttgtgtatatgcagaaaagccatggcatgtcattgtatgcgatgaatgcattgatggaattgtgagtatgtctgcgaatgtgtgctgcactagaagcgtcaatacgtgcgtgttttcaatcaagctcaagttggctgctcggcattcaagctcctccaaaactaaattagtgacccgaaaaatggcagctatgctgatgtatagcaatagtttccaagtagatatgcctagtctgtggcacggatatctcaatatgtggtggtgaactcaattaaggagcaaaggtatgatgtactcgtgtaccacagcattagtatctagcctattattcggtagtatttgagcttagtcttaatactattcggaatataaaattaagtttgattaaaaagcattcagtgatttcaaaaccttggcttaatctcagctggtctgcaaaaatattttgcactctatcctctaatccagttaaatggttttctctagagcatgcacgaaacaacataaacataaacatttttattacaagctgaatagatgggacttattgaaaagcgttaagcaaataacttacagcggggaaaacatttaaattgaattatgccagccagaacacgaaaaaccaaagtaaataacagacattgaataatgtggtttgcacatgttaaataaataaatatatattctgctggcccttttcgatgcaggttcggcttagtggtgcgaagtggttttcttgctgggttgtgcagcttctcttggtggttagagcatacaaaaatattgccacttaccacatttggctacaacaaacactgccaattactttttgcagcattaagattcgtttccgtctggtataaaaacattaattttcgtacaaaaaattatgtatttgctttatcggtttgtatattgattttatttaattttattcaggtattcatttgggttttatttcacacgatattcgttttgtaaatttgaattgtgagatattctttgtgagttgttcattgttggttttgggttcgggttcggatttctttggttttggttcggttcgttttggattggtttagtacatacgaaagacttcatagggcgcaggcagaacactgatgttgttgtagttgttgttggtttttgttagtcgaacgggttatgtaaataaacaaatgcagaaatgcaagagtttgtaaatcaaaaacaaaacacacacataggtaatataaacaaaaatgaacgttgagagacattcaagagcggatcggtatgtgtgtaatagatgatgggtttggtgtagcggcaactgtaacgggaactgcaacggtaacggttttctgggcgctttcgcaacactaagatagatacacacacacacacaacaaagttgagtagtagtaggcgttaggagagaaagagagtagaacattgcatacggaaaaaatactttagttgaaaaaatcctccactacatattttgttagtatttatgaaagtaaaacatgcgattgagtattttaatatattatgtttttttttttaaaggcagcagagtaaatttacacagggtcagagatgcttaaatatacatgaggcagcaaatgagcactttttccctgtatttattgttttgggactttttctttggctagttccttgtttcctcgtttttatcactcaattatattcctgtcttgtatgcataattttaaattctgcctacggcttttgggcagacgggtcgggctgcgcagagtccaggacattatcataattacctttagacacgcacaggcacacgcacatcgtcaagcgcgtggcaacattttccgctttatctcggctcacaacgttagtttttctcgctttttcgctatttctttcttctttttgcttaagtctcctcagatgtgtgtgtgcatttttctttattagtcccaaaagcgagtgcacggcaaatggtttagaggctctgtgcggggttacacataactggcgcccaacgtggcgcctacctatgcggtctattgaaaatttttctatcctgtaagttttacttttaaaaaaaaacttttatttgtcattaagttatttccttactctctgaaactcagctgcatttaatagagcctttgtgtatggcttctgtttagttatggagttgtgaacaagtggaaactgttgcaccggatccttaagttttctactattaattgttacaacaaacaaacctaggagaaattattaatacggactttttataaaaataagttaaaagaaactagacaaactaaaggcgctagtggaataattcttcgttgtcaaccaactattagttaaaaagatttgttatttttcgtacgactatacattcttcgactcgaaaccctaatcctgtgcggaattggtaaattcttgatgagcatacaagacttgcttttccttacacgccgaaaaacacgtggatgaatcgagtatgagtcagtgtgtgtgtggtgagggaaaaatgtgagatatgccagtgaccgacagagtaaaaattgcacgtttgcttctaggtgaaagaagagctacgccgggcgaaacactcaccctgttcgtcgatcgtgcggcgtcgaagggggcgtacagggcgagttggcctcactgagggaatggcccagggaggcacattggcgcttctttaccgcttgcagcaggttcaaggtggacctgctgaggctcggcttaattgtctgtaaatacatcacgcgttagttgtattcgtcaaaaaagagtttattcgctttataaaggtacttacactgaaacagggaccgcgaagctcgcgcaaatcgatgctgcgaaacagatcgcaaaggactaagtcctcaacggaggggcagacaccgctaggcggctcaaagattagacctaatatctccagaatctgcaaagaagattacatattctgagtaaacttcgcctcgacgcttcttttgaaggtcttgttaatttgtaacagtaggatgttttcaaataaactatactttacttgttttcttgtctgaaaaataaaacgaaaataaaataataacataaaaatgataatggtatttataaaacagaagctctagcattgttgtgatacattaaagaactttactgacctggccaatttgtggatagtgctgcagctccatctcgagcacccgcatggacggcttgggggttgtcagctcctggcccgtgcacatctcgtagagcaggtggccaaagcagacgatgtccacgttctcgatctcggtgaccgagcgggaccacatgacggcgttaatgcgcgaactgaggcccaggaggccgttctccaggcccgataacctgatgggtgaaaaacggaataaatgttacggaaaatgcataattaaatggcggaccccttgtgctttccttcccttttgtttcggtcttaattatgcaacatattcgatggctaccctgccgtatattgatggccaacacgtggaaacgtcggccgcaaagtgtctacttttatggatttatgtgcgagcgagagggagcaggtatcatctgctatctctttcctcactggccatgtgccttaatgacaaagagcgtatgtcagacctgatatgacaatattatgacactctacacaacacagcgctgtatattgcggattggttggggcttttggttcgagggtcctgccggcatttcctagtattcattaggccaaatgtggctgactagttggaaaggtattccgaattggctgacaatagaggttctgaagatgctagttgtcgtgtgctatagtttattggcttttgttgccagttgcctttgtttattttatgatcattttaattagttttgaaaatcagataagtataaatatacgaaaaaaaatcatttgggcttaaaaaagttcaatacaaattgttgagtcaacaggttactccagaagtatttgttgtcaaatttactatcaaatataagcatgtttttctttagctgttataaaacaataaaagcgttgtgcagacattaaatgctttcttttattgtcattgcaaatatcctgaaattcttcactcaatttcacttgagcaagcattttcttttctacttcgtcaatcagcttttcagcttactaaattccattttacccgttttcttcacgttggtctttcaactttcctgtggccctatcaatagctgtacgtatgtataagcaatttatatgaaaatcagcttttcaatgcgcacagcgataccctggcgacgaaggcagcaaaattgggtcatgcacttggcgcaaacttgaacgcagaaaatccgcactttaatcgactttcacctataggaattctagcttgcagatcccaccctcttttagtcccgtccctgggctgcaatataaccatctttttcgccgaccatttatttttaaaatggcaaaaagcttaagctttatttttgttacacccattcgatgtttgcaagtgggtggtttagtgggtggcgcttacgcgttgtcgcacagcagctacatggataggagggggccagtcaggggctcacgaaacagggacatgcatttaaagtgccctgaaatgggcaacgattctggggaattgcttttaatttgccatttaggctgaaatcgatgtcggttctatttgggtgaattttgaatgactgaaattttgcagtggagataggggggcaggccaccgattcgatataaaatattgcagccattattaaattagttaacagttgagtgggtcccaatcgacaacggactcacctggctgccccgttctgcaggatgacattgccgctgtgcaggtgaccgtgaagcggaaaaccgcgctccttcaggaagagcagtgcctccagaatctgtcgtcccaggcgctgcacctggctcaccggtaagccatttggcttacgcgtgtacttcctggcccacggctcattccactgcgcctaaaaggagaaatgaatttgaaatccatttggtagaggaaaagaggaaaaaactggagtgattacaatccattcaaatactcaccttatagatgagatctttaagactgccccgcgagttaaagggcgtcaccaggcaggcgtagttatacgagctgttgcgcaaaaagcccaagtccagaacgggatatatgtacggatgatgcagcgagcccaggagctccatgagtatttccctggcgcattcgttgggcgggagatcctcgaaggccacacaatcggggggcagaggtagcagagtctgtagacgatccgtgcgtacctaaaatacggaaaatcatcactctgtggatacaataaatcgaaattagggaagcccttaccgaggcatctgtgacaagaaaccagttcttgccatgcctcgaaccgatctcatccaggtgggcaatcacttcgtagcgcccattggcaccttgaatccattcctgagtggcattcagtgccttttccctctgagctcgctcccggggacttcgctccacgatcccattgccactgtccaaggcggagtactgatacttgatgttgggcctgaaaaatgtcaacggaacgttagctgtcagcctgtttgaattccagagatacaaaatttcttaagagcatacttagtagaagaatttgctaactaaggaaacttgtttgtatagtacaactaaaaataaatgatttagacatggatttttcaaaaatgtcttaacattcatcgcaaaacactcagtttgggcaggtatttacacgataaacaggagttagcacttaacatacatttcccacaagctcccgcatttaaattcgtctttccactttaattttatggcttcacattgacgaattcattcagagattttttatttattcatcacaaggtatgtatgagtgactttgatcacaatcagcactttggattttaatttactgggattaaaaggctttttaattcattaacattgatgagatcgaagaaaatcgtgactttttacactttacaccatcatatagtcttgttaataccatcaaatgttttatggtctctttgtctctataaaatattaagaacctcactgacttttcattcaacagaccacacatccttatccgggatctatctcttacaaaaaacaggaaaaaatgtcatgtataggtcacggataatcgttgctgaaatgttggccaaaaaagagaggcacaaaataatttggacaggacaacattttttctggcaagttgtgccgcaggacgaaggaatttacaactcaacgtggacggaaaacaaaaggaagggccagaggaagaggaagtaactgcctgcacaatggcgcagcggaaacggaagcatgagtttatcattacatttcagttgctttttttttgggaactatttattttttgtttatttcttgcaagtgaaaggctgtacaaagagaaaagtgcagtaaagcaactgaacatgaaaacggtgtcaaacgaaatgaaaaatagaagaaaagctaaacaaactgcactcacttggaggcttaaacgagaaagagatgttaagaagacagaataacaaaggcagaaaatgtaaaaaaaagttggtagtagaggttgagagccgttctcataaacaaacacttacggaccactcaatcaaaacagagcgaaggttaagcacatcctcgggttaagtttagcatgtgtttgaaaatttaataaggcgcaaaacgaagaacagtagaaagtggagagtacagggcagtagagggacaaaaacaaaatgaaagtgtgttcgtgtgtggcataaaatgttggccaagaggctcctttctcttcctctcatcccatttcactttcattgcgtcacaagaacttgcagaagcggaataaaaacacaaacacacaagaaaaaaccaccttgtacctttcttagcacacacttttgaccaacaattagttttaaatacactatctcagaatggataccaacaaatgaggacattttacttcgtcattttcacttaaatacatttttttcgtctgtgtacaaatgtgtgctagctagaccaaaacaaccaaaagctggcaaaactctttgcccattgcctgtctctttaggcgcacggcttgcgcttttggccaacggtgcgtatgtgaaatatttctcatttccccgctgttcaaaagaccttgactccgattgcagctgtaacgggttttagcatccaactgtgtatgtttgttgaagagtgtttctcctgcttgtttgttgactttagctaatttttgttgcaaaacggagaggtgactttccctcgtttttactcttgatgatattgcagcttaaatatttgccaaacactcgacacacttgttgtttgtcaagtgaggaaagtgtgtgggaatcagaagggtaaatcgtacgaaaaaaacttgggaaaatgcttaaggcttgaactcttcgataaagagggaaataaattgaatttatcttcgtgactatttgcacagtaataaatgagttcaatcaatcttcaaagcgtcgtaacttataaaacatttaagaacttaaaaaaacataataaggttttcaaaataaaaacaaagatgttctaaatcaatcgttttcatcaacaaaacattgagaaaaattcaaattaaagcctttttaaaagccgaataaaattgctaaacaaccttttccgatttatcgaagcaaattagctagggtcaaaccgttctgggaaatgcttagatatataacgtcatggatagatactttacagtcagacgaactcgattggcggcgaactgaagttgaaatattcggatgccgcgcgtaattaacgtgctcgtgtgtgaaattttttattgcatactttgcggcactaccacatgcatattcacctgctcgttaggggcacacaaacacactcacaccaactcacacacgacagacacttacacacacgaacagatgctcacgctcgcttgcacattcatcatacggctcagcacgtagaattgtgaggagtgttgaagagaaggggggaggacgggaggcaggagtcctcacagatactcacacacacagtcgaatcaatttttgcgccctttttcgagcgaacttctgccaagttgataatttaatttgcaatttttgtatggggtgcctgggcatctaatttgaagaattttcaccttggcaaactttcacctaccgctggaacaaaagaataataggacataggggtggttgggaaatgcattctatcatcgcacttaatgctttgactttggcaatgcctttggcttttcattttgaatgaagaaactttttaactaaagttgggcaaaatattcagcaagcgagaaaaagagtctgtttaatgttaagggaaatgggtatatacacatattttttggatttaaaaaaaagcattgcccacaaaagctttcaagttaattgcttttttgtggctgcctttcaaacctcttgaaaacattagacacattagttggtttttcctccgaattacttgcgttatctctatgtatgtatatacttgtgcatgtgtgtacatcaaaataagttcgaataaaatgaattgtttggtgattttttctacgtgtggcaaacattaaaagcatttcaggttcatttctattcgtttttggcatgcaaagtgctgtagagctaaaacgaaaactcaagtaaaagaaaacaaactcggcaagcaaaagaaaaacttggcatcgaaaactgtacactagtgaggctgattctgattttcaagtgtgagtgcaagctaaatacaaaaatatattaatttagtacagtttagagtagagtagtaaatgcaaccttgttgtcagtactgaatctatggtatctctacttccggtttccgctggcatcgacttgctaaagaagagcctagctagattgtctaacctcgcgctaaccagcggcgatttctccgagtgctcggatagatctgagttatcttgctccgagctcgccgaccgattgctgcaaatagaagggtacacagtggtggttgcggtgggtgttttttggttggtttggtgggtatttggcaaaaaaaaaagaaaatatacaaaagaaaatactgcgataagtgtgtgttctcttcataacttgattcgtcaaagaagcttcacttaacgaaaccaaaacgtgtgataaaccaaatcaaaaatcgaggtacctgtgcactgtgctcgattttgcttgagtgtgtgagtggggctcacacacacacacccgcacacacattgcaaaagtcctatatacacacgcatatatatctcgccgatcggttgggtactcacctactatagatctgtcggcgattggcagctgtcagggccgagacatcgaactcgatcgccgagttggagcgtttcaggccgttcgccttgtgcagcttcttcataatgttcctcactttcctatcgcgttcgaaatcggttatcgggtgcatttagtattgagagacaaacattgacattgacatttcggaatttcaaacttttttctaattaggcggttgaaaaggatttactttgctttcagaggtatcattaagtttccgaagattaacgttttttttttttctttactactaaggaattggaagtgaaaaatattgaattttagaaatgctgacaaatctttgaaatgcaattttttgtattaactaaatgcctcaatctgcaaaatgttcgtttccaaagcttttcaaacagtttggagttcctcaattcttggggcacggagcactcacttttcgggcactggtggtcggacgaagggatcgtgtcctgtgacggcactgttccgattgtcgatccgctgctgctgagcggccttgttgaacttgaacatggtgaaggacttcttggcgctggccacctcacacacacgaacgatgatcttgcgactgctcttgaagaccgtgttcaaggtcttgtagacgagaatggagacggacttgggggtctggggattgtggtgcgaattgtggctgggctgctgtgttagaggtgtgggcagagattgctgctgcttcagttgatgcactggagcatgccgcgcggtcgacgccgatgattgtgatcgggtgataactttgctttccctctggagattattccgatggcactgatcccgctgatcccggtggcagctgatgatgagctccggctccggatgcgacgctgccgggacgttgacctcgctgcaagtgtcctgtggtgtttgcaagtgtttttgtggggaagtttcgaacaaaagttgagtggccacgaagaaatggaaagaaatatgcggtagaacgatttaaaaattgattaatcgcgaatcgagaacgtagcacagcaacgaaatgaaaacgaaaacggacagaagcgcttcgtggaaagtaaaatggggaaatcataagctattaaagccatttctattaccccgacatttgcacttgctcaacaatcgttcaaagagtgtaaaataacttgggtttaattattgctgtaaaagacaatcacaaaagcattttgataacgaactttgccaagtccttttgtttctttttcaatgtgtgtttgtgaaacggaaggataaggataattaaatgaaggataaaacatgctttagggcatatgccaatttaccaattcaactaaactaatttacagccaatttgtattaaagcgatatctaattttaggaaatttgcataaaagtattgcgtgaaactcaaaataaataatccaacgaatttcagcgtgtctttagtgttgatatcttagcagccaattgaagttgtaaaaatcaaaattagtttgcttgtgtaaaattgtgttttttttttcagctttgctctggtgatttaatttgctctcaatttggtggctaattttcatcgctcgataatttgacttgctgatgcaacgaaagcaaatttacctaccgactgcgatctcttaggcaaacttcgctacagtccaaaaatgcaagacacctaaattcagggttcgatgtttacagaattttagttttcaattcgattcatacgttttgcaggggtgaatggtgggaaatcagggggaaaacagcatttaatgaattccgatgagagcgaaacccacttgacaccgatcgatttcaatttgcaggtttatttcaattatttgattttccccgtttaatttcacaatcgcttaatttttcggttgcatttgacggtggtttgtctaagcttaattgaatttcgccgtactctgacagtaaagcaatctaaaaaactatctggagcgaaagtaatagttggaaatagaatgtatatatctacatttatttattaaaaattattttaatatcaaccaaattttagctattctgatacccctatatattccgtttgagagaaggtccataaactaatggatattaatatttgttattaaaattccaaatataaaacttaaattttaagaaaattcaacaattgtttgacaaagtttgaattttcaagtattgtaactgcaagcaatactgtttgtgaagagcacgctttgttttagcagaacagcaattaaaatatctgatccgatttctatttcagataccgccgcacatcactcactactgtggcttttgctgttttgttaattaaaaagtacacgccccttcggcatgcgaaacttttgaagttattttaccgaaagcgaatgcgttgcagttcaacgaatgtccttcacacgatgaaaagtaaaccacagcagcaataaaaacaacctcttctacgccggcaacagcggcgaaacaatagaaaaggactttaaaagacgcttaaataaatcatacgccccgtgcgtcgcgcctcttttttcccctcaacagccgctttacatgtttgtgtgtgcggcatgacattgagctgagtgtagaactgaaccagccttagtttttgcacgtgttaccaacactttaccacccccctcgccggcctatttgtctaattgtctaattctaattttaaattgtgcttaaagttgctgttgtggactggtttaatcgtatttgtttttgcccagtgcgggcaaaacccttccaccgcccatttagctatatacgaaccgcacacaaatgctcaaagttcgtttctgccttctactttcaagacactttattgattttccttttgggagcggtgtaagtggttcgttttattttcttttagctttcaggtgtgcactagacaatccccataccgccccatttccacctgtctgggtgtcaaattcgtattcatattcacaatcacgatatgtgagttctgttctggcttatccttcactttgattattgcattatcctgtccgtcactggcttgttcattgcaaattaaattgtcaatttcggtaaatggctgtaggaaacgcaatggagcgcggaaatagctctacacaaatggaaacagatgtcattaatcaatatggggtttagttctgcgtttcagacactaattctcagcactttaattgaatcgtctttggtaagagctcaatatcaatatattactcacgcctcgagttaaaaatagctgataaatgtgcccttaggcaataagtaaatatttttttttttgggtattatgtgggcttcaaaacaaaatgattaagaatgaatgaataataaagtgaatgttacattctgaaaccaaaatttttcttgaatattttttgcgtttactttaagaaaacttaattcggtataacaaacgtcacttttggtacataatattgtcatattttttatgtttagcttgattaatctacgtaagtatcaccatcactggctgtacaaaatgactccattattttcactcatttaatctgccactgaaaatatcagggaccaaaatagaattgcacattaaaaatgatgatgatgaagatgatgaggggagtggcacctgctttcgacgatgctgggctttttccaccctagaccagcactttccacgacctcttcgccttcattatggttgcactcattgttgattgggtcagacaaacttgaataaatttttaaatagtttcggaaaagtcacaaagttgggaaagagttgacggccgcgcgccgtttaatggattagaatttttgggagcaccgaaattaactttgcaaagttccacctagttttacaaagtagttcactcgctgacgcgccgaaatttagacgaacttggttgaatatttaagccatagaaacgtggccagcacggtgctcgggtcgtccgttaatgaaggtgcgattcgagtatcgtttcgcctggggcgaaaactatgaattttcttcattccagtcgaactgaggtgtgttctttgtatatacgttggtgaatggtataggtactaacgccgattgtgggtgagtggcttagagtgtttgcgtgtccatatcgcttcacgtttgtggttgtatttgcggttgacttgtcggtccgacgactagccctctcactcgctcccctgccaatcgaccgactgtctgtctgtctcgctttcgactgtgtgtttttcccttctaactggattataaaaattgatttttaatttttatgacaattttccaactgactcatggcgagcaccgtcgcttggcattcgcaaagaatgcgcctcgtctgttcattccattcccatcagctctcccttggccaatggagcaaccgaattacccaccatcgaatcccatttgaacttggcatgccagtttgtttttcttgacaatgggctaacaatgtatggataatttaccgtggggccagcgataagaacggcattactggcacacgaacggcaaggtcaacgaaagtacattttttggtttgggaactcttactatttataaagtttagggaatgttttagtttagttcatgaataagcatattaccgacaagaatacattttgcttacaaaatacgcggtatatcctagtgcgcaaaataatattttaaataatgctgatttgcatttgaatagccatttttagttttcaagcttcaggttatatcttcctgtggtttttataataatatttcctcagcacataaacttttaaatatactggcttcaccgttgcctcccactgtgccatgtctgccattaaaagtgtgggaggtgtgtgcttgcggcaaatagtcgtgatgttgcccacttcgtgacacattaatcatgacccgctcaacgactgtttaccttcgctctgaccagca

SEQ ID NO: 14780 - DNA, 2395 bp, DROSOPHILA
ctggccacgtttctatggcttaaatattcaaccaagttcgtctaaatttcggcgcgtcagcgagtgaactactttgtaaaactaggtggaactttgcaaagttaatttcggtgctcccaaaaattctaatccattaaacggcgcgcggccgtcaactctttcccaactttgtgacttttccgaaactatttaaaaatttattcaagtttgtctgacccaatcaacaatgagtgcaaccataatgaaggcgaagaggtcgtggaaagtgctggtctagggtggaaaaagcccagcatcgtcgaaagcaggacacttgcagcgaggtcaacgtcccggcagcgtcgcatccggagccggagctcatcatcagctgccaccgggatcagcgggatcagtgccatcggaataatctccagagggaaagcaaagttatcacccgatcacaatcatcggcgtcgaccgcgcggcatgctccagtgcatcaactgaagcagcagcaatctctgcccacacctctaacacagcagcccagccacaattcgcaccacaatccccagacccccaagtccgtctccattctcgtctacaagaccttgaacacggtcttcaagagcagtcgcaagatcatcgttcgtgtgtgtgaggtggccagcgccaagaagtccttcaccatgttcaagttcaacaaggccgctcagcagcagcggatcgacaatcggaacagtgccgtcacaggacacgatcccttcgtccgaccaccagtgcccgaaaagaaagtgaggaacattatgaagaagctgcacaaggcgaacggcctgaaacgctccaactcggcgatcgagttcgatgtctcggccctgacagctgccaatcgccgacagatctatagtagcaatcggtcggcgagctcggagcaagataactcagatctatccgagcactcggagaaatcgccgctggttagcgcgaggttagacaatctagctaggctcttctttagcaagtcgatgccagcggaaaccggaagtagagataccatagattcagtactgacaacaaggcccaacatcaagtatcagtactccgccttggacagtggcaatgggatcgtggagcgaagtccccgggagcgagctcagagggaaaaggcactgaatgccactcaggaatggattcaaggtgccaatgggcgctacgaagtgattgcccacctggatgagatcggttcgaggcatggcaagaactggtttcttgtcacagatgcctcggtacgcacggatcgtctacagactctgctacctctgccccccgattgtgtggccttcgaggatctcccgcccaacgaatgcgccagggaaatactcatggagctcctgggctcgctgcatcatccgtacatatatcccgttctggacttgggctttttgcgcaacagctcgtataactacgcctgcctggtgacgccctttaactcgcggggcagtcttaaagatctcatctataaggcgcagtggaatgagccgtgggccaggaagtacacgcgtaagccaaatggcttaccggtgagccaggtgcagcgcctgggacgacagattctggaggcactgctcttcctgaaggagcgcggttttccgcttcacggtcacctgcacagcggcaatgtcatcctgcagaacggggcagccaggttatcgggcctggagaacggcctcctgggcctcagttcgcgcattaacgccgtcatgtggtcccgctcggtcaccgagatcgagaacgtggacatcgtctgctttggccacctgctctacgagatgtgcacgggccaggagctgacaacccccaagccgtccatgcgggtgctcgagatggagctgcagcactatccacaaattggccagacaagaaaacaaattctggagatattaggtctaatctttgagccgcctagcggtgtctgcccctccgttgaggacttagtcctttgcgatctgtttcgcagcatcgatttgcgcgagcttcgcggtccctgtttcagtacaattaagccgagcctcagcaggtccaccttgaacctgctgcaagcggtaaagaagcgccaatgtgcctccctgggccattccctcagtgaggccaactcgccctgtacgcccccttcgacgccgcacgatcgacgaacaggtgttctgcctgcgccctatgaagtctttcgtatgtactaaaccaatccaaaacgaaccgaaccaaaaccaaagaaatccgaacccgaacccaaaaccaacaatgaacaactcacaaagaatatctcacaattcaaatttacaaaacgaatatcgtgtgaaataaaacccaaatgaatacctgaataaaattaaataaaatcaatatacaaaccgat

SEQ ID NO: 14781 - protein, 515 aa, DROSOPHILA
MFKFNKAAQQQRIDNRNSAVTGHDPFVRPPVPEKKVRNIMKKLHKANGLKRSNSAIEFDVSALTAANRRQIYSSNRSASSEQDNSDLSEHSEKSPLVSARLDNLARLFFSKSMPAETGSRDTIDSVLTTRPNIKYQYSALDSGNGIVERSPRERAQREKALNATQEWIQGANGRYEVIAHLDEIGSRHGKNWFLVTDASVRTDRLQTLLPLPPDCVAFEDLPPNECAREILMELLGSLHHPYIYPVLDLGFLRNSSYNYACLVTPFNSRGSLKDLIYKAQWNEPWARKYTRKPNGLPVSQVQRLGRQILEALLFLKERGFPLHGHLHSGNVILQNGAARLSGLENGLLGLSSRINAVMWSRSVTEIENVDIVCFGHLLYEMCTGQELTTPKPSMRVLEMELQHYPQIGQTRKQILEILGLIFEPPSGVCPSVEDLVLCDLFRSIDLRELRGPCFSTIKPSLSRSTLNLLQAVKKRQCASLGHSLSEANSPCTPPSTPHDRRTGVLPAPYEVFRMY

SEQ ID NO: 14782 - DNA, 31669 bp, DROSOPHILA
tatcttcttgtttatttattattttctgtggctctcagcagtgttgataatttagctgttgtttagattttagttagcgctttttggagttaagttgagtgtgttagtttagctacaaatgcatatgcgtgtgtgtactaaaatatctcgtatccgctgtttgcatcacttccgtttcctgcttcttctgccctcctctttccgctccatttatcagctttattgccttggcattgtccttgcttggttaccttgtgtttgtgtgtgtgtgtatggttatggagtgtctgtgtttgaagagtgtgtttgtgtgtgtgtgagagtgtttttgtcacgaagaactaacgctataattaaaaattggctttctgctttctctaccgttttctcgttttttggccgcttagtttcattattttctcccttttacctttgcgttgcgcagcgtttcgtttcctttttgttttgttttgtttaaacttttatgagaacttttgctacgttgttattataatgcatgtggaattagctttaggttgatttacttttagatttattaactgcttattgcgttttataaacactaacttcatttgtcttatttcaactacttacttaagccgccagcttctttcttcacctccttctacatcactttctacttgttttgcctttgcttttgccctcctccattttgccataacttaacatacatttcgttaactctagtaaaaaaaaaatgttcgcatcttctgttctgttccgttctctatttttttttgtcaattttttttttttgactggctttcattggccaaacacacactaatgcacaattaatactagacaaaaaaaaacatagttttgcttactagcctagagttgtaaaggtctgtatagaaaaaaaccgattcgccgttccttgcgccgttttttttttgtttttgtaagtactttgtagttgctttgcgatcgttttttatattttatttccgtttctgtttcacttttcacttccgcttccttggccgttgttaactggcgagtcgtggattactgcaatgttcaagtgtccaaacttagtagcgctgctggtactcgtggtgccagcgattgaagtcgatgtggaatactatgatcgagcccgtcgaaagtccggccagaaggtatctatattagagttagaagtggaaggaagggaaaagagtgaagcgaatacagagtgttaaaaccaatttaaaccgcttttgaataaacatccgaagagaattatgtgtgaatttgaattgaatgagttttgaagagcctgttccatttcacttacttctgatcgtgggtgagagccaaagatcggatgcccgcgttgcatgcggggaaggcataaagtggtgctaggttgaaggtgcgccacacctccacgatgccgcgatcaccggcggtcatcaggtattcaccatcgcgcgacagtagcatgcactgaaaatagcaaaaaaaaaaagaaaaatccaagtttattcatgaaaccagtaggttatcaatggtttgctagctttaaaaaaaggttttattctggaaatatatacgtttctcactataatataaatagaaatcgataagaactaacctgtagattgtcgttgtgcgtctcgtggcgcagtttcttgccattgatggtgtaggcggccacattgcccttatcgtagttgatgacaatgaaaccctcgcgggacatggttatcagttccggggaatggaactccgctggtggatccagtgagcgcagcaggtcgccaaaagtcgtatggataagtacgggtccatctggaacgagataacccttttggtgccctttcttttcttccgcatccacaatagtttatacttacttgatgatccagacacaaccagacccaactcggcactaatcaccaccgatgtcacggcctgttcgtgacccgtcaaggtggcccgtggtgtgggcacatcgccctcgcccacaatgctctgggttcgggcattccagtgccacagaagcaccgtgcagtccgccgatccggaggcgatgtagcagtctgatgtgatgttgcactcggaacgtgccatgcacgttaccacaccaaagtgaccgaatacaatctgcacgattttcgctgtaacaataaaaacaaatgaaacaatttggatgttatgaagtagcttttaaagtgagatgctcaaattaaccaataaagcgatattagctaatcgcaacttacccgtttcggtggcaaagacgcggaaactgttgtcccagaatccgcatgcgattaggaaccgactgtccactgtggtaacaaagcagttggagcgtatctttagcatctggctaaagttatcgcccaaatgacgtcggctggccgcattgctattgttgttggtgccatgaacagctgaggaagacaattaatcggttatactttgtccaaatggtcctactcgtatgacctagtttaactcacccagaaccggatcgatggtcagtggttgattggaacccggcgattggggcgattcggcgtagctgggactctggacggaggcggtgtagttgcagttccatcgattcaccgcaaactgatgacccgccgttaccgtgaccacagatggcaacgacagttgcggataggtgttggccgagatgtgaatgactggtgagttctgatagaacttgagcatctggcagagatcctccggcatcgcactgaacatcataggcgatagatgcatcgcagagctgcgcggcggatgcggttccattagcagttgactaggtgtttggccaaagttgcggatttgattctcgacggcttcgcgcatcaccggatccaaaacgccatccaagtcaacgctgccctcatatgtcaaatagtagaacacgttggttgccctaatggcctcgggaccgcgttgcttgtagccaaagatcaaatcgatccactggtgcagctggcaggacacgaactccgactccagtgccatgcgattgatgcggacgaattcttcggggctcttggcccacggtggtagttcaatgtcatccactagggcaccatcctcgcgatgacccagtcgatagcctgatgaattgtaaaacatttcgggcaggaaataccattctggtatcagttccttcacatccgatgtatcacgttggcaattcttccaggacagcgacaccgagctgaacagcctgtccggataatcaaatttgccgccctgcagggccaggaacatggtggtaaacggttccacgcgcaccaaccagttcagcgtaaatgctgccgtggaataatgcgtaccatagtggaagggcggtatggtgtcactgtcccagctctcgtaacgctcctcgaaataggctctgcgcgatggattcagggcgccaatcggtttcgacagatccctgtagtttgacggcaggctgagatccaaatccttggactcatagttggtcagcacccacggaaagatgggatactgatttagatcgttgtacgtcctgccggcgatcgtgttcaggaacataagatactcaaagttgctaatctcgcgacgctgccacttttgggtcatgttcgaattgcgcatcagttgacggggcgacatcattgaggccctcctcgtctgcggtattccatacttgatgcccactcccacacggggcagggccttgattaccttcttgaccgtatgctgatcgggaaaggcaaacaatatggacgtacggctggccaaaaagatctcgagggccacattttgcaggagataacgcctcgagaagatggccctcacttcggagaagtaccatttgccgtgcaaatggtcacagtacttaagaacttcgccatcgatcttctggaactcgggatgctcttcatccacctcaaagaacatttcagtgctggttattgagacggtgccgggtgccaccagaccgggggctatcaatctcgccttggtgctaatgttgacgggacccgtgagatccagatccaactcccgatcctcaatcaagagctcggcgtcgtccagtagctcaccattgtgctgaccggatggatgagtccgcgagacggctatttgggtgtggaactcgtcgcgagtctgcaggatggcatcttcaggtccgccattttccaaagccgccttcagtgtggcctgtggatgcgaggatccgcgcggattttgcaccatccgtttccgacgtctggcatcatcctcccaggcatccagcttccagtagggactcttttgcaccgctccaacgatggcgccaccactggatgtggagctggaatcaccccaggctccgtggcgattacacatgatgtttcgtaccttctccagcagtcggctggcaatcacattgtctctgcgacgtgcggcggttatcaagtgatcgcacattcgctcctcctccctgcgctccaaaagtgtctgtgcacattgcgattcaaagtcggcatgcttgaggacatcatccgctcgcattctattgaggatgaactccgcctcattggccacccgaacaatgtgatccttcatggcgtgcgaaagcagtcgaccctcattgattagctcaataaaggctaatcctgcgtgcttttgtaggctattttgccactcctgggagcagagcaacatgaccagctctacgacggaatgcgagttcttaaaggtcgtcagacccttgccctccatcagcaattcctggccatgggagccgactagggttttcgaaaggaacggcgcaaagtccaccatgatttcacggagcagcggacacactggccccaatgcgatttccagcttctgggtgagactggcctctcgcgaaggtgtggtcagcggcagttgggccaccaaggcgggcgccttcatgggcaactcctcgggacgaggacgctgattggatggaacgccctgaccttgtccggaattcacgccaccaccggaaccagcaccaccataaccatcaggcactcgcaccaccgaaatctccgaatcgggtttgtcaccccgctccgaatgaccaagtgatccatgttgctgctgctgaccaataattcccgcctgctgctgctgttgttggttgtgatgggacggatcgtgtttgtcggatataacattacctctgttatccaccaaacctacaactattccggcacttgccgcctgaacggcagcatcctcattgagattcacatccgtccagctttcgtcgttcgagtgactcggtttgtggtcatcgattagaatctcgctggatgactccacctcgggcacttcgttttccgtggagttcatgttcagggagcccacatccgagtcaacgctctgggatttgattttgtttggtttttgtttttggtttttagaggggaagaggagatatgaaaataagtaggtaatcaaaatatgcatggatttcggtagaagagcaatcaaatgggtccccaatttcggacgtgggttttcctttactacactcgccaaaaaagagtaaagatacggcaataaagtttggaaaaagtgcaactatctaagcattcttcatataaaagacacttttagctaaattaatacatttcaaccaatgtaagtggaatgaagtctttaagtgtcatcgtttttccaaacttcattgccataatactttcagtgcaggccacctcactctttcgcttttgtggatgtgcgtgtgggcgttctgatgtgagccatgtttgcaaggagggtcttgatgtatgcctatcatttgcacattaattatgcacattggactataaatcaaaattcccaagcagcaacggcccccgaccgtccgttttgtcaacacatgcatttgtcatcaactcgacccgggatcgccacctaacctccaacgcctatccgttcgctatcctgttttgcccccaaaacgtcccttcggtttcctctgtttattcaacaactgtcactcatcggcgtccatggcggcgacagtttgtcaagtgatttgcataaaagtagtccagattcactcgaacccactgattttggtagaatacaggacattaggcaagcgaaatggaacgcaccgaaatgaaacgatgcggaatggtgcgaaatgaaacacgcatagcatatgacaaattttgttaagcgtttgacaaatgtcagctgtcaggcaccaacgagtgtccgtttgtccgtatttcgtccgttcaagagagaaccatacgtacttttatggtgcgattttgggagattttcagggtgattttagagctgcagaaaaccccaagccccacaccagctgtgttgcgtgtggcatcagcttgtcatcaacacgaaatcaatcgcctttgtttgccctcgatttcatgagtgttgcggtgtccgtatccctagttgagcacccaaaaatgcccaacccccttcccttgtcgccccttatcgcacacccaaaaccaatgcctcattccggggtctccaatcttgtcaactgtgatatatgcacgcattcattaaggggaggtatacgtattatacgtgcgagggggtatgtccttagagcgagagagaggtagcattgcacttagcactcacacgcacacacacacactcaaatgacagctaatcactgcgtgtgtgtgtgtgtgtgagtgagcgtggggcataaataatgcgagtgtagtggtagttcattagggtgtgccggtgtggtgtggggtgtgggatatacggcgggctctccggggcttatcccaaaaaagcgataaaagccaagaagtgctctatgtgagagtgagtttaagtgtaagagtgtgtgttttacagctatgtatcactaattgcacaagacatacgcagacattaacatatacaaacgcaaatgggataaatcacaagcactcacacacacaatgatgcatactttcaggcgccacaaggtggttttatcagcactttgggtggctgggcgtgcatttgcgactcattaagtgccttgatttgtcggtggagattacaaaatgaaacatggatccaacttaattgcaagctcatggccaagaaatcaatgtaagacatttaaatgtcaaatcagagcaaaatagtgattggataatattaatgaataagtcattacgaaaatgattgacatttagctcatgtcatttaaagcatcgattagggttaagtacattaaaactattattcccataacggttgctttcaaatgaaatgaaataaactgttcgttaaaaagcataaaaaatatttatgtgcatatgaaaatcgcattctcatatagattgcaaaggcaactaatattgtgtaaagcattatttattgaaattacaaaccgaaatttatggtatttaattgcgattgaaaaaacgcttcgaaaaatgtcaataaaagacgcaaatgccggcaaaccaaattacagactacagacaaaagatacaatggataaacaatggctacaggcaacaaaatttgggacagcaattaaagttctacggcaaacagacacgaaatcaaaatgcaatgaatggggctacaaaatgaaaaatgaaaccgaaatgtgagttttcatttttaatgtacaaaaatttcgggtgtttttcgagtgcgtcaaatgtatttgtagctgtacgtgtgttttctttttgttatcaaattggtgcagtgggtgggtacaattctttttttttctttgtcaatttctgactgtcaaaagctgttgttgttgcagttgcaataattgttgctgattttgatctgtatttttgttttctagcgtttttgggatctttttacctttggcaatttttgtggcaccaacggctttggtggtgacaatggttgttgctgaattttaattgttgctgttggagcgtttgatgttgtagtcttagtgttgttgttgttaatatgggttgttgctgttgtagtagttgttgttgctattgttgttgtctggttggcctgtgacattattcgttgtgattgatttgcatacaaaaaatttagtttcgttgcacatgcaaatgaaatttagttttgtttttttttttttgttttcgttggcatttaccttatgaattaagtctaatcaaggatgcacacacactcacacacataatcttaccacgctcacacatgcaacactcttacatacacacacgtctcaaccaacaagaaaaaaaatatttaaatttcaaaatttaatattaataaagggtaatcactttcaaagcttctataaaagagaatttgcaaaatatttgcgttgcttacatttaaaacattctttctctgtacttaaaatactatactgtctgttttcattacccctaatttttaatgaatataccaactcacctttatggatggtggtccactggaatgtgaatcattatccgccaaaaccgatggattgttctcatcgacgacaattatttcgtagtcactatcctggatttgacgaccacctgggaaaaagcacagaaaaattgacgcaaaaaaatgaaacgataataaagagattagcatttgaattttgtgatttgtatgttactcaaaatttgttatttgttatttttgttgttgcagttacaatacaatactagagtagaaatctgtagaaattactttacgaagctgtaaacaaactgaagaattaaaatcaaataatatacgaagaacgaaaaatgttaaacaaacttaaactcacacacacacacagaaatgtgttgtagaggattaagcatatcggtgcgtagaaaaatatgaatatttccttggattttagtaaatatttcaaactacattttacaaataatcagtgtggagcgatgaaagcgctctgcggtaatgcaatctttcggaaatctagagaatagagaaacaccaagtttccaaagtgccgcccatttatttgcctgtgcagacaaaagctaataatttgtacgattttcctggacttggctctctggcttttatccgcaaattaaccttgttcaactgttggccatgtccagatctggcttaattgaaatttatgattgtcccgggaagacacgtgctttctgtctctgtctatagccccattcatttgccccatctctttcgtgtagcctgttaagtatgctacactttcgtgcctccggttttcctcccccactctgttatttcattttcggtttttttataatttttttttcggtttaattttgcaattattttcatgcactgccacgcccttactaccacttttacacacacacacgcacacacagacaggttcaaagagagctggtcacaaattacttttgtacagaagtcggagcgtgttatcggctccaacagttgtacaaactgttttcccacttttttttcatttttttttttacatttttccctcttgtccattcataaattatcccaaagtttttccctcccagtctgttgtgtgttcgtttttcgtatttttcggtaagactaatttacatttttgtcgctgccattaatttcgtaatggaaatgttgttgttgcaccgcaatgccgtgttaaaaggatctatgagaatgtcctttgattatttacgtaaagctgacctcatgaaggcaaaataatgctgaacaaaatatgattgttattttcaggaggtattgaaactattgttttgaaggctgatttacttgtgattcaagtggccagttcttcaaatggactttttcgctttacagagtattttggatgttcaagtaaaaacaaaaagggaagccagcagctggtatccaatttttcgtgctttccctgctttcttttccacggtcttttccctgaccatgtccaatggcaatttttacaatttttaaaatgcaggcgtgccgaatgccgttttatggcctgtctgcgaaatgttttatgcgcactcacacttgcccacttgcccactcacacaggcaaagaaacacaggcacagagccatgtgtatgaatggcaaattgtataattttcgtgtaattcattttcataaaatgtaaaattaacgaattatgtttcattgccggtggcaaagtgggtggtgttttccagctttcggctctgcctatgtgtgtgagtgtgtatggcgtgtaagtgtgcgagtgtattgcaaatgaagataaatgaaatgaatttcagctgacagcacaaaaatgacgaggaaaaaagaggcagcagcagcagccagagtaaaagatatagaggaagagaaagaacatcctcgagccctgaacatgtcaaaaaatttctagctgtcactgtgtgcatgtgcgagttttacaaagatagattgcagtttttgaaagcatatttggataccgttggatatcgtgtggccgagaattttgtgggctcgccattacatcatttttgcttttttccacacacaaacgttagatgaagacagaaccccaattaaaaatccctccgcaataaggcaattaactgttggaaacaacattttcgaaaaccagcatcgaaatgtacattttccaagctagaaaatatgattgattgatcgaaaaaatttgtcgaatttcaaacaaaagtagatggtgcagtgtgcagcagaaaattatagcaaaaatctagttaaacgaaggaaactgggaaaaattatcaaggaaaactgctgtgattgagcaggcgaaaatgcaaaataatttacttaatacatttgaagggagcgctattagttaagctcacacttaaaataaaaagctgggtaaactttataaattctaagttacttcaacttctgaattgaagcgagaatgaatttattcgtaaaaccaattaaaagcgaaacaaagagaaggcggaaaaggaacattctattaaaccctaaagaatgtatgtgtgtgtttgtgcgcacacataaacacacacacacacacacacacacaatcacacatccaacgaataggtaaaaagaatatttacataaatccatgtctcagtacatttcagtgtgtttttgtatgtggacggacgtgttttattatacatatctttatatcgtttatatataaatacacacacatctacgaatacagaaagtcaaggaaatgaaaggcaagtgaaacgacaaaaatgaaaatagaaaactaatcaaatcgtaacgaatcgcaaggaaaggcaagaaagtgagcaacaatctagcagctaaatttatagaaagatcaacagccttgttccacgtggatagtcataataaaatatataactatttaaactcgaatattttaaatactttgtcagttcaattcaattcaataaatttacgatgaccatccagtggaacatggcattctagctaagattgtacaaacatatagatatagatacacattaaagtatataaatccacacagatagttgggcggatgtgcgaagtttgaattagataaactctacgacagtcgaacgagcgatacctgttccagcggatgcgttgcgtccattgtagcggtaattattatttatggcgctcgtcttgtagaccacgcctccatccaaaccacctgccacaccccccatacccacaccaacggctccgcccatgccaacaccaacagcagcatttgcattaacagctcccgctgttgcaacaccttggataacttgatggcttcccggtggcgaagatgatgagttagctcctccgccatttcgcagatttcgcatgttgttcatcaggctggagttattgttattacccgttccaccagagccatgaccattcatcagacccactgcctgatagtccggcataccattctgttgcaatgtcgacgtatcaccatttcgcatataaccaccgtgtggatgtggatgcgaatgcggatggtatcccgctgtcgatccattttccgcataatgtttaccatttagctgcggatgttgctggtgcccattgatcagtccatagtgcggctgatgtggatggtaatgtggctgttgttgctgctgctgctgctgctgctgctgttgctgcttgtgcaactggcgatgcgattgctgctgactttgggatgccaggctggagagcgaggagctcgacgctggctgagatgtggccgtcgaactggccgaggagctggtcgaatgtgtggccagaggagtgggcgaatgttgctgctgtcctgctgcaacttgctggtgttgctgctgttggtagtaagcggcagtcatgtgatgatggctatgattgtggacaacctgctgttgctgctgttgctggtagtagtgttgctgctgctgatgttgctgttgctgctgctgctgctgctggtgttgcatgttgctgttgtgattctggtgcgattcgggcaggaattgcgggtaaacatgatgcgaccattgggggaacaaaggacgcgcactggcggcttctaaagttgcagtttttttttttttatggtatttacacacatattaaagggcgggtggtgaggcaatggcgaggtatacgttggttgattcataattagttttccgtttaaattcatttttttttgtttttttttttttggttgtttatggtagtttttgtacaataaatccgaaaaagcagcgtgaaatgaaatcatcggtaaacggaacaaagaaaaggaaacataaaaccgaatagtatctccaacaatggaacagacatgagatattttgtgttcttaatagctagtgattatatatatgtatgcatataaatgtatatatatatatatatttagattgtggtaaaagggaagttgggagtggattgctgggtgaaggggagacagtatacggaataattatgtggaagaggtggtgatatatattttgaaagggaacacacacacgcacatgggagcagttctagagggaaattaaggtgggtccagcggttaaagtgcggtggttggtggggtggcttggtcgtgggctttaaggtggatcgacaaaaaattctcatcgcgtggcatctaccattaaaaaaaaaacctttgttcagctgttcaaaaaacacagaacacaaaactaaatgcggaaacaagccgaaaccgagatgagaaatggaacgaattgataatatagaacaataaaaccaataaatatttatatatatataaatatatatctatatataggaaatatatatatataggtaaaggaaaacaaatccagttaactagcggccgaattaaaaacagagccaaaaggtataaacgataaacgagcgtgaagtttttggtgcagcaagagaagataaatcaaaatcaaaatcggaaacgaaaacgaaaaagaaacataactaaataaaaacggaagccgaaccgatatggaaacgcaaccgaggaacacaagtgaaagaaaacaatctggaacgtaacacgaaatcacaatgaaactgaaagactgccgccggcagaagttcgtttagcccgacccacaaagtatcatctctagtaaatgggtacagtataatatactatatatgtatatatggcatttccggcaaaaccggggattacaacggtggatcttagactcaattgtttgccacttaccgccgcctgccgtgcgttgcagcactggcgattgacgctggatttgcggctctgccggcggctccaggatatcacgatacttggacaccatcagcaccgatatgaagtacactatcgccagcgagaggaactgcgcctgcttagtctcctcctgaaatggtgaaaaatacgaaggatttaagaaacgaatactccagttaaactgctgcagaaaatgtttcaaatttgccatatatatctttgcaatggcctactactcaccacatcgcgatagatgactgcgcgcaggcgattgacgtccatgtcctggagcagcttctcgggatccttgacaggcgataattggccggttattgactcgacaatgttctgttcaaaatgtcggatttagaaaaggaaatgaggataatatggcagggactttaactcaccttgggcgatgcttgagctccgcggatgagggcctgcaaatgggctgcacccgggacatctctcgccaaggcgcccacattgtaacgcgttcgctccttgcactccaagcaattccttaccgcacaggtgcaaaccaatcgcaggcactgacgcagtatgccgccactggacatgttcttctccgcctccaactcgccgaagtttagggatgtggcaaagatcaggacatccgccatgttgaccagacgctgcaggaaagatacggccacctccaaaggcatgccttgcgttggctccagcacatccaattcggactgcggcagagaaaaggaaacattttgtaaccaattttatattggtttcacaaattcgattcagaatttagaccatcatacttacattgggtgacgtggcgctggccaaaagaggcagcaatcctccgcaggcaataatcagattatccgctagctgcgatattaaatgcaccgtgttcaccacaaaaattgcattctcgctggagttgacaaagtccaggacgcttttggtcgaatgactgcgccacacctgaatgtccgtttccagcgaaaagaggacatcgctgagcaatcgctgatggatgtaggaccacttgaattccggtattcggaagggcggacgtgtaggtcccggactgaacataggtcgggtcgatcccgatttggagcgctgttgctgttgtttggattctggattaccgggaccataatgattggcatccaattggctgctgttggcattttcaactgccgcagctgcctgctgattagagtaatcctcatcttcgatggtcatgccggctgattgctgggcgtcatcctcctggaggacttgctgcacctgctcaaccaatagactggatccagcctcgttcttcggcgtagtctgggtggtggaatccacctcagtgggtttgacccgcaccgacgttgctggtgattccattgccagtatttgtggcgattgctcttcgggggctggcgatgtttgagtggtttgctcggctgccactgccttgaccgtatcgtctaccagagtgtccaggacttggttgacaatggccaccacctgctcctctggtttttgaggtagttcttcggcgacctcctgcgacttttgttgttcagtttcctggggtttcggttcctcaaggttcggggtctttggttctacagagctgtgaccttttggatcttctggtttctttagatctccttcgatcttggtttcctgcacttcagtagacgctggtttttcctccagctgcagaagaatctcttccttgccaatttcgtttttctcctcttcggagttcgcccccttttctggcttctcttgagtgctctcctcttggaccattacgagagctgcttccacaacctcttggacaatttccttggcggcagcggccaaagtctctgcagtttccacatcctcaggctcttctgacgtctgcttctccttcttgggtatttcattattattcgtttccgttttggtttcgctggccgattccgcttccgtggcatcgatgaccttgtcgatgagttgctcgacaatatctctaacggccagcgccaccgaatcttcagcttcggtttccttattcggttttgtttcggaatcggaaagctgaagaagatcagcttctggcgtttccacgacaatgggtggctcgggactggcgctgatctcggccagcttctcgttgttgttcagcttgttggctgcatcttcagtcttttgattggttgctaatacggggctggggacaatggggcttggcttggccgtttccggtgtttctacttccggtgctacgctcgtttccgtttccgccttgggcgcctctgtgctgctcacgatctcattggcattgacttctgtttccgcttccgtctccgccgtcgcagtcgccgttgtgggcgttggactcggactgttgttattgttattattattattgttgagcagattcttgctgtttaggagactgacgtttacatcctgttcgcccggctgttccttgttatccttgttgtcctgggattgagttttcttctcgttattgagcacaccctgaacaacctcgttgacggccagttcgatctcctcgtccttgaggacggaggatgactcctgcaggacatcatcgactgccattttgcaatcgttaagtgccgcttcggaagcctgaagaactcgcgacacatgctgttccgcattgagggcatccttggcggtagccagctccagttcttccacatccatatcatcaccaagttgtagggtttccctgagtgctcccaaaggagtagatggctctggttgcttctccaggtctccgatttgctgttgtacaggctcctcctctttgacatcctccaaattgccattgcacgtggcatcggttttgagctgctcattgtagacgtcggaaatgttggctatcaccgatttttgttcggtttcttcggttataggaccctcttgaatctctacttcctccagctccagttcctccacctcttcctcaaccaccggtggcacatcttccagtgaggcaatggaaacagaacctttaacagctgccgtttgattggtagccactgctgctgcagatccaccgttctgctgctgatgcagctcctctcgctcccaaccactgatcgtgctgatgggtctagcctgacgcagggcaggatctgtgatattgtccgttcgctggcgctcgtagtgctcgtacatctgggcaaactggagcttaaactcctcgtaagacaccttggagtggacgattgccagggtatctacccaaactctccagccaccgtattcatgcttaatggcatggtggagcagcatgcggaatagggaatacaccatgtcgcttatcttctgctcctcgctgctctttggatgaatgtacgccatcgcaatgagccactcctgccacacggacatctggagcactgtgcgccggttctcccgattgctattgcacaacagggtcatatcctgcaggaatagctttttaacgtcgatcagcgattccgtctgctttgattgccggatcagggtggccaccaccttgaggatcactggatgggcaaagatattaaaacagaaaaagtgttaaaaaaaaaacaaaagggaaagaaactcataaaatcaatcatcaaagctaactgttcgaaaacataattcgaatatttaagagtatattgcttatacttatatgcccttaattatattgaacaaattatctcattttttgacgagtcacttacttggattctccagacggtagtgactctctggttccggatggcgtgtgtatagaatctgctgcgagatgtgctccgtcatgatctcatagagaacattgtatgtgggcagggacagtgattcctcatagagaagcagtcgctccgctaaaagggtgtacagattgtgtggtgacatcacatcgtacttgcgtctgatggtgggacaatcaaagaaaatggaaaaagagtttgagttagattacagtagtaactactagtggttggatttaatcggtccagccatcactgtactcacttgtgggtgctgcgggaaaggaagaagcccagcagcttgagggcctgaagccgaatcaactgactttcggccgccagcaacttgaagatgctgcgcacgccgtgcttcacatcaaaggcaggtaccatggagctgggatgctccgacatcagcgagatgagcatctgcagcacgtcgtgcaggttctcgtcctgaaagtcaaaccaaaacgagcgatgaaaaacagaatgccaattaattaaaaagcagttattctttatggcgaagtagatattgggttagagggtatcgattacgcacctcgtgcatggtggtcagatagttgagtatgctctgcagctcgtcctccttcacgccattgccgatcattatgagctgcttcaggaacagcaggatgtatgcccggatggccaggatgtccttttgagccggacgaggtccatctgttggcgaagaagggaaacaaaagcgaaatcatttagtcatttctaaatactcaatagatgaacattcgttatcaattatttgcactgttccaagtgctacttacccagtcccttgggaatgatgccgctcttagcccgtggattgaccacccagtagtagtactttagggtgtgcactgtctgcagtaccgtgctgaccctcctcacattgctgtagatctgcgtgtccgagaggaactcggtggccaagtaggagtatagtcgcgcctggacattggcgggtgtgtatatccacagggctggattgaagaggacgtgatccagcagctgccacgtgagaaacgagaaacagaacaactgcggggaattagtcaagtaacttttgctgtcctctcacaatttgattgggtgacttagtcgatttgtgggggtagctcgaaaaggaagggtgtgtgtgtgtgtgtgtatgtgtatgtgtgtatatagatagagttttagatagatatagtatgtagttggggataggcaaaaagaggtttgagcaggtggatatattaaagaagggccagggagtgcaggttataaaaaaatcaatttgatttcggtatacatacggttaaacatgagtttcaggttttttttttattattgttgtcagagttgttgttgtagttgatgttgatatatttttgagggcagtagtagtagtagtagtagagtacatattttgggatataacaggtaacacatgcagcaacagcataacggcaatcaacgaacataaaatcaaattccaacggaacggaatggaacggaacgaaatgaaacgaaacaaacaattgcattccggtattcatgaggttagcttcaaatgtttaggggttaacacttaactaaattaaactaaaactaaaactaaaactaggctaggctacgctagtaatggttatgttaagttaagcctaagataaagttatgtctaaaattctgtaagtaaataacacagtagttaaatggatatacatatattatgatggaaaaatgactggatgcttttctctgataaatcaaaccgatatacttgtcttgcaaacagtttttcgatctgaaaaaggtctcacgtacttttaaattaaagaggccaagtgattcggtcttaagtccttgtgtaccagatgtaaatagactactatttatttgaatgtataacccatatctagtactttctatatttcacttttcgttttaaaaactcttcactcaagagtacagtcagcttaaaccatcaagcccactaattgaaacttccagttggcttaataccaggaccagtaaaatatcgcctgaagagtcactttatggctggcattaaagtgtgcaaaatatctgagcgtaatccagttaagttcaacttctgctgagtgggaattgcaatccgctttaatttcattcatctgcttttgcccgggtccaaacaaaacttgttaagccatcgcctcaacttgttggattgtcaaaaccagtgttcgccaatgttgttgccatggctcctctagtaacaatgcaacaaggttttcacacccctcaaagcccctgaaaaggcccctcaaaaaaacccaaccccactcgactgctggcagagaagtttcccaattaaaaagctgtgcaccgaatgtaaaataaaaatgcaaccggcagccccaaaggtgccacgaaaaatatttgcagcttttcaactcttgattttttcttttttcatttgtcctttttctttttattttctgtttttttttctctttttgctaccagaaatttattcatttgacgaaggacaagggagaataggaatgtagaacggtgtggtatacatttaaaaacgtattggaaatactccagacgagcaattaggaaggtgcgatccggtgctgtgaacacacaactttcgcttcaattatccaaatgacacattgaacaaattgagtgaggaacaacggagtatgtggggttgaaatgggatatgcggtggtgggggaccaggaaaagccaatggaaagcaaaatctgggattgacgttggggtttttcgggggccttgaggttgcgctcagggtttcacccagagttaataagattatgcggtttatcgctgcggttttgcggttcaacaaagcgtaacggaacgaagtggaatgaagagcgaaatgactttaaatgagtatatagcacgtatttatattaacatttatatatatatataaatacataaatacacaaatcgatgaatgagaggaggggatgatgatttatgtacacgttgattttcaacaaactacggtaagcacacacacacacacacacaaaatgaaacaaaacgttatgaacagtggaacggaaacatatatatgttacatatattggatatagtggtacggtacagaagtacagagaattcgagaattgagcttcacctggtagaactgtttcgttgttcatgttgaattattatgttgttgtttattgttcggttgttgtttttaaagttgttgatgtttgatttcagtggatgtgtagttgtgttgtgtagttgagtgtcgatgaggcgcatttgaattgagttatcgataagcgatcacaatagcaagaagcggggaacgatggaaatggataggcgatcgtgagtgtggagcgtgtggtgggaacggtgggcgtggcgggaagcagagaacgagagatattgagagagcgcaggggagagagtaatatagagtgagagtgaaagagagaggagacaaaagtagaagaagacagttaagttgtagttaatattttttatcttcttttttgctaattgtttgtcttgcttgatttctggctagggaaagtagtaattttgattaatctcatttatgattttgagctgattaagcgaatcgaagcagtgcccaggcaggtgcaaagtgcaagcgaaacgaaacgaaatggaacgcaaatgactcgaatacgaatgccagcaactgattgcaatcgaaacgcatgaatggaacagtttgctcatttgccaataagtaatcacaatttaatgagcacatcacatgcagaaaaacagtgtatggcaaatgcatgcaatggtctgttcttaacaaaataatacgataatggataaaattaaatgaaaccataccataaaaatattgtcaggctgaactgagagagaaacaagaggatatttttaaaaattaataagctaacaaaagccatataatttgaataggtgaggtctctttgtcgaacaatcacaaggcaatcgttccatattccatattccgctcagctgacacaatagaacaaagaccatgttctaccttttaagctaagcgggttatagaattcaatgggcaaccagtgggatttcaagggggagatatttgtttcaggttgcacagactggcagatggcataaaataaacataaatatgcctgagatacatgtgtatatatcgtgtgggtgggtagacgttggatgcttgtgagtagtacgagtacgaatacgagtacgagtatatttgcttaagagattctcaagtgcagttacttataacaagaaatgtgagcagttgtttacggttgtgtttacttttttgaaaggattacgcaggcctgtgttcaactgtgcgccattatcatcataaccatcatcatcatcatcattattatcatcatcaaatcatcatcaacaaaaggcaaaacacagtgagtgcgatagatagagttggatttgtatatatatatatatatttatgtgagtgttgaaagagagagagagagagatagagacagagaaagcaacaaacgagatgaaatcgcatatcatttttgggatttccctttcttttcttttcttttttttttggttttttttctttatacttttttggagagatgggttaacatgccaccctaaaaacaatcgatgggttgggttttcattttctgtttgtttttgctgggtgtaagcgaacaacaagaacgcgtaacaaaattgtaaatcaaattcgcaaggagattctttgttgaggggcgggcttttcgcatgcttaaccaccccccaaaaaaaataactggcacttagatcgaacttagttattgtcatacatatatatatatatagtataatacataaaaaatacattttacattcatcacacaaaaaaaaaaacatcagacttcatgccaagaacattgcgcatacgcagcgttgtccgcaatgcaaccaatcgtccttccttatatttgtatgttttttaagtattcatatcggctaacaatatggcaagcatttgatttgaactcgcaaccgacacttacctgtttgagcagcagatcactgttggccgacaggcaggtgaccagatacttggtcagattcaggaatgatcccaggacttcgagagtcaggtgttcgcgggaggagcgctgcagcatgaacgagatgaccaggaatccccggttctggatcatatgctgctgcaccgtctgcgatgtttccaccagttcacagatgaagcccagcagcttggagctaacgatagggaaataaaattatatatgcgattattgataagccatggcttcgcttttgtgcagttaaattccaaaacctattcgaatatcgaatatctagttctctgttatttaaaaatatccaactatgccaaaatacacacaatatatggtgtatggttattctcactcaccacagcgtgggatcccgcttaatgtcgcccagaccctcgtgggccatatccagctgcgagaaaagcgggaatagcacctggatgccgccaatcgaattgagggtgcagtgtatcgagtgcgtgaccacggccttcacatcctgcaaaagcaaatttcaatttaatcagagctctattaatcgcctaagctgtcatcagccccgtatattttgcacaggacacgttcgccaagcttcgtgctgctgctccttcagctcctcagctccttctactccttatgatttgtgtgttgtttacccaagaaattactacaaaatttattgaataattttggctagtgccgtcgtcgtcttcgttctcaacgccgccgtgctttccggtccatttcggactttttcggggctaataagaaatgccaaggcatgcgccggtgtcgtaaaatttctacatggaatttatgctccctgggaggcttatgagctccgaaccccactcgtcccactccgtccgtgttgtccacatcttcttctggtgtgtcatttactcacctgcaacatcagcgcatgcggcgtgtgcacgaaatatgaaacgtttcccttgggcgatgactgcagacacaactgaccatcggtggccaccggattgtacatgaacacaatggcattcgatagtttgccatcgtacagcacctgtgggcaagaagacaggtggattggttgagttctcgggccaggcggttgaataatcagggggaatcatcagtgggtatttgggtatctggggaatcggggaatgtggtggggggtttggggttggtgggagtgtatatggcagggattaggccgggctttcggcgagtcatcgagtggcatcgagctgggcactaaggactccatggatttcatggactccatggacttcctatcgaccgaccgacgatttattcccagtcaggttatggcaatttacttaggctttgtctttagctttgcttttggctttggctttaagctgacacacaaagataacgaagaaaaaaaaaaaaaaaaaaacaagacacacacagcaacacacgcagcggagaagagcaggtttacaaatgaccaatggaaagccaagttcggaattccgaagcattaaatacccagcagagttacgaaagcgaaatgcgaaagattccaacgtttttgttactttcaatttggcagcaagaagccaaagtttaaacgatttaactaaggcatttaactaactgatcgatcagtgagttgtaatagtcatatgaaaattcaataagttaattttgttaactgagcacttttgtacaaacttaattatgtcggttggacagtgtgctcgttcatatactaagttatttgtgctctgataaattctgtgggaatcaataataaactctgttaggtaatagaaacttacacacacacgctcacagaacgtataaacggcactatgtgtatgtggttgtgtgctcaatataaaagtattcaaatgctgttcatgaacaatatttacaaaatatatatacacacaacacgcatcgttgcatttaattttcctatttgggccagattttcctcgagtctagagtttccatctccttttgtgcattttggcagtgtgtgtgtgtgtgtgtgtgtgttgtatgtttgcgtgtgtggcatgttagctggtgcttatagtttcattattacacgtttttggctgcctaatttgctgctaaaaatacttctttcagttttcgtaaaagaatataaaaaatgtgcaaaaactagttgtgggaaactaagaagcaaaaacataataaaatgttgtaaccaagttaagatactttaagatgttgcaaccaagttaagatactttaaaggaactcaaaatatttagttgttaaaagaacgtttctttaatatttatttgacggcaaagtgttctcttttagggatcataacactcgcccgcccatttcttccattttttttttccacctaaaagcgcaatgtttgtgtaaatgtgattgcgagtgtgcgtgtgtgtgtgtgtatggccgtgttttcccatcccattaactcaactcccgatttggcacataaaaacaacattcaaaataactaaagctctcacttttccccgcccctccaccgacactcgccatacaaaatggcataatacccggcacaggtgagtgggaaatggggtggcaagtgaaaagtgggtggatggctggctgtctacataatagctgtttcgggtcctgaaatgtggagcatacagcatacagtagagtagagcacgggcatagaaaattctccagcggaatatggaacatgcgcgccccaagatttccaacaatctccgtcgtgtggggtgggtgttttgggtttttggccttacatgttcgcctttgtctaccgccaaatgggagtttttattattattatttttcttttttttttttttggtagcgaagtttttaagacacctgcccaggtatgcgctacatttgcttctgtttactaaaaacacgaccattgtgtttgtgccatctacaactttaaaatggaaaatggtactggcaaatcgagctatcgatctaaatgctgtcgctaactttgtaattgcttaccaaaaatgtatgataactttttggtttcgattcaaccagaataacacaaatgttacatgaaactaaactttatcaattacaacgctggcaataacttcttaattaaataacttttttaaaatatttacaaacacacagcactggaatgttgttacaaaagctgattgaaataactaaaatacgcatgattgttaggaaaaaaaaaaccaaaaaaggtttggcaaataaatgttttgaatgaaatgctgccctattgttcaagtttcgagcgaaattcaaaaaaaaaaaaaatatatatatatatataaaaaatgcagtacgagaaacttaaaaactaaattaaaatggtgtaaaatgaaatgaaagtttgcttacagctttcagctggttgacctcctcagtgtcggcgcttccgaccattgagttcaagctgctcacactggacattcgacgtagttgctctgatcgttgcccaaataaggaacatattgaaattataattaattaaaaatcaaaagatgcgcaaatcaaaagtagtgtaaataccaaaagaagatgaagaagaagaagcatttccagtgggcaaatggccaagcggatcgtccgcactgccagttgctgctgtggcatggtgatgtgttgcatgttgctgctgtcccactgctgcatcattctcattttgtgttgctgccgccgctgctgctgcagatgttgctgcagcagttgttcctgctcccgctcccgctgctgctgctgctgctgcggcagtggctactgcagtggtgccagtgctgctgctgccagccaaggtcactgcattgcgggcggtgagaaccgctcgaattttcacaaaagccgcattcaaatcgagcttctcatcggaccaatcgatggcacgcgcctcttgctcggcggccagaatttggaactgcagctgcaactgctgttgctgaccggcggcaacagccgctgccgctgcagctgatgcatcgttgccggtaccgcttccggtgccactcccactgccgcccgacagtgctgacgcccccaaggtcgctggcagaagttgaaagtgactcacccgcttgtgattgtccggcagattcagatagcactcgttgtcgaaacggaactgggactgttttatttgtattttcacagtgtgtttttcagcacatggttcgttgtgtgtgtgtgtgtgtgtgggtgtgtggtgcaaatttttgtagcagtgcagcggacaggaagtttaaaaaacacggaaagagagagagaaaaaagagcaaaaaaaataatgtatatatatttatatatatatatatatgttttaaagtatatataagaacaaatgacgttattttgtacagacgaggacagttttgctgcggcatttcggctgtgcaaaagtggtgcagtggtgcgtgcgcttgaccctcgctgctgctgctgctgagaatacgggttggcgatggttgctgggtggtgcaccgggtcaccagtgcagcagccgaaaagcaccacccactactacaactactcaccttgtagccgggacccaggcgatgcatcgcacagatctgctgcgtggtcagtgcctcgctgaaaaggtagatcgccgacatttggccacagaacacgcgctcctcgtccaactcgggggtggctccaatgtagcacttgtcaaagggctgaaaaagattgaaaaatgggtatttaaatgggtagacgctcattggagaagctaagaaatcgcctctaaagctgcataatttaaagcagacttataagtgaattgattaggagcataactctatcgttgcaatgttaacattgttctaagccgatagacaccaaagcaagacaacttaagtatgaatatcaaatacaaatggtactcacatcgtttgtggaaacaaaccaggccatctccgttgaagaggccagctgtccattaacgaggcacttgatttcgcttttcgtccaacgattgtatatatacactatggcaatcatataccactgaaatagaaaccaaagtcaaggcaaattcatgtgaagtgtgagcgattgtattatatgaagagtttagtggcgatattattcttacctttcgtggctggaattcgtatttgacacaatgctgaaagcctttgcccttgaccttcattgaggtgaggacaaggcaatttcccacaaaatgcgccgtatagcccacgcccttcgatgtcttgaagctggaaataagaaggagttatcaattgagtatggaataccaaccacacacacacacacacacacacacacaaacattacacactttcgaccagtactcaccagtagaggtagggcttctcacgttcaatattcaccgaattgatgggatccaggcggaaccaggtggtaaaggtgaatccgttctcatagggccatttggccagtggcggcagtaccatggcctgtacgaatgtaaaacggaaacggaaatgagaccgaaaagcgattaaaagcaattcaaatttaaccaccagcgctatgttaaataacaattacggtcagtttgccactcaatatctttggcaattaacataaataagcctcataattgactgcgcatatatataggaccgtagattcaagccccccacccctttaaattccgtaaccatagcaacgaagctgcataaatctcggagagggaaatactttcgactggctaggaaacttgtggtccattctattccaatccacaacacaaactacacacgaatgtgtgtatttcctgtggcagcctcaactcaaagccagaaaataccagagccagaaatgcaaaaggaaaggcagttggagacgggaatttaacagaagaagccgcaaaacagaaatgaaccgaaattaaaaggaaatgagcacatttgatttatcatcaatgctgtggcagcagcacaactcgccgacgacgacgtttgctgaaaaaggataaattcgagatgaaaggaactactatatatatgtacatatatagtacataaatacactatatatagtgtactatagtagcactatgaactccggctagtcaggtgaaattcagctggtagtccataaatttaaggcactttcctgtgcagacagtccagttcagtttgcaaaatatcgttatattataaaatttctccccctggaaatgccatttgatattatccgcttgaggcatctgggtgaattcattgcaatttgataacaaagatttatgcatttaatgtccaatgctcagcgtttgtcactcatcgtttgctgtttgttagacaatctgtgaagttatttattagccctatgatgatgactttaaatacttgacacgaatgctgacaaccaacaattggtatgcatttatttgattagttcaagtcgactccattcactgcattacattcatataaagctcatgtttgatttcccctattcaacgtattgaatcattatttgcacctctccctacaacttttgaaatcacttgtttactctacagctctttactctttagatctcttgaaactatcaaattgcatttactttgcacttatctagtggtctcaaccttttgagttggcgaatgatggtatttgggacatgaagaccactttttcgggggccaagaagagacaaaatgggataaatgggttaaggctgggtaaacgtgacaaaggctgacactgttgttggagttttgctgcggttgcaggcaactttgcaccacacacacacgcactcagtgccacactctctacatttccccaattttcggccatttcccgtgacagcagtagtgggaatgtccggttggagaagcaggaaactgaaatggtgccctggtgattttgggttttggcttttccgaaaatctcattattcgaatcgagtgccgtcgtcatcctgttgcaatcagcaccatcaatggcattaggcgtgcttgtggatcgcagattgttggctaagtgggctgtggtggtggtcgttgattttccctccaaaaagcaggctaaacggaaaattaaaaaggaaaaaacaaaaaaaagaaaaaaaaaaaaaaaaacatcccaaaaacctatcaagccaaaatgagaggaagagagagggggctagacggtggatttgatgtggattggatggataggtgggcgattcttttgctcgatttgcctgggttggcgagcatctatttattagacattttgcgacaattgcgaaacgctatccatctgacttccaattcactttatggcattttttatgtatttatggggccatggacatatcgatagagtgcttgctccccccattcacccatccaccatagccatcccatcaagaaacaaagatgggagtggtcaaacacacagataacagacacacatacatggctgcgactacagagtgaggggaaaaaaagcacacatttcgaattcgttttaagtgcgacgcaataaaataaaagcccccggaaatgtcgacgggggtgcaatatggagccccctggggaacctcttcctgtatcgcctgtgacgggcatattcgtatgaggtctttgtttcagccagttgcattcaataaaaagaagcctggcgaattgcatggcctaaaattgcaaatatcgtccagagaaccaacagtgtgacgaaccagcgggtagattggaatttaagctgctgctgataactcaaaaactaaagatattagaaatgtacaactcagcaaaaaaggctgttgttgtttaaatcatggacatctgaccactgcagtcgacaaagcctcctttaaattgtttttcccaatcgaatctcgatctgctataacctgtatcttattctatacgattctattgtatctattggctagtggttggttagtgtataatgtatctatttgttggtactcaccgatcccttgcgacccggaaagctgaagaagacgtctggtccgttgcgatgtggcatctgccggaggacgttgagcaacttggccgagtggcgcggccacttgccattggtggccttcatcgtaccgaagaggagctttagctccttcaccgttatgctatagctggccagcacgcccaacatctcgatgagcaggtctgaaagaaggttgttgcgatcgaaatgggaaatggtttagtgtcagtggcagtggcagatacacacgtttatgcaatccatgtttaggagtttatggcacatgaaatgccgtaataagtgctgctaatgctcttcattagccatcaaagtgatggacattcataggggagtattaaataataataagttgaacgatttcccattcaaataggtccgtttaaatatcttcgatagtcgatgtgtttacttctgcacaacatgcttttctggttttgctttatgctgacataaacaaaataggctatagatacacagttagttatccaagctacatgttcaagccattaaatgcggaaaggccggaaatgggttgaaggcccaaaggatatgcgcaagtgctgctgacagccagccaaacttaactctgtgtgtgtgtgtgtgtgtgtatgtttggctgtgtatatatatatgggtgtttgtggcaacaatcaagttcccgttttagcacaggtggcaagttgcgaatgcgaatgcaaatgcaaatgcgaagccaaatgcaaagtcctcgcgttcacccaagcggcaaggacacacgctctcacggcgaatactaaaagacagagaggcgtggctggcggaggcggaggaggacgggccactaggggggcgtggtcggggcaaggccatcagatatattgcatttgatctagcactgccattgccaggcgcgaaaggaatttccattcaatggaaggtcacaaaaagttgcgctgaaaatagcagctgattatttttaaaaattctagaaaaaagatactgcaaaattgatctccaaggatcccataaacatttatttttggagcatttgacgtttataattaattattggcaaaatgccagggcagtcatcttaaagcgctgcagcacgtttacttcgattcgccaaaacaaactttcggctttcaattgacttgcaatataaattgtgaaatttccctaggaaaattcg

SEQ ID NO: 14783 - DNA, 11200 bp, DROSOPHILA
cttctttcagacctgctcatcgagatgttgggcgtgctggccagctatagcataacggtgaaggagctaaagctcctcttcggtacgatgaaggccaccaatggcaagtggccgcgccactcggccaagttgctcaacgtcctccggcagatgccacatcgcaacggaccagacgtcttcttcagctttccgggtcgcaagggatcgttgttatttaacatagcgctggtggttaaatttgaattgcttttaatcgcttttcggtctcatttccgtttccgttttacattcgtacaggccatggtactgccgccactggccaaatggccctatgagaacggattcacctttaccacctggttccgcctggatcccatcaattcggtgaatattgaacgtgagaagccctacctctactgcttcaagacatcgaagggcgtgggctatacggcgcattttgtgggaaattgccttgtcctcacctcaatgaaggtcaagggcaaaggctttcagcattgtgtcaaatacgaattccagccacgaaagtggtatatgattgccatagtgtatatatacaatcgttggacgaaaagcgaaatcaagtgcctcgttaatggacagctggcctcttcaacggagatggcctggtttgtttccacaaacgatccctttgacaagtgctacattggagccacccccgagttggacgaggagcgcgtgttctgtggccaaatgtcggcgatctaccttttcagcgaggcactgaccacgcagcagatctgtgcgatgcatcgcctgggtcccggctacaagtcccagttccgtttcgacaacgagtgctatctgaatctgccggacaatcacaagcgggtgagtcactttcaacttctgccagcgaccttgggggcgtcagcactgtcgggcggcagtgggagtggcaccggaagcggtaccggcaacgatgcatcagctgcagcggcagcggctgttgccgccggtcagcaacagcagttgcagctgcagttccaaattctggccgccgagcaagaggcgcgtgccatcgattggtccgatgagaagctcgatttgaatgcggcttttgtgaaaattcgagcggttctcaccgcccgcaatgcagtgaccttggctggcagcagcagcactggcaccactgcagtagccactgccgcagcagcagcagcagcagcgggagcgggagcaggaacaactgctgcagcaacatctgcagcagcagcggcggcagcaacacaaaatgagaatgatgcagcagtgggacagcagcaacatgcaacacatcaccatgccacagcagcaactggcagtgcggacgatccgcttggccatttgcccactggaaatgcttcttcttcttcatcttcttttgagcaactacgtcgaatgtccagtgtgagcagcttgaactcaatggtcggaagcgccgacactgaggaggtcaaccagctgaaagctgtgctgtacgatggcaaactatcgaatgccattgtgttcatgtacaatccggtggccaccgatggtcagttgtgtctgcagtcatcgcccaagggaaacgtttcatatttcgtgcacacgccgcatgcgctgatgttgcaggatgtgaaggccgtggtcacgcactcgatacactgcaccctcaattcgattggcggcatccaggtgctattcccgcttttctcgcagctggatatggcccacgagggtctgggcgacattaagcgggatcccacgctgtgctccaagctgctgggcttcatctgtgaactggtggaaacatcgcagacggtgcagcagcatatgatccagaaccggggattcctggtcatctcgttcatgctgcagcgctcctcccgcgaacacctgactctcgaagtcctgggatcattcctgaatctgaccaagtatctggtcacctgcctgtcggccaacagtgatctgctgctcaaacagctgctggatcacgtcctcttcaatccagccctgtggatatacacacccgccaatgtccaggcgcgactatactcctacttggccaccgagttcctctcggacacgcagatctacagcaatgtgaggagggtcagcacggtactgcagacagtgcacaccctaaagtactactactgggtggtcaatccacgggctaagagcggcatcattcccaagggactggatggacctcgtccggctcaaaaggacatcctggccatccgggcatacatcctgctgttcctgaagcagctcataatgatcggcaatggcgtgaaggaggacgagctgcagagcatactcaactatctgaccaccatgcacgaggacgagaacctgcacgacgtgctgcagatgctcatctcgctgatgtcggagcatcccagctccatggtacctgcctttgatgtgaagcacggcgtgcgcagcatcttcaagttgctggcggccgaaagtcagttgattcggcttcaggccctcaagctgctgggcttcttcctttcccgcagcacccacaaacgcaagtacgatgtgatgtcaccacacaatctgtacacccttttagcggagcgactgcttctctatgaggaatcactgtccctgcccacatacaatgttctctatgagatcatgacggagcacatctcgcagcagattctatacacacgccatccggaaccagagagtcactaccgtctggagaatccaatgatcctcaaggtggtggccaccctgatccggcaatcaaagcagacggaatcgctgatcgacgttaaaaagctattcctgcaggatatgaccctgttgtgcaatagcaatcgggagaaccggcgcacagtgctccagatgtccgtgtggcaggagtggctcattgcgatggcgtacattcatccaaagagcagcgaggagcagaagataagcgacatggtgtattccctattccgcatgctgctccaccatgccattaagcatgaatacggtggctggagagtttgggtagataccctggcaatcgtccactccaaggtgtcttacgaggagtttaagctccagtttgcccagatgtacgagcactacgagcgccagcgaacggacaatatcacagatcctgccctgcgtcaggctagacccatcagcacgatcagtggttgggagcgagaggagctgcatcagcagcagaacggtggatctgcagcagcagtggctaccaatcaaacggcagctgttaaaggttctgtttccattgcctcactggaagatgtgccaccggtggttgaggaagaggtggaggaactggagctggaggaagtagagattcaagagggtcctataaccgaagaaaccgaacaaaaatcggtgatagccaacatttccgacgtctacaatgagcagctcaaaaccgatgccacgtgcaatggcaatttggaggatgtcaaagaggaggagcctgtacaacagcaaatcggagacctggagaagcaaccagagccatctactcctttgggagcactcagggaaaccctacaacttggtgatgatatggatgtggaagaactggagctggctaccgccaaggatgccctcaatgcggaacagcatgtgtcgcgagttcttcaggcttccgaagcggcacttaacgattgcaaaatggcagtcgatgatgtcctgcaggagtcatcctccgtcctcaaggacgaggagatcgaactggccgtcaacgaggttgttcagggtgtgctcaataacgagaagaaaactcaatcccaggacaacaaggataacaaggaacagccgggcgaacaggatgtaaacgtcagtctcctaaacagcaagaatctgctcaacaataataataataacaataacaacagtccgagtccaacgcccacaacggcgactgcgacggcggagacggaagcggaaacagaagtcaatgccaatgagatcgtgagcagcacagaggcgcccaaggcggaaacggaaacgagcgtagcaccggaagtagaaacaccggaaacggccaagccaagccccattgtccccagccccgtattagcaaccaatcaaaagactgaagatgcagccaacaagctgaacaacaacgagaagctggccgagatcagcgccagtcccgagccacccattgtcgtggaaacgccagaagctgatcttcttcagctttccgattccgaaacaaaaccgaataaggaaaccgaagctgaagattcggtggcgctggccgttagagatattgtcgagcaactcatcgacaaggtcatcgatgccacggaagcggaatcggccagcgaaaccaaaacggaaacgaataataatgaaatacccaagaaggagaagcagacgtcagaagagcctgaggatgtggaaactgcagagactttggccgctgccgccaaggaaattgtccaagaggttgtggaagcagctctcgtaatggtccaagaggagagcactcaagagaagccagaaaagggggcgaactccgaagaggagaaaaacgaaattggcaaggaagagattcttctgcagctggaggaaaaaccagcgtctactgaagtgcaggaaaccaagatcgaaggagatctaaagaaaccagaagatccaaaaggtcacagctctgtagaaccaaagaccccgaaccttgaggaaccgaaaccccaggaaactgaacaacaaaagtcgcaggaggtcgccgaagaactacctcaaaaaccagaggagcaggtggtggccattgtcaaccaagtcctggacactctggtagacgatacggtcaaggcagtggcagccgagcaaaccactcaaacatcgccagcccccgaagagcaatcgccacaaatactggcaatggaatcaccagcaacgtcggtgcgggtcaaacccactgaggtggattccaccacccagactacgccgaagaacgaggctggatccagtctattggttgagcaggtgcagcaagtcctccaggaggatgacgcccagcaatcagccggcatgaccatcgaagatgaggattactctaatcagcaggcagctgcggcagttgaaaatgccaacagcagccaattggatgccaatcattatggtcccggtaatccagaatccaaacaacagcaacagcgctccaaatcgggatcgacccgacctatgttcagtccgggacctacacgtccgcccttccgaataccggaattcaagtggtcctacatccatcagcgattgctcagcgatgtcctcttttcgctggaaacggacattcaggtgtggcgcagtcattcgaccaaaagcgtcctggactttgtcaactccagcgagaatgcaatttttgtggtgaacacggtgcatttaatatcgcagctagcggataatctgattattgcctgcggaggattgctgcctcttttggccagcgccacgtcacccaattccgaattggatgtgctggagccaacgcaaggcatgcctttggaggtggccgtatctttcctgcagcgtctggtcaacatggcggatgtcctgatctttgccacatccctaaacttcggcgagttggaggcggagaagaacatgtccagtggcggcatactgcgtcagtgcctgcgattggtttgcacctgtgcggtaaggaattgcttggagtgcaaggagcgaacgcgttacaatgtgggcgccttggcgagagatgtcccgggtgcagcccatttgcaggccctcatccgcggagctcaagcatcgcccaagaacattgtcgagtcaataaccggccaattatcgcctgtcaaggatcccgagaagctgctccaggacatggacgtcaatcgcctgcgcgcagtcatctatcgcgatgtggaggagactaagcaggcgcagttcctctcgctggcgatagtgtacttcatatcggtgctgatggtgtccaagtatcgtgatatcctggagccgccggcagagccgcaaatccagcgtcaatcgccagtgctgcaacgcacggcaggcggcgaagccgccagtgcgcgtcctttgttcccccaatggtcgcatcatgtttacccgcaattcctgcccgaatcgcaccagaatcacaacagcaacatgcaacaccagcagcagcagcagcagcaacagcaacatcagcagcagcaacactactaccagcaacagcagcaacagcaggttgtccacaatcatagccatcatcacatgactgccgcttactaccaacagcagcaacaccagcaagttgcagcaggacagcagcaacattcgcccactcctctggccacacattcgaccagctcctcggccagttcgacggccacatctcagccagcgtcgagctcctcgctctccagcctggcatcccaaagtcagcagcaatcgcatcgccagttgcacaagcagcaacagcagcagcagcagcagcagcagcaacaacagccacattaccatccacatcagccgcactatggactgatcaatgggcaccagcaacatccgcagctaaatggtaaacattatgcggaaaatggatcgacagcgggataccatccgcattcgcatccacatccacacggtggttatatgcgaaatggtgatacgtcgacattgcaacagaatggtatgccggactatcaggcagtgggtctgatgaatggtcatggctctggtggaacgggtaataacaataactccagcctgatgaacaacatgcgaaatctgcgaaatggcggaggagctaactcatcatcttcgccaccgggaagccatcaagttatccaaggtgttgcaacagcgggagctgttaatgcaaatgctgctgttggtgttggcatgggcggagccgttggtgtgggtatggggggtgtggcaggtggtttggatggaggcgtggtctacaagacgagcgccataaataataattaccgctacaatggacgcaacgcatccgctggaacaggtggtcgtcaaatccaggatagtgactacgaaataattgtcgtcgatgagaacaatccatcggttttggcggataatgattcacattccagtggaccaccatccataaagagcgttgactcggatgtgggctccctgaacatgaactccacggaaaacgaagtgcccgaggtggagtcatccagcgagattctaatcgatgaccacaaaccgagtcactcgaacgacgaaagctggacggatgtgaatctcaatgaggatgctgccgttcaggcggcaagtgccggaatagttgtaggtttggtggataacagaggtaatgttatatccgacaaacacgatccgtcccatcacaaccaacaacagcagcagcaggcgggaattattggtcagcagcagcaacatggatcacttggtcattcggagcggggtgacaaacccgattcggagatttcggtggtgcgagtgcctgatggttatggtggtgctggttccggtggtggcgtgaattccggacaaggtcagggcgttccatccaatcagcgtcctcgtcccgaggagttgcccatgaaggcgcccgccttggtggcccaactgccgctgaccacaccttcgcgagaggccagtctcacccagaagctggaaatcgcattggggccagtgtgtccgctgctccgtgaaatcatggtggactttgcgccgttcctttcgaaaaccctagtcggctcccatggccaggaattgctgatggagggcaagggtctgacgacctttaagaactcgcattccgtcgtagagctggtcatgttgctctgctcccaggagtggcaaaatagcctacaaaagcacgcaggattagcctttattgagctaatcaatgagggtcgactgctttcgcacgccatgaaggatcacattgttcgggtggccaatgaggcggagttcatcctcaatagaatgcgagcggatgatgtcctcaagcatgccgactttgaatcgcaatgtgcacagacacttttggagcgcagggaggaggagcgaatgtgcgatcacttgataaccgccgcacgtcgcagagacaatgtgattgccagccgactgctggagaaggtacgaaacatcatgtgtaatcgccacggagcctggggtgattccagctccacatccagtggtggcgccatcgttggagcggtgcaaaagagtccctactggaagctggatgcctgggaggatgatgccagacgtcggaaacggatggtgcaaaatccgcgcggatcctcgcatccacaggccacactgaaggcggctttggaaaatggcggacctgaagatgccatcctgcagactcgcgacgagttccacacccaaatagccgtctcgcggactcatccatccggtcagcacaatggtgagctactggacgacgccgagctcttgattgaggatcgggagttggatctggatctcacgggtcccgtcaacattagcaccaaggcgagattgatagcccccggtctggtggcacccggcaccgtctcaataaccagcactgaaatgttctttgaggtggatgaagagcatcccgagttccagaagatcgatggcgaagttcttaagtactgtgaccatttgcacggcaaatggtacttctccgaagtgagggccatcttctcgaggcgttatctcctgcaaaatgtggccctcgagatctttttggccagccgtacgtccatattgtttgcctttcccgatcagcatacggtcaagaaggtaatcaaggccctgccccgtgtgggagtgggcatcaagtatggaataccgcagacgaggagggcctcaatgatgtcgccccgtcaactgatgcgcaattcgaacatgacccaaaagtggcagcgtcgcgagattagcaactttgagtatcttatgttcctgaacacgatcgccggcaggacgtacaacgatctaaatcagtatcccatctttccgtgggtgctgaccaactatgagtccaaggatttggatctcagcctgccgtcaaactacagggatctgtcgaaaccgattggcgccctgaatccatcgcgcagagcctatttcgaggagcgttacgagagctgggacagtgacaccataccgcccttccactatggtacgcattattccacggcagcatttacgctgaactggttggtgcgcgtggaaccgtttaccaccatgttcctggccctgcagggcggcaaatttgattatccggacaggctgttcagctcggtgtcgctgtcctggaagaattgccaacgtgatacatcggatgtgaaggaactgataccagaatggtatttcctgcccgaaatgttttacaattcatcaggctatcgactgggtcatcgcgaggatggtgccctagtggatgacattgaactaccaccgtgggccaagagccccgaagaattcgtccgcatcaatcgcatggcactggagtcggagttcgtgtcctgccagctgcaccagtggatcgatttgatctttggctacaagcaacgcggtcccgaggccattagggcaaccaacgtgttctactatttgacatatgagggcagcgttgacttggatggcgttttggatccggtgatgcgcgaagccgtcgagaatcaaatccgcaactttggccaaacacctagtcaactgctaatggaaccgcatccgccgcgcagctctgcgatgcatctatcgcctatgatgttcagtgcgatgccggaggatctctgccagatgctcaagttctatcagaactcaccagtcattcacatctcggccaacacctatccgcaactgtcgttgccatctgtggtcacggtaacggcgggtcatcagtttgcggtgaatcgatggaactgcaactacaccgcctccgtccagagtcccagctacgccgaatcgccccaatcgccgggttccaatcaaccactgaccatcgatccggttctggctgttcatggcaccaacaacaatagcaatgcggccagccgacgtcatttgggcgataactttagccagatgctaaagatacgctccaactgctttgttaccacagtggacagtcggttcctaatcgcatgcggattctgggacaacagtttccgcgtctttgccaccgaaacggcgaaaatcgtgcagattgtattcggtcactttggtgtggtaacgtgcatggcacgttccgagtgcaacatcacatcagactgctacatcgcctccggatcggcggactgcacggtgcttctgtggcactggaatgcccgaacccagagcattgtgggcgagggcgatgtgcccacaccacgggccaccttgacgggtcacgaacaggccgtgacatcggtggtgattagtgccgagttgggtctggttgtgtctggatcatcaaatggacccgtacttatccatacgacttttggcgacctgctgcgctcactggatccaccagcggagttccattccccggaactgataaccatgtcccgcgagggtttcattgtcatcaactacgataagggcaatgtggccgcctacaccatcaatggcaagaaactgcgccacgagacgcacaacgacaatctacagtgcatgctactgtcgcgcgatggtgaatacctgatgaccgccggtgatcgcggcatcgtggaggtgtggcgcaccttcaacctagcaccactttatgccttccccgcatgcaacgcgggcatccgatctttggctctcacccacgatcagaaataccttctggccggactttcgacgggctcgatcatagtattccacatcgacttcaatcgctggcaccacgagtaccagcagcgctactaagtttggacacttgaacattgcagtaatccacgactcgccagttaacaacggccaaggaagcggaagtgaaaagtgaaacagaaacggaaataaaatataaaaaacgatcgcaaagcaactacaaagtacttacaaaaacaaaaaaaaaacggcgcaaggaacggcgaatcggtttttttctatacagacctttacaactctaggctagtaagcaaaactatgtttttttttgtctagtattaattgtgcattagtgtgtgtttggccaatgaaagccagtcaaaaaaaaaaaattgacaaaaaaaaatagagaacggaacagaacagaaga

SEQ ID NO: 14784 - protein, 3614 aa, DROSOPHILA
MLGVLASYSITVKELKLLFGTMKATNGKWPRHSAKLLNVLRQMPHRNGPDVFFSFPGRKGSLLFNIALVVKFELLLIAFRSHFRFRFTFVQAMVLPPLAKWPYENGFTFTTWFRLDPINSVNIEREKPYLYCFKTSKGVGYTAHFVGNCLVLTSMKVKGKGFQHCVKYEFQPRKWYMIAIVYIYNRWTKSEIKCLVNGQLASSTEMAWFVSTNDPFDKCYIGATPELDEERVFCGQMSAIYLFSEALTTQQICAMHRLGPGYKSQFRFDNECYLNLPDNHKRVSHFQLLPATLGASALSGGSGSGTGSGTGNDASAAAAAAVAAGQQQQLQLQFQILAAEQEARAIDWSDEKLDLNAAFVKIRAVLTARNAVTLAGSSSTGTTAVATAAAAAAAAGAGAGTTAAATSAAAAAAATQNENDAAVGQQQHATHHHATAATGSADDPLGHLPTGNASSSSSSFEQLRRMSSVSSLNSMVGSADTEEVNQLKAVLYDGKLSNAIVFMYNPVATDGQLCLQSSPKGNVSYFVHTPHALMLQDVKAVVTHSIHCTLNSIGGIQVLFPLFSQLDMAHEGLGDIKRDPTLCSKLLGFICELVETSQTVQQHMIQNRGFLVISFMLQRSSREHLTLEVLGSFLNLTKYLVTCLSANSDLLLKQLLDHVLFNPALWIYTPANVQARLYSYLATEFLSDTQIYSNVRRVSTVLQTVHTLKYYYWVVNPRAKSGIIPKGLDGPRPAQKDILAIRAYILLFLKQLIMIGNGVKEDELQSILNYLTTMHEDENLHDVLQMLISLMSEHPSSMVPAFDVKHGVRSIFKLLAAESQLIRLQALKLLGFFLSRSTHKRKYDVMSPHNLYTLLAERLLLYEESLSLPTYNVLYEIMTEHISQQILYTRHPEPESHYRLENPMILKVVATLIRQSKQTESLIDVKKLFLQDMTLLCNSNRENRRTVLQMSVWQEWLIAMAYIHPKSSEEQKISDMVYSLFRMLLHHAIKHEYGGWRVWVDTLAIVHSKVSYEEFKLQFAQMYEHYERQRTDNITDPALRQARPISTISGWEREELHQQQNGGSAAAVATNQTAAVKGSVSIASLEDVPPVVEEEVEELELEEVEIQEGPITEETEQKSVIANISDVYNEQLKTDATCNGNLEDVKEEEPVQQQIGDLEKQPEPSTPLGALRETLQLGDDMDVEELELATAKDALNAEQHVSRVLQASEAALNDCKMAVDDVLQESSSVLKDEEIELAVNEVVQGVLNNEKKTQSQDNKDNKEQPGEQDVNVSLLNSKNLLNNNNNNNNNSPSPTPTTATATAETEAETEVNANEIVSSTEAPKAETETSVAPEVETPETAKPSPIVPSPVLATNQKTEDAANKLNNNEKLAEISASPEPPIVVETPEADLLQLSDSETKPNKETEAEDSVALAVRDIVEQLIDKVIDATEAESASETKTETNNNEIPKKEKQTSEEPEDVETAETLAAAAKEIVQEVVEAALVMVQEESTQEKPEKGANSEEEKNEIGKEEILLQLEEKPASTEVQETKIEGDLKKPEDPKGHSSVEPKTPNLEEPKPQETEQQKSQEVAEELPQKPEEQVVAIVNQVLDTLVDDTVKAVAAEQTTQTSPAPEEQSPQILAMESPATSVRVKPTEVDSTTQTTPKNEAGSSLLVEQVQQVLQEDDAQQSAGMTIEDEDYSNQQAAAAVENANSSQLDANHYGPGNPESKQQQQRSKSGSTRPMFSPGPTRPPFRIPEFKWSYIHQRLLSDVLFSLETDIQVWRSHSTKSVLDFVNSSENAIFVVNTVHLISQLADNLIIACGGLLPLLASATSPNSELDVLEPTQGMPLEVAVSFLQRLVNMADVLIFATSLNFGELEAEKNMSSGGILRQCLRLVCTCAVRNCLECKERTRYNVGALARDVPGAAHLQALIRGAQASPKNIVESITGQLSPVKDPEKLLQDMDVNRLRAVIYRDVEETKQAQFLSLAIVYFISVLMVSKYRDILEPPAEPQIQRQSPVLQRTAGGEAASARPLFPQWSHHVYPQFLPESHQNHNSNMQHQQQQQQQQQHQQQQHYYQQQQQQQVVHNHSHHHMTAAYYQQQQHQQVAAGQQQHSPTPLATHSTSSSASSTATSQPASSSSLSSLASQSQQQSHRQLHKQQQQQQQQQQQQQPHYHPHQPHYGLINGHQQHPQLNGKHYAENGSTAGYHPHSHPHPHGGYMRNGDTSTLQQNGMPDYQAVGLMNGHGSGGTGNNNNSSLMNNMRNLRNGGGANSSSSPPGSHQVIQGVATAGAVNANAAVGVGMGGAVGVGMGGVAGGLDGGVVYKTSAINNNYRYNGRNASAGTGGRQIQDSDYEIIVVDENNPSVLADNDSHSSGPPSIKSVDSDVGSLNMNSTENEVPEVESSSEILIDDHKPSHSNDESWTDVNLNEDAAVQAASAGIVVGLVDNRGNVISDKHDPSHHNQQQQQQAGIIGQQQQHGSLGHSERGDKPDSEISVVRVPDGYGGAGSGGGVNSGQGQGVPSNQRPRPEELPMKAPALVAQLPLTTPSREASLTQKLEIALGPVCPLLREIMVDFAPFLSKTLVGSHGQELLMEGKGLTTFKNSHSVVELVMLLCSQEWQNSLQKHAGLAFIELINEGRLLSHAMKDHIVRVANEAEFILNRMRADDVLKHADFESQCAQTLLERREEERMCDHLITAARRRDNVIASRLLEKVRNIMCNRHGAWGDSSSTSSGGAIVGAVQKSPYWKLDAWEDDARRRKRMVQNPRGSSHPQATLKAALENGGPEDAILQTRDEFHTQIAVSRTHPSGQHNGELLDDAELLIEDRELDLDLTGPVNISTKARLIAPGLVAPGTVSITSTEMFFEVDEEHPEFQKIDGEVLKYCDHLHGKWYFSEVRAIFSRRYLLQNVALEIFLASRTSILFAFPDQHTVKKVIKALPRVGVGIKYGIPQTRRASMMSPRQLMRNSNMTQKWQRREISNFEYLMFLNTIAGRTYNDLNQYPIFPWVLTNYESKDLDLSLPSNYRDLSKPIGALNPSRRAYFEERYESWDSDTIPPFHYGTHYSTAAFTLNWLVRVEPFTTMFLALQGGKFDYPDRLFSSVSLSWKNCQRDTSDVKELIPEWYFLPEMFYNSSGYRLGHREDGALVDDIELPPWAKSPEEFVRINRMALESEFVSCQLHQWIDLIFGYKQRGPEAIRATNVFYYLTYEGSVDLDGVLDPVMREAVENQIRNFGQTPSQLLMEPHPPRSSAMHLSPMMFSAMPEDLCQMLKFYQNSPVIHISANTYPQLSLPSVVTVTAGHQFAVNRWNCNYTASVQSPSYAESPQSPGSNQPLTIDPVLAVHGTNNNSNAASRRHLGDNFSQMLKIRSNCFVTTVDSRFLIACGFWDNSFRVFATETAKIVQIVFGHFGVVTCMARSECNITSDCYIASGSADCTVLLWHWNARTQSIVGEGDVPTPRATLTGHEQAVTSVVISAELGLVVSGSSNGPVLIHTTFGDLLRSLDPPAEFHSPELITMSREGFIVINYDKGNVAAYTINGKKLRHETHNDNLQCMLLSRDGEYLMTAGDRGIVEVWRTFNLAPLYAFPACNAGIRSLALTHDQKYLLAGLSTGSIIVFHIDFNRWHHEYQQRY

SEQ ID NO: 14785 - DNA, 5338 bp, DROSOPHILA
cgaggggtttgcgcacacgtacgcatgcacatgcaagcgtgtgtgtgtgtgtgtccgagtgcataattgagaaatgagtgttcggcgtgtcttcaattcgattttaattcggtgtaatttgatcaaagactcaccttcttcgcacaaattcgcggagaagaggcccacaaagaggcacaagattaggaatttcgcctgccgattcattgtggtcgttaaacgctgagtactcgaacgacaaagtcagcaaatctgcaaggcaaagaaaatacgtttgcgaagtggttggggattaacagataccgctggagtcagtattgcacaactggcgatgtcgccgagctccgatttcgctcacccacaaattaaagcaaggcgcaattaaggaatgaataacacgacacgaagaccagattcttttatgccaactcgatacttcgatgcatcccgatacatcgacagctgagccgtgctctgcagccctggcactcggcgcttatcagtagggggagaccgtaatgtagttgaaacgcctcgcatttggtgcaatataaaattatgatcataaatttgtccttatattttacttgatttattactataaaattgtatacccacctagcaatttatttgaaatatttgtaggttaaatctatataaacataagtaatttttcacagctaaatctttcttgataacgcaataactcattaatttaatttgatcgacttaaatgtaccatttatattattttattttagtgagtatatagtagtagtacagtataaatatgaagtttttataattatttatcaaattagagagtgcctctgttccaagtgtagaattcaggtgtgttgggggaatacccctaataaaattgctgtatcatcattatatcttgttgctgcagagcgaagaagacgtcagtgtcagtttaattccgtaatccaagaaacggtaacacttcacacttggtgattcagaattagtagatatttcttgtctgtttatggcccctgtgaagacaggactcgaattagcgtaaaggaacgaccaggagagcaccaagatgacctcgtacgtgcgtgccatgtacgactttaccggggagccgggctcctcggagctctccatcgcgactggcgacgtgctctcggtgacccggagcgatgtgggtgaaggctggtgggagggcaagaatgcccgtggccagattggcctcttcccggctgcgtacgtggaggtgatgtcggcggccgaagcccagaagctgagcgccagtggagcgacgtcggtgccacaggttccggatcccttcgcctcgccccctttgccgcgttacgatcagacggcggatgatgatggcagcaactgggatgatgaggacgattggagcgacgacaatgacacgtactcggaaattggtccaggtggccagaagtctgcgggacagtcggctcgcgctggcggattgtcgcattccaccagtgactacgataacaaacacctgcccatcgcgcccaacgatgatacccaatcactggcctccgtggctggtgggactggtgctgctggcaccgtcaaaaagggcatgttcgccaaaagttccgattcatatatactcggcttgtccagcaccaaggagaagatacccgaatgcgagatggcctacattacacaggtggaggactcgatctaccagtggacgcagaaccattcgccctactccgttgtggtggccagtcccaaaaaggagtccaaattcaaggggatgaagacgttcattgcctaccaactgacgcctagcttcaacaacatatccgtaagttggccaaccctgatatcgccgtgattaacaacacaatacgataaagctccgaccgttggcgcatgagtgtgtaactacgggtgcaatattttgttgataatatgtgtctgtgctgtgttcgctaccctctgccaagggtaatttgggctggttcatgtgctcacgagcagatggaatggaataaagaaagaccaatcctttgtttatcgaaactccgcactaattgccggccaacattttccaactgagttgaccttaaaagtgacccttttttgctgagaaaatttaaatggagatcatatccatttctttaattggtttgttttattaagactctgaaaattggctaaatttatctttttatttgttaaagttttaatactattcaaagctatagttcatttcttattagctacttaaatagtattttgataatttcgatcaactttattcattacaataatgagaagcataaatgctcgacattactttcgaactgaaatcaaagctctttgtaaagttctttcagtccattaaaatacacatacaaataggtagagcattacagagtcgtaaaagcacttaaaattcttctttgtgggggcaattctgaccaactggtagccagcggcactgcgatgattgcttgtgcttgcgaaccgccacggggaatgactcagcaacgagctctgaccccccgagctccgggctcctctttgcgtgacccaatcacaattaattggtcatatctaatctgggtttccctttcgttaggtgtcacgtcgctacaagcacttcgactggctgcacgaacgtttggtggacaagttttgcctgattccggtgccaccgctgccggacaagcagatctccggccgctatgaggagcaattcgtggagcatcgacgtgtgcagctgcaggagttcgtcgactgggtgtgccgccatccggtgatctccaaatgcgaggtctggtaccatttcctcacttgccgcgacgagaagatctggaagtcgggcaaacgcaaggcggaacgggatccctacatgggcgtcaactactgcctggccatctcgccgccggacaagaacctgctgcactctaaggtggacgcacaggtggagctgggcacccagttcatacacagcatggacgtggcagtacgcaacctgaacaatatatccaacgacatggccaagcgctccatgtcgcagagtaaaaaggagttccagcgcattggcgacggactctccgacctggccaaggcattggccatcgatgagcggcgtgcgcccacccgaaacgcggttccgctctccgagagcgtcggccgcatcggtggcatctttatcggtattggacaggcctttggcgaccagccaaagcatgattggattcccctctcggatcgacttcacatctacaggtgggttgacgtctctataagtgatgggaagcatagcacatttcgtttcattcatcagtaattgattagctgactgaaaatgggaattccacgacatgtgtcatttctatactagaagttacaataggcacatacatatatggctgaattactcacaattaaaaattttcgatagattactttcttgtaaattgtttttaaggtatcaagtttatttataaagaactcaaattgtttacttttaagcaatgaatcaatgtatagtttcgcgagaaaaatcgattgttggccaatagtttattttagattattgtggttcttacgctgactgacctttagtttaacaagaaatatatacatagatatacatatgtataatatatatataacttctagagaatgtggtaactttccgtcgctatttgtttatagaacgatctagaagcattatctaattcttactttcacttttccaaataggggcgttctcaactgctttccggacatcttctccacgcacaagggtgccatacagaagcgaaaggactgcgagaaattggccggcgagggcaggatgaataatccccagttgcacgacgttaaccggcgcacagatgtcgtctcctacacggtgctggccgagctgacccacttcaagagcgagcgggatacgcatttgaagcatacgcttaagaatttcattgccgaacagattaagttttaccagggcgtggtggcgcgcctgcaggaggccagccgtcagattgagtagattggcccttggcccatggcgacgacgactcatcgctgaagagatcgacggctgggagcacaaagaaaccgcaccgggcacacacttccacacagagatacatagctgaaaacattcgcacgcgcgcatttcaaatgccttcgaaaggaactcttactttaagcgtggttctaactaaatgttaaacagaaaaaatattacataatgttgtttgtaagtgaaaagttgcgtatttatacagaaattaacttttatatgcctattatacactgaacttgagatgcaaatataactatatttatacagaaccacttgtgcaagtgcatcatctgcatcataatcatcatatttggatgatccaaccaaacccgctgaattaaaagtctcggtggcgatttgctattctgttgcctttatcagcgaaattctctaaaagggttctctttatttttccattttcatgttcatgcttttgctttgccattttcgcgttaataagttttgtgattcttgtgtttgtttggtttttttgttttttttttttgtatctagaacataagtgttagattgcacatgttagggatgatgatttcataaataatcagcgtaataactagtaaaaacaaaaagaaacacatttcggaatggatacaaaatcggttgtttgccttttagcgctgcgctttgttttcgtttgatttttggcgaggtcataggtgaaggtgaagggtccaaggattgtcctggcatttttggaggatagtcggatgtgggtttccagggatgggaatcgggttgtggggggatcactaagtgtaatacatctagataaaaacgctatatacagacacacgagttaataataataataataatataacgcagcttgagataataataataataatagattttggttaacaataatacaataattaggtttttttttgcttttgccttccgctttcgcgctctacattattttttgtttacttgtcgtgttttttttttgttttttcctctttgttttcttttcatattttttgtgtttttcttttttgttaacaaactaccaataacaaatttttactaattcaatttaagtttttttttatgtttactgctctctgcttgtgtttaccaccttgtttgttgtttataaattattgttgtttgcgttccggttaccttgttgttgctgttcctgtgtattaaactaaaggaaaatcatggtttatcctttaccaattcctggcggtaaaacggcctatacgatgcctctaaatatatagttattattacacgcaa

SEQ ID NO: 14786 - DNA, 2078 bp, DROSOPHILA
tcttgtctgtttatggcccctgtgaagacaggactcgaattagcgtaaaggaacgaccaggagagcaccaagatgacctcgtacgtgcgtgccatgtacgactttaccggggagccgggctcctcggagctctccatcgcgactggcgacgtgctctcggtgacccggagcgatgtgggtgaaggctggtgggagggcaagaatgcccgtggccagattggcctcttcccggctgcgtacgtggaggtgatgtcggcggccgaagcccagaagctgagcgccagtggagcgacgtcggtgccacaggttccggatcccttcgcctcgccccctttgccgcgttacgatcagacggcggatgatgatggcagcaactgggatgatgaggacgattggagcgacgacaatgacacgtactcggaaattggtccaggtggccagaagtctgcgggacagtcggctcgcgctggcggattgtcgcattccaccagtgactacgataacaaacacctgcccatcgcgcccaacgatgatacccaatcactggcctccgtggctggtgggactggtgctgctggcaccgtcaaaaagggcatgttcgccaaaagttccgattcatatatactcggcttgtccagcaccaaggagaagatacccgaatgcgagatggcctacattacacaggtggaggactcgatctaccagtggacgcagaaccattcgccctactccgttgtggtggccagtcccaaaaaggagtccaaattcaaggggatgaagacgttcattgcctaccaactgacgcctagcttcaacaacatatccgtgtcacgtcgctacaagcacttcgactggctgcacgaacgtttggtggacaagttttgcctgattccggtgccaccgctgccggacaagcagatctccggccgctatgaggagcaattcgtggagcatcgacgtgtgcagctgcaggagttcgtcgactgggtgtgccgccatccggtgatctccaaatgcgaggtctggtaccatttcctcacttgccgcgacgagaagatctggaagtcgggcaaacgcaaggcggaacgggatccctacatgggcgtcaactactgcctggccatctcgccgccggacaagaacctgctgcactctaaggtggacgcacaggtggagctgggcacccagttcatacacagcatggacgtggcagtacgcaacctgaacaatatatccaacgacatggccaagcgctccatgtcgcagagtaaaaaggagttccagcgcattggcgacggactctccgacctggccaaggcattggccatcgatgagcggcgtgcgcccacccgaaacgcggttccgctctccgagagcgtcggccgcatcggtggcatctttatcggtattggacaggcctttggcgaccagccaaagcatgattggattcccctctcggatcgacttcacatctacaggggcgttctcaactgctttccggacatcttctccacgcacaagggtgccatacagaagcgaaaggactgcgagaaattggccggcgagggcaggatgaataatccccagttgcacgacgttaaccggcgcacagatgtcgtctcctacacggtgctggccgagctgacccacttcaagagcgagcgggatacgcatttgaagcatacgcttaagaatttcattgccgaacagattaagttttaccagggcgtggtggcgcgcctgcaggaggccagccgtcagattgagtagattggcccttggcccatggcgacgacgactcatcgctgaagagatcgacggctgggagcacaaagaaaccgcaccgggcacacacttccacacagagatacatagctgaaaacattcgcacgcgcgcatttcaaatgccttcgaaaggaactcttactttaagcgtggttctaactaaatgttaaacagaaaaaatattacataatgttgtttgtaagtgaaaagttgcgtatttatacagaaattaacttttatatgcctattatacactgaacttgagatgcaaatataactatatttatacagaa

SEQ ID NO: 14787 - protein, 565 aa, DROSOPHILA
MTSYVRAMYDFTGEPGSSELSIATGDVLSVTRSDVGEGWWEGKNARGQIGLFPAAYVEVMSAAEAQKLSASGATSVPQVPDPFASPPLPRYDQTADDDGSNWDDEDDWSDDNDTYSEIGPGGQKSAGQSARAGGLSHSTSDYDNKHLPIAPNDDTQSLASVAGGTGAAGTVKKGMFAKSSDSYILGLSSTKEKIPECEMAYITQVEDSIYQWTQNHSPYSVVVASPKKESKFKGMKTFIAYQLTPSFNNISVSRRYKHFDWLHERLVDKFCLIPVPPLPDKQISGRYEEQFVEHRRVQLQEFVDWVCRHPVISKCEVWYHFLTCRDEKIWKSGKRKAERDPYMGVNYCLAISPPDKNLLHSKVDAQVELGTQFIHSMDVAVRNLNNISNDMAKRSMSQSKKEFQRIGDGLSDLAKALAIDERRAPTRNAVPLSESVGRIGGIFIGIGQAFGDQPKHDWIPLSDRLHIYRGVLNCFPDIFSTHKGAIQKRKDCEKLAGEGRMNNPQLHDVNRRTDVVSYTVLAELTHFKSERDTHLKHTLKNFIAEQIKFYQGVVARLQEASRQIE

SEQ ID NO: 14788 - DNA, 3838 bp, DROSOPHILA
tgtagcagttgttaccctccgtcttgtagttgttggcctccttaagaggcgacagcttctcgcccagctcagcggacttttgattgcgctctagctcctggtccggtgcggtgccgtccagggagatggcctgcttctcgatcttggcctttggtctcttcttctccccgtccaactccttggacgcagccgtccagctcttcaccgcataggtgcccagtccaatggccaggggagttccaaggatgagcgccagctgccactttgtcagcttcatcgagccaatgttcagagtcatcgccattgagccggtctttttatggatgtgtgttatgtgtgatgaactgcaagaaaagagctgaatcagtttgggtgccgccacaaattgtgtaatactccgctggcttatcgctcagcgccttttgagcttgctaaatgccgggcggggggcacgtttctgcagtacctaacccccaacccaattgatttttcacacccccaactggccgggatgtgaatcagtgcagtcagcgaacggaacttacacttttttaaaactttacactgctgtgaatttggcaattgttaaacgtcgattgttctattttcagttagaactcgggaaacttagattctattgtatatcagcctgctgagcacacgacatcgaaaaacgatagacatcgataggtatggagtaataacggcactgcgaatgcttattatggaagaagaagatcagtgagagaataaattgtgtgaatagtttaaaaaaaaactaaggagttcgaatatgatgtatttgtaataaagcctgaatttatactttacgaatactgtacgaataaatattttagatctctatattacattctatcagaccgaaacagagttcttaaattttaaaatcggtttcatccactttacaaattgaaatacaaatgcattgtaatattacaatcaatgtatttataggaattcactagaatacacggacagcctatgggtgattctcctcatctgtgctggaagttggagctggagcaggagcagaagcggaactggtagtcgacttatcggtttccgtaaccaagatcttgtccagattctccagtttaactaggccctgggaatcggcgttgtggatgagatcacatattgtgggcgactccacgaccaggatatactggcacgtcttcggctcaagcaggtacatggatacagcggtgccgctgttcgttacaggtgtgcaggttaacttcacgtccacttcgcggggcactccaatctgttcgcagtgggttcccttgccataatggtgccagatggatgtcgtgaagccggaacggcgtgcacccttgtccgggttggcgttggaccaagcacgatgcgcttcctctgagaagtagccaagaaagagctccacttcgctggtcttatctttgtggaactgacgcacatgtcggccatagcagaactcgtacttccaccagccattgccctaaaaaaaagagtattattgaagcaaatgcatgggtcagctgcatgttattcctaccccagttaggcagttcttgcccgatataaagtccttaaggggcgtcagatcagtgatgggtgttggtccagtttcagaggctgctatagacagcaggagctgctgaaagtctccgtctaccttcaggtcaccattcctgaaatgctcgagcaggactttttccatatcaccgccatagttaagggtgaccaaatcgccatccgtcttgggccacagattttccgtagccttttccttgaaaaccagcagatccgcctcggattcaacccattcctttagctccgaccgcagcatgctcagcggtctgtgcggtttcgattcggagttgaaacattgtatggatagttccttggtctcttcggcatgaagggcgcgaattgggcacagcgccgaggaaagtataatggcctcataattgcacgaggatgtctccttgaaggagtagatatcgttcttaccatggggatagcacacataacgcaccattgtggtgcgaggagcgttaattatgtcgcacatagtgccatcgctgtattccatctcaaagtatggataccgagtgttgtcgatcttcaggcttttgtatttcggcttaacgcccgccttgatgtctgcttgccaggcttttgtcagtatttccatcttttcatcggtccatttgcccaggtagtactcctggaacttgacgttctttccttcgcgctcctcgtgatactgacgcacatggtggccatggcagatttcgtacgaccagtaggcctcgatgcggtacgtgcaagtcagggcggagaaaatgggctgcagcagagtaattggagctgcggaattcggaaattatgtataatccaatgggatgttagttgcaatgccaatttcttacacaactctggcttgtcggacttttcctcctctttttggtgttccaaagtgggaatcaggcagtcgtacttctccttatccggcgtgtagaatgttcgcagctgattgcccaagctctaaacagcattacttaaggaaatttgtttatgtctgcattaataaatttgtactcactggctgcacatctaaatccggcacttcgaaatcaattttatacaaaattgaatcgtcaaaatctttggcttcgtgggaaaccgctgcaattattaaattcagcagcaatgctattctcgcaattatcacgtaggacttgcccattttcgtgtttaaggcagcgatttctttacatgagtattttcgtgacaatatacaaatagttgcaaatgctacgtgttgtttttctcaaaaaaataaggaacatatgttgattgtgtgtgcggcactgtgaatggttactgcgaaagaagaagaaaatctgctggcctgcatgggcattttagcttggaaatagctaaatatcaaaaaataacagtcgcagtcgacggcacatacaaattttttgaattcaaattctttaaaatctaagttttgcatttaaatctagtcattgaatatttctcattaacaaaatacaaaattttatctcttaaacttaactgaatgttttcgtatttattgcagatttaatggtcattcatcataaaatcttttaagaatctgtatgaaaatccaaaataagtcgagaaactaaagccacgtcctccaacaaattaaactcagttcccagtttatcttcaacataattatattttccttaacaaatatcgcatatggtagtcagttccctatctcattcccagcgccggcgtgtccttttgcgccgtggaccagccgagctccttgtccttatcatgatccactggcaccttgtcgatggcatccagtataaactggatggaatgcgccgtccgtggcagccactccatgatacgagaggtggtcgagacgggcggtgtcgctgcatcgccgtcatccacgaaatccgcatctccgccggacaacgaacgaactccacccaggtaatccgtgtagtcgtaatcactggtcagcggattcaccttggagtagtaaatggcagcgaacgtcgagtagataatcagcagtgctgtgcccacctataagttttatatacatatttaaaacgattatattacacattgcactcatatactttatgtattttcactcacctgaaagacggcccagaacttgtaggagccctccgtgatgacgaaatcgtagtatcctttgagaggatcacccttgatatagcgaccctcgcccacatccgtgtcggccttgtcctccgcctcggcatcgcgtctttggcgcagtccacgc

SEQ ID NO: 14789 - DNA, 1661 bp, DROSOPHILA
aaaaacaacacgtagcatttgcaactatttgtatattgtcacgaaaatactcatgtaaagaaatcgctgccttaaacacgaaaatgggcaagtcctacgtgataattgcgagaatagcattgctgctgaatttaataattgcagcggtttcccacgaagccaaagattttgacgattcaattttgtataaaattgatttcgaagtgccggatttagatgtgcagccaagcttgggcaatcagctgcgaacattctacacgccggataaggagaagtacgactgcctgattcccactttggaacaccaaaaagaggaggaaaagtccgacaagccagagttgtctccaattactctgctgcagcccattttctccgccctgacttgcacgtaccgcatcgaggcctactggtcgtacgaaatctgccatggccaccatgtgcgtcagtatcacgaggagcgcgaaggaaagaacgtcaagttccaggagtactacctgggcaaatggaccgatgaaaagatggaaatactgacaaaagcctggcaagcagacatcaaggcgggcgttaagccgaaatacaaaagcctgaagatcgacaacactcggtatccatactttgagatggaatacagcgatggcactatgtgcgacataattaacgctcctcgcaccacaatggtgcgttatgtgtgctatccccatggtaagaacgatatctactccttcaaggagacatcctcgtgcaattatgaggccattatactttcctcggcgctgtgcccaattcgcgcccttcatgccgaagagaccaaggaactatccatacaatgtttcaactccgaatcgaaaccgcacagaccgctgagcatgctgcggtcggagctaaaggaatgggttgaatccgaggcggatctgctggttttcaaggaaaaggctacggaaaatctgtggcccaagacggatggcgatttggtcacccttaactatggcggtgatatggaaaaagtcctgctcgagcatttcaggaatggtgacctgaaggtagacggagactttcagcagctcctgctgtctatagcagcctctgaaactggaccaacacccatcactgatctgacgccccttaaggactttatatcgggcaagaactgcctaactgggggcaatggctggtggaagtacgagttctgctatggccgacatgtgcgtcagttccacaaagataagaccagcgaagtggagctctttcttggctacttctcagaggaagcgcatcgtgcttggtccaacgccaacccggacaagggtgcacgccgttccggcttcacgacatccatctggcaccattatggcaagggaacccactgcgaacagattggagtgccccgcgaagtggacgtgaagttaacctgcacacctgtaacgaacagcggcaccgctgtatccatgtacctgcttgagccgaagacgtgccagtatatcctggtcgtggagtcgcccacaatatgtgatctcatccacaacgccgattcccagggcctagttaaactggagaatctggacaagatcttggttacggaaaccgataagtcgactaccagttccgcttctgctcctgctccagctccaacttccagcacagatgaggagaatcacccatag

SEQ ID NO: 14790 - protein, 525 aa, DROSOPHILA
MGKSYVIIARIALLLNLIIAAVSHEAKDFDDSILYKIDFEVPDLDVQPSLGNQLRTFYTPDKEKYDCLIPTLEHQKEEEKSDKPELSPITLLQPIFSALTCTYRIEAYWSYEICHGHHVRQYHEEREGKNVKFQEYYLGKWTDEKMEILTKAWQADIKAGVKPKYKSLKIDNTRYPYFEMEYSDGTMCDIINAPRTTMVRYVCYPHGKNDIYSFKETSSCNYEAIILSSALCPIRALHAEETKELSIQCFNSESKPHRPLSMLRSELKEWVESEADLLVFKEKATENLWPKTDGDLVTLNYGGDMEKVLLEHFRNGDLKVDGDFQQLLLSIAASETGPTPITDLTPLKDFISGKNCLTGGNGWWKYEFCYGRHVRQFHKDKTSEVELFLGYFSEEAHRAWSNANPDKGARRSGFTTSIWHHYGKGTHCEQIGVPREVDVKLTCTPVTNSGTAVSMYLLEPKTCQYILVVESPTICDLIHNADSQGLVKLENLDKILVTETDKSTTSSASAPAPAPTSSTDEENHP

SEQ ID NO: 14791 - DNA, 4901 bp, DROSOPHILA
aaaaaaaaacaggaccaacggcacataatagtagtgtgtagttgtaaagttgtaaaatacgcacgtcgagaatgagagaacgaaaaatgagccgctgccctgtttttcttcaccttcttgttaccaactaatttgaactgcaccatttttcggtcaacaatttctagtgccggctaacactgatacaccaatacatacccaggactcgcaaaaacacgcggatggcgcataaattcgtgtgaattttattttaattccgcacttgcaatcgcatcccgtttcttttgtcgtccaccaagcacatttttacacacactcgcacacacgccgccaggaaccgttacttctgctttgcacgcccttcgccgttttccgtttctccttccgatgctgtttcgccaaactactcactcacggacgcattttttactattaaactattttgattgttgaaaatctttgcgactgtggtatggcaccacattaactcgaatttaaaattgagccttaaatttgagcggaccctgccgcggcaatacaaattaatagaacaaactaaattatcatcccgtgatatcttttattttggaattttagtcgggattttttgatattatggccacgccacggcgtgcaacgctgcttaaataacctttttcgcctggctctgtcgaaccaaccgcatgcaaccgctctcttgaacttaaaagcgctcatttgtttgaaacaacttgtgttcgacgattcctcgacaaaaaaagaaacagtcattaaaattcgcacaaatggctgaactatttaaataatttatttaatttgtattttcatttaaagttttggttttaaaataatttttatatttccattaattttattacttattggtaaagcattaacagcaaccaaatttttttcactggcgtaaacaactgtttccagtgaatggcaacaatacagctgttttgcacagagttgccactatgttcaaatgagttattaccagcggcggaaaacttgtatcaaatttataacaaaaatacaattctgcgttaataaaaatgcccggggacacggaaaacacaagcactgacaccaccaatgaacacatcgacctggccttgtaccggcagctggtcaaacaattcatagacatggtaagacaaaaaaaccaaaagccggcaagcagagcctgagtgcaaattcaattgcatttttagcgtcgctactccacagcgcttttttgggcagaaaaggtggccgtgcttggtggcctggaacccagggatatttactaccaggcgcagtgcatgtacctactgggggaataccatcgtgctgctcacacaatacagcatcacaagctagagaagaattcactgccatgttttaacctactactggaaagtctctatgcggccaaggagtttaccgaggcggccaatgtcatccagaatgtggaggtggaagtcatgaccacatcgctgatcaaccagcccgttgatgcaagcagtggctgctatctggaaagcaacagtgtctttggtggcgaggagaatcacagaaatgaactgctctcatccatttacctaatgaagggcaaagtttatgaggccctggacaatcgcggcatggcaatggacttctatgttcaggcccttcacaaatccatatactgctttgaggccctggaggcgctggttcaacacgaaatgctgatggcttgggaaggtgagcatgcacctactttctgaatacagtataatctcaacttaatcattgcagagtttgagctaatgcatcatttaccgctggcacaacaatccagcgaagctgatgccaagtttatactaaaactttatgaatctcgcctgaagaagtactacgagttgatttccgcacgcaatgctgaggagatgtcccccattgttaatcctgacatactccagtttatcaaggaatttacagctcgagtgcagcagagcgggtcgtcagacacacaaatgcccaaggtgagcgccgtcaaggtgccgcttacgcccagccagttcatgtcgcccgcacagaagtcagttctcctgatatttctaatatttagcgcattcttattgaagttgtatctttaagagtcctggaagatctaaaggcgcccacattttccctacaaactagtctctcaaaggcttcttccctcattgatgcttctcaccggtccatgtttgactcatccagtaggaggcgatcgcgtgatcatgacacggacacattaattcctatcgctgaatgtcttgatcgggtacaacgtagtactgacctaatggccgctgaggcggagaagtgtttctacgactgcgactacaaacagtgcctgaaaatactcaatgagtaagtgaagaacggcgtaaaagacttatattgatcaaaaatgtatttggttttgcttatcatatatagactccttaaggtggatccctttcataacactgcactgaccattcagattgcctgtctggtggaaaacggcgactttaatcggctattttacgtagcccataagctggtggaccgttatccggacaaagcgatctcttggtacgccgtgggctgctactacgacatgattggcaaaagtgatcctgcccggcgttatctctccaaggcaactgctttggaccgactttatggccccgcttggttagcttatggtcacagttttgccaatgagaatgagcacgagcaggcaatggcagcctattttaaggccacacaactgatgcgaggttgtcatctcccgttgctttacataggtgtggagtgcgggctaactaaaaatcttgagctagctgagaaatttttcctacaggctatgaatattgcgccgctggatgtatatgtacttcatgagcttggtgtgataaagtacgagtatgagttctttgacggtgccgccaccatttttcagtgcaccgtggacattgtgaaacagcgggccaagagcaacaacgaggagatctcgtcccgctgggaaccgctttttataaatctcggtcattcgctgcgcaaggtgcataagtacgaggaagctctatacaactttcaatatgtgagtatatttttgtactataggtatttgatatgtccttgatattcaacgattgactttcaggcacttctattaaagccgcaaagtcctactacatacacttcaataggatttatacatgctttgctaggaaatctagaccccgccatcgaagctttccacaagagtttggccctgaacagagactgcatagtgacgtctacgatccttaagagttgtatcgaagaccttatggacgactcggctactattgatgagatctgcagcgcggccttgcgagacgtggccaagaatatcacggccaacagtcgccgggtgttgaactcggacaagtttaatgggatgaagctaaagttcgatgaggaagaggagtttgccaactccgattccaacatggtagtggaaatgagcttcgatacctagaaaaaatgtataccaacttatgtcaatcattaatgttagctcctattgttagccagacaaacatatgccatgcacttgaacttaattcgtggccagaacaaatacagatgtttatgcttgtatattgtcgtctggctaatgagcaaagtcttgggatttttcagctctgtttttcccaccatcaatcgaagtcgccgccatgtgaataacattaagtatttaagaaaacgtaaaagtctcatttgaatcataattgtacggccagccaagagtggtcctctagccacgttctctcattcattttgtaacttgaataccattttataataattaaagtaagcttagcatatgcaagaagaactaaagttgtaatcacaagagtttgcttcctctaataagcacgtaccgcaaagttacaatcaaaacatgaactttttcaatgccatttggtaagatttctttggagtggaaacaaagttccgtagatacaaattatacaagtgtttcgcgtgtctttccactccaaatagccggcaaattattccggaatatcttccaacagcaggcggtataaatccataaaggcaagaggtcgccgcgatagtgcttatcggttatcgctttgggggcgacaaattacgtataaagtcgttaaactttggatatgcaaacaaactactgatacactttatggcaatagcgaagcagacagacacagtcccatatgtatagccgcttaacgagagtgctggccaaatatttaccaggccataaagcgtgtgacaaaccaagaagccagcgatgacgattgcagctccgttgaaggtttcctcgtggaaaacatgtttatgcatatgaaagccaccgccaccggcaaagtttgataagcgttggcggcggcgattatgctggaaaatatataaatcccgaccgggtcagaactcagcacagtttcattctagccattcaacaaagaggcaatccaatcacccaaacaaaagcaattacgattataacaatgagcctgaaagtttttctagtcctagctttggctctatcgtcctgccaagcgcttccctatgtatcctatgatgatgttgacgatacggaggtcatcgagctgcctggaaatggaatcgaggagataccacccactcttggcaaggatatcatcgacctgacaccattgggaacggcgctctttggcaaaccggatgaggagctaacggcgaatcgtgtgggtaactttagtgcggatgcagatgagatgaatcctgaggaactgggcagctatctggagggtgatatgctggtgccgcaaacggatctgattatgaaaaatggactgcccactcagtcctcccgttggccaaatggt

SEQ ID NO: 14792 - DNA, 2593 bp, DROSOPHILA
cagcggcggaaaacttgtatcaaatttataacaaaaatacaattctgcgttaataaaaatgcccggggacacggaaaacacaagcactgacaccaccaatgaacacatcgacctggccttgtaccggcagctggtcaaacaattcatagacatgcgtcgctactccacagcgcttttttgggcagaaaaggtggccgtgcttggtggcctggaacccagggatatttactaccaggcgcagtgcatgtacctactgggggaataccatcgtgctgctcacacaatacagcatcacaagctagagaagaattcactgccatgttttaacctactactggaaagtctctatgcggccaaggagtttaccgaggcggccaatgtcatccagaatgtggaggtggaagtcatgaccacatcgctgatcaaccagcccgttgatgcaagcagtggctgctatctggaaagcaacagtgtctttggtggcgaggagaatcacagaaatgaactgctctcatccatttacctaatgaagggcaaagtttatgaggccctggacaatcgcggcatggcaatggacttctatgttcaggcccttcacaaatccatatactgctttgaggccctggaggcgctggttcaacacgaaatgctgatggcttgggaagagtttgagctaatgcatcatttaccgctggcacaacaatccagcgaagctgatgccaagtttatactaaaactttatgaatctcgcctgaagaagtactacgagttgatttccgcacgcaatgctgaggagatgtcccccattgttaatcctgacatactccagtttatcaaggaatttacagctcgagtgcagcagagcgggtcgtcagacacacaaatgcccaaggtgagcgccgtcaaggtgccgcttacgcccagccagttcatgtcgcccgcacagaaagtcctggaagatctaaaggcgcccacattttccctacaaactagtctctcaaaggcttcttccctcattgatgcttctcaccggtccatgtttgactcatccagtaggaggcgatcgcgtgatcatgacacggacacattaattcctatcgctgaatgtcttgatcgggtacaacgtagtactgacctaatggccgctgaggcggagaagtgtttctacgactgcgactacaaacagtgcctgaaaatactcaatgaactccttaaggtggatccctttcataacactgcactgaccattcagattgcctgtctggtggaaaacggcgactttaatcggctattttacgtagcccataagctggtggaccgttatccggacaaagcgatctcttggtacgccgtgggctgctactacgacatgattggcaaaagtgatcctgcccggcgttatctctccaaggcaactgctttggaccgactttatggccccgcttggttagcttatggtcacagttttgccaatgagaatgagcacgagcaggcaatggcagcctattttaaggccacacaactgatgcgaggttgtcatctcccgttgctttacataggtgtggagtgcgggctaactaaaaatcttgagctagctgagaaatttttcctacaggctatgaatattgcgccgctggatgtatatgtacttcatgagcttggtgtgataaagtacgagtatgagttctttgacggtgccgccaccatttttcagtgcaccgtggacattgtgaaacagcgggccaagagcaacaacgaggagatctcgtcccgctgggaaccgctttttataaatctcggtcattcgctgcgcaaggtgcataagtacgaggaagctctatacaactttcaatatgcacttctattaaagccgcaaagtcctactacatacacttcaataggatttatacatgctttgctaggaaatctagaccccgccatcgaagctttccacaagagtttggccctgaacagagactgcatagtgacgtctacgatccttaagagttgtatcgaagaccttatggacgactcggctactattgatgagatctgcagcgcggccttgcgagacgtggccaagaatatcacggccaacagtcgccgggtgttgaactcggacaagtttaatgggatgaagctaaagttcgatgaggaagaggagtttgccaactccgattccaacatggtagtggaaatgagcttcgatacctagaaaaaatgtataccaacttatgtcaatcattaatgttagctcctattgttagccagacaaacatatgccatgcacttgaacttaattcgtggccagaacaaatacagatgtttatgcttgtatattgtcgtctggctaatgagcaaagtcttgggatttttcagctctgtttttcccaccatcaatcgaagtcgccgccatgtgaataacattaagtatttaagaaaacgtaaaagtctcatttgaatcataattgtacggccagccaagagtggtcctctagccacgttctctcattcattttgtaacttgaataccattttataataattaaagtaagcttagcatatgcaagaagaactaaagttgtaatcacaa

SEQ ID NO: 14793 - protein, 718 aa, DROSOPHILA
MPGDTENTSTDTTNEHIDLALYRQLVKQFIDMRRYSTALFWAEKVAVLGGLEPRDIYYQAQCMYLLGEYHRAAHTIQHHKLEKNSLPCFNLLLESLYAAKEFTEAANVIQNVEVEVMTTSLINQPVDASSGCYLESNSVFGGEENHRNELLSSIYLMKGKVYEALDNRGMAMDFYVQALHKSIYCFEALEALVQHEMLMAWEEFELMHHLPLAQQSSEADAKFILKLYESRLKKYYELISARNAEEMSPIVNPDILQFIKEFTARVQQSGSSDTQMPKVSAVKVPLTPSQFMSPAQKVLEDLKAPTFSLQTSLSKASSLIDASHRSMFDSSSRRRSRDHDTDTLIPIAECLDRVQRSTDLMAAEAEKCFYDCDYKQCLKILNELLKVDPFHNTALTIQIACLVENGDFNRLFYVAHKLVDRYPDKAISWYAVGCYYDMIGKSDPARRYLSKATALDRLYGPAWLAYGHSFANENEHEQAMAAYFKATQLMRGCHLPLLYIGVECGLTKNLELAEKFFLQAMNIAPLDVYVLHELGVIKYEYEFFDGAATIFQCTVDIVKQRAKSNNEEISSRWEPLFINLGHSLRKVHKYEEALYNFQYALLLKPQSPTTYTSIGFIHALLGNLDPAIEAFHKSLALNRDCIVTSTILKSCIEDLMDDSATIDEICSAALRDVAKNITANSRRVLNSDKFNGMKLKFDEEEEFANSDSNMVVEMSFDT

SEQ ID NO: 14794 - DNA, 4895 bp, DROSOPHILA
ctgattgggagcagcgttctgattggacagcggcccaggtaaaagccttcgctttggggcttctatcttcagtccgttcgcattgccgccgcacttgtgccgctccagcgtttctaattcagttgaccgtgctatttaaccgcattcagaattaactgccctgctacactgtgtgttttacgttgacaaaatcaatgaatttttgtatgtatatgttttggtttgctttcgatatttcgatatagttttctaaacaatcgccagcgcttaatgacggtaatcgtatgagcgtaatcgaaaattggggctgcagtcggaaatttccccaaataccgatagtaataacggtcatatttttaaaatttttcgaaatacgcagttttgtaaattttaatttaaatttaaagaatgctgaatatgttaatatgacttaaatttaaaattactaaaatgtagtttaaacgaatatatagaagaacaattaaaaaaaaacttaaaaaagaaatatgtgttttttaattacaaaaacaaatatcttattactttcccgcccgacttgccaatctgggctgtacaacactgatatttgtttaacggtaaattgttaagcttgtagtcgtagaagaaaattcaaacaacaaaaaataaccaagtttgttaattttttaaaaagtaaaaaaaaatttaagttacaagaccttaaattgattttataatatatatagtttgttgttttattctttattatatcccaaattccacttataatgttgcatttctttaaaatgaaatatgtctcgaataagtaatatttaggaaaaataatcaatttattaaatgtgcaggtaatcttaaattcctggacagcttgaaaaatcaattggggtcaccagttgcattgttttttccgcttttcattttagtaacttccttgttactacgagcaacgaaacaatcaatcaataatggccaatatcctttgatttttgcattggccaggatgcagaaatccggctccgacgagggagcctcggctgctggacagccggaggagacaccagcggctccctcccagaaatccattgattccggcaatggcgccgagtttcaaatcactttgaacgagtttctagagtttctaaaactatcctgtcatgtgaacgatatgattacgaaagccgacatgggaaaaccacacaatagggagccgataccgccgatggagggcagtgcggtgtcaaccaagagagctaccaagaaggacgagttcgactttgccgaactggcggacaatccactggtcaacgagctcctgggactgcgacgaccctcgaggagctccaacgagagtcgctctagtttgctacaggatgcgaaatccagtacattgcgctcggggcacagccaccacggccgctcttcccgtccagagtcgacctatcggggattgcatcccaagcttggcgagcaactggatgcggccattaatgagggagttctggactctgttctgtcctttatatgcccggtcccaatgcccacacaactccagaatggcaaaactaagcccaagcagctgcagcctccgaaagagcttctcacccagacatcggccactaccactccctatacgaatcccattccagcggcagctcctctcacctcgggagcatcgaaatccatgatggagataggccactcacatgggcctctgccggcagccactccctcggctccttgcctgcagcaggctcatcccggaggagatgctctacattcggatcagatcaccaacagcatggtgcgggctatgattaaggagccgattccgaagcctggtgcaatgaacgccggcagacgcaaatctctgctgctggtcaaggatagcaaacatgccaggcaggagcgaaaggagtaagtaccatgtatttacaggatatatatgtaactcaaattgtttaacaggccggaagtggtgatccacgtctgcgacgaggtgaagaacacctcgaaggacttcacctgcccgcagcatttgctggtgaccaaaatgggttactttgcggacgtgactgccggtcagagattggaggagatggacatatcggtgcactgcgacatccttatcttcgattggctgatgaagtggatcaagcacagtgcccaaagccaggatcttccggttcccactcagagcaccggtccccagttggatggcaacaatgtggtgcccattctggtgtcggccagctttctgcagatggaacctctactccttgagtgtttggccttttgtcatgcccatctcagcgaagttgtacgaacatccacgaatctgtcctgtctgaatgatgcattggtcagccgactggcggccatgttcacgaatctcgagctggaaatggtcagggataaaaaggagcgagtgacaccacgtctgtggaccaaattgattcagtccctctgcgaaccggatccggaagcgctaaggggacacttctacagcatgtccggtctgttccgttgctccaggtgcttcaattgcgtgaccaacactatgaaatcctatgtgagctgtgtgcccagcaacattcgactgaatcgctggggccaattgatgagccaccacgtgcgggacacgaactgggatcttaatgtctacatcgttcagctcttcaaggagctcaagtcttggcgcaaggtgtactggaagttatggggtcactgccattacctgtactgctgctcgtgcgaggctcattttccggtctatcagatgcactggtgtcgcttccatccggaggcacccaacttcctcggtcccgtgggcaatgctggacccgccggccgcttctcctgctgcggtcagcaggcattccgctacgaaacgctgccgggaccaaatgtatgtatatatatttccagaaactaatactactgcattgaatattcgttacttttttagggctgccaatttcgcgagcacagtgtcctggtggagacggatagggagcgtgccatcctggccattgctcagttggtgggcgagaactacgccttgtgcgagcagccaccattgaggattcaggaattggccgccgccggcgagatcagtcccagttggcagggtatctccctaacgccacaaagatgtcgccagggacttttgccccaactctgcatggacagtgtgctcaagagaggtgggtatgtgtgcttgaaggtaatgtgctccgtactcaaccctgctccatagtgaccaaccatcgtgtgagccgtcggatgcgaggatctcgctatcaaatggacaccagcaccgattcggagacgacgtccaccagcgaggatgatgctcgatgcctgcggccacgcatgcgtaacgttcacgatgacgacgaggactacagtacgagtagcgatggctgcgagtcggagcatcgtcctccaccaaggaaaactagaggcaaaaaatcacgaaagcggtaaggattttgaaatattgaatgtatatgaaataataattacctggaactgtttggccagtcccaccgatgtgtcgggtcgtttttggtccggcgagttgtcagcgcgcagcaaccaggatcatcagcgcgacttcgaggagaagatcatgaaacaggtcgccaattatgtgaccaaaaagaccggaacggatcagtgtctggtgcagaatgcccaaccgcttggtggctcctacgtgcgactcgagtccgaatggaaggagatgctcaagcaacgtcacagccatcacacgatccagggaaccaatgccactggcacatccgtggctcaaagcaacagcagctgcctgggatccgcacttgcaactggtggctcctccgtgtccgtcatgtccaagcaaaagcacaagtagaaattcgtattatatgtgtgaagtcattaacttattggattcgccagcaagcatcgtagaccaaatatttagtgacagattattagtcaaatatttagtgcaaaccataaatattcacattgaaatgtagaaaaattaaatgaatatgtagaagaatatatatataaatgattatatctggatgatatcgatgggttctattttactttcacgttttgtgcaattatttggtttgtaaatcaccaagaatttggattttatttcaattttggcattagacagagccttaaaaaatggattaaacaagaattatagtaatatacattacatatctcaatcaatctagggtaaattacattttccattcttcagtctaggcatgatttacaaaaatctattttaagtttgcagcctcttcttcacaaaccgaaatcataacttctcattagacatttattaatatttttatttatttatttattaacttaacgcaatttacaaagacttcgatttgttatacactcctcgccttcacatttattttgttttgtaaatcatttttgtttgtgttttagtttaagcttgaaatggaaaacaacagtactgtttaagaaagagcctgcaagtaaatgcgactgcacgtaaattaatgaaacagaacctgggttcaattacataacaccacatgctcaatggggcgcgggcatggcctttggctcaaccttctggtgacccacccagcggcaaagatgtgcacattaatcataataaaattatagaacagatcagagaattattataactacagggcaatgtaatttcgtggataagatttacgaaaatatattggtgcgtgagtgtacaagaatttagcgtgattgccgttctgaaggattgatgctgaagttggccggtgttcttggtgctgccaccgccgcgaatggtactgatgctagtgcggctgggacaagctaactgaacaggccctcggtggccttct

SEQ ID NO: 14795 - DNA, 2670 bp, DROSOPHILA
atgcagaaatccggctccgacgagggagcctcggctgctggacagccggaggagacaccagcggctccctcccagaaatccattgattccggcaatggcgccgagtttcaaatcactttgaacgagtttctagagtttctaaaactatcctgtcatgtgaacgatatgattacgaaagccgacatgggaaaaccacacaatagggagccgataccgccgatggagggcagtgcggtgtcaaccaagagagctaccaagaaggacgagttcgactttgccgaactggcggacaatccactggtcaacgagctcctgggactgcgacgaccctcgaggagctccaacgagagtcgctctagtttgctacaggatgcgaaatccagtacattgcgctcggggcacagccaccacggccgctcttcccgtccagagtcgacctatcggggattgcatcccaagcttggcgagcaactggatgcggccattaatgagggagttctggactctgttctgtcctttatatgcccggtcccaatgcccacacaactccagaatggcaaaactaagcccaagcagctgcagcctccgaaagagcttctcacccagacatcggccactaccactccctatacgaatcccattccagcggcagctcctctcacctcgggagcatcgaaatccatgatggagataggccactcacatgggcctctgccggcagccactccctcggctccttgcctgcagcaggctcatcccggaggagatgctctacattcggatcagatcaccaacagcatggtgcgggctatgattaaggagccgattccgaagcctggtgcaatgaacgccggcagacgcaaatctctgctgctggtcaaggatagcaaacatgccaggcaggagcgaaaggagccggaagtggtgatccacgtctgcgacgaggtgaagaacacctcgaaggacttcacctgcccgcagcatttgctggtgaccaaaatgggttactttgcggacgtgactgccggtcagagattggaggagatggacatatcggtgcactgcgacatccttatcttcgattggctgatgaagtggatcaagcacagtgcccaaagccaggatcttccggttcccactcagagcaccggtccccagttggatggcaacaatgtggtgcccattctggtgtcggccagctttctgcagatggaacctctactccttgagtgtttggccttttgtcatgcccatctcagcgaagttgtacgaacatccacgaatctgtcctgtctgaatgatgcattggtcagccgactggcggccatgttcacgaatctcgagctggaaatggtcagggataaaaaggagcgagtgacaccacgtctgtggaccaaattgattcagtccctctgcgaaccggatccggaagcgctaaggggacacttctacagcatgtccggtctgttccgttgctccaggtgcttcaattgcgtgaccaacactatgaaatcctatgtgagctgtgtgcccagcaacattcgactgaatcgctggggccaattgatgagccaccacgtgcgggacacgaactgggatcttaatgtctacatcgttcagctcttcaaggagctcaagtcttggcgcaaggtgtactggaagttatggggtcactgccattacctgtactgctgctcgtgcgaggctcattttccggtctatcagatgcactggtgtcgcttccatccggaggcacccaacttcctcggtcccgtgggcaatgctggacccgccggccgcttctcctgctgcggtcagcaggcattccgctacgaaacgctgccgggaccaaatggctgccaatttcgcgagcacagtgtcctggtggagacggatagggagcgtgccatcctggccattgctcagttggtgggcgagaactacgccttgtgcgagcagccaccattgaggattcaggaattggccgccgccggcgagatcagtcccagttggcagggtatctccctaacgccacaaagatgtcgccagggacttttgccccaactctgcatggacagtgtgctcaagagagtgaccaaccatcgtgtgagccgtcggatgcgaggatctcgctatcaaatggacaccagcaccgattcggagacgacgtccaccagcgaggatgatgctcgatgcctgcggccacgcatgcgtaacgttcacgatgacgacgaggactacagtacgagtagcgatggctgcgagtcggagcatcgtcctccaccaaggaaaactagaggcaaaaaatcacgaaagcgtcccaccgatgtgtcgggtcgtttttggtccggcgagttgtcagcgcgcagcaaccaggatcatcagcgcgacttcgaggagaagatcatgaaacaggtcgccaattatgtgaccaaaaagaccggaacggatcagtgtctggtgcagaatgcccaaccgcttggtggctcctacgtgcgactcgagtccgaatggaaggagatgctcaagcaacgtcacagccatcacacgatccagggaaccaatgccactggcacatccgtggctcaaagcaacagcagctgcctgggatccgcacttgcaactggtggctcctccgtgtccgtcatgtccaagcaaaagcacaagtag

SEQ ID NO: 14796 - protein, 889 aa, DROSOPHILA
MQKSGSDEGASAAGQPEETPAAPSQKSIDSGNGAEFQITLNEFLEFLKLSCHVNDMITKADMGKPHNREPIPPMEGSAVSTKRATKKDEFDFAELADNPLVNELLGLRRPSRSSNESRSSLLQDAKSSTLRSGHSHHGRSSRPESTYRGLHPKLGEQLDAAINEGVLDSVLSFICPVPMPTQLQNGKTKPKQLQPPKELLTQTSATTTPYTNPIPAAAPLTSGASKSMMEIGHSHGPLPAATPSAPCLQQAHPGGDALHSDQITNSMVRAMIKEPIPKPGAMNAGRRKSLLLVKDSKHARQERKEPEVVIHVCDEVKNTSKDFTCPQHLLVTKMGYFADVTAGQRLEEMDISVHCDILIFDWLMKWIKHSAQSQDLPVPTQSTGPQLDGNNVVPILVSASFLQMEPLLLECLAFCHAHLSEVVRTSTNLSCLNDALVSRLAAMFTNLELEMVRDKKERVTPRLWTKLIQSLCEPDPEALRGHFYSMSGLFRCSRCFNCVTNTMKSYVSCVPSNIRLNRWGQLMSHHVRDTNWDLNVYIVQLFKELKSWRKVYWKLWGHCHYLYCCSCEAHFPVYQMHWCRFHPEAPNFLGPVGNAGPAGRFSCCGQQAFRYETLPGPNGCQFREHSVLVETDRERAILAIAQLVGENYALCEQPPLRIQELAAAGEISPSWQGISLTPQRCRQGLLPQLCMDSVLKRVTNHRVSRRMRGSRYQMDTSTDSETTSTSEDDARCLRPRMRNVHDDDEDYSTSSDGCESEHRPPPRKTRGKKSRKRPTDVSGRFWSGELSARSNQDHQRDFEEKIMKQVANYVTKKTGTDQCLVQNAQPLGGSYVRLESEWKEMLKQRHSHHTIQGTNATGTSVAQSNSSCLGSALATGGSSVSVMSKQKHK

SEQ ID NO: 14797 - DNA, 3131 bp, DROSOPHILA
tatgtcaatcattaatgttagctcctattgttagccagacaaacatatgccatgcacttgaacttaattcgtggccagaacaaatacagatgtttatgcttgtatattgtcgtctggctaatgagcaaagtcttgggatttttcagctctgtttttcccaccatcaatcgaagtcgccgccatgtgaataacattaagtatttaagaaaacgtaaaagtctcatttgaatcataattgtacggccagccaagagtggtcctctagccacgttctctcattcattttgtaacttgaataccattttataataattaaagtaagcttagcatatgcaagaagaactaaagttgtaatcacaagagtttgcttcctctaataagcacgtaccgcaaagttacaatcaaaacatgaactttttcaatgccatttggtaagatttctttggagtggaaacaaagttccgtagatacaaattatacaagtgtttcgcgtgtctttccactccaaatagccggcaaattattccggaatatcttccaacagcaggcggtataaatccataaaggcaagaggtcgccgcgatagtgcttatcggttatcgctttgggggcgacaaattacgtataaagtcgttaaactttggatatgcaaacaaactactgatacactttatggcaatagcgaagcagacagacacagtcccatatgtatagccgcttaacgagagtgctggccaaatatttaccaggccataaagcgtgtgacaaaccaagaagccagcgatgacgattgcagctccgttgaaggtttcctcgtggaaaacatgtttatgcatatgaaagccaccgccaccggcaaagtttgataagcgttggcggcggcgattatgctggaaaatatataaatcccgaccgggtcagaactcagcacagtttcattctagccattcaacaaagaggcaatccaatcacccaaacaaaagcaattacgattataacaatgagcctgaaagtttttctagtcctagctttggctctatcgtcctgccaagcgcttccctatgtatcctatgatgatgttgacgatacggaggtcatcgagctgcctggaaatggaatcgaggagataccacccactcttggcaaggatatcatcgacctgacaccattgggaacggcgctctttggcaaaccggatgaggagctaacggcgaatcgtgtgggtaactttagtgcggatgcagatgagatgaatcctgaggaactgggcagctatctggagggtgatatgctggtgccgcaaacggatctgattatgaaaaatggactgcccactcagtcctcccgttggccaaatggtgtggtgccatatgaaatccgaggaaacttcaatgccagagatatggccacaattgaaaatgccattggtgagtaccatcgtcggacgtgcattcggtttgtgaagcgcagctctgagcgggactacatctccattcgcggcgacaactccggctgttggtcctccgttggtcgagtgggtggcaagcaggaggtgaacctacagtctcccggctgtctcagccgtccaggaaccgccatgcacgagctgatgcacgccctcggcttccttcatgaacagaaccgtatggagcgcgatggttatgtggccatccagtacaacaatgtccagtcctcggcgatgaacaacttcgaaaaggccgcccgcacggaagcctttggggtgccctacgactatggcagcgtgatgcactactccaagaacgccttctccatcaacggacagcccaccatactggccatggtgagtacaatggtaccaaaagtctcctgggtttaacttaacactcttcaatttctgcattcgcagcaagccaatggcgccgataaaatgggccagaggaatggtttctccgactacgatatccagaagctgaatcgtatgtacgattgtggcaccgtcaacgctgttccagttgccccaggattacccgcccctgctcctgctcctggcgcccctgctggcagtggcaatccgattgtagatagcttcatcggcggcctgatcagcggattgggattgggcgatgaaaagaaggagaccagttcatagacagaatctactagctcgtaccatccaccaacgctcgaaagtatttaacgcattccacatacaaaaaatctagcaccattacttaaacatgtagctaatatgtttagttgataattattaaaatttagcatgaattgaacaaacggatttaaatattcatcagttggaatcgactaattttaagctgtaggttaacttgggaatttattataattgcaaccgaaacatgagaatcagacgattctagtcctagatatctaaccggaaaatgttgcacatatgcatatttgaaaccgaaactaatgggaatgtgatttgcatcatatattccagaactacatgttgcgcttggcggccaggagacgggatcgcggcagacgacactggctgatgctgtgcaggcggtactgcatctccggctgcgtaaccttctcgtacagcttcttcttggcctcggcgaccgtgtggacaaggacaccatcgccgccctcatccatgttgaaggcttcaccctcggcgcactcgggacactgctgggtgagcacaatgtcattgagatcggtgggcagctcgcagatcttctcgatctgcttgaccacatagtcgaagcggccctcctcttggcgctccatcacataaacactagccgtcagctcctggacccttgtctcgagcagcttcaagaatcgattgacattaaccagattgacgtgggtgtggtcaccaaggagtttggtcagcggactggcatctatggaacacatctcgcagaccgtctccacgccctgtagaagattctccaaacgtgcatcgttgttttcccgcgccttgtgcagttccatgttggattcctgtttgttacgcaccttgttctccagactggaaatctgatccagttggtcctgcagcgtgttggagttatcctttttcaggttaactatatcctcaaacaggcgattcaccgaattattcagcatagttatgtggtagctcatttcgt

SEQ ID NO: 14798 - DNA, 1065 bp, DROSOPHILA
atgagcctgaaagtttttctagtcctagctttggctctatcgtcctgccaagcgcttccctatgtatcctatgatgatgttgacgatacggaggtcatcgagctgcctggaaatggaatcgaggagataccacccactcttggcaaggatatcatcgacctgacaccattgggaacggcgctctttggcaaaccggatgaggagctaacggcgaatcgtgtgggtaactttagtgcggatgcagatgagatgaatcctgaggaactgggcagctatctggagggtgatatgctggtgccgcaaacggatctgattatgaaaaatggactgcccactcagtcctcccgttggccaaatggtgtggtgccatatgaaatccgaggaaacttcaatgccagagatatggccacaattgaaaatgccattggtgagtaccatcgtcggacgtgcattcggtttgtgaagcgcagctctgagcgggactacatctccattcgcggcgacaactccggctgttggtcctccgttggtcgagtgggtggcaagcaggaggtgaacctacagtctcccggctgtctcagccgtccaggaaccgccatgcacgagctgatgcacgccctcggcttccttcatgaacagaaccgtatggagcgcgatggttatgtggccatccagtacaacaatgtccagtcctcggcgatgaacaacttcgaaaaggccgcccgcacggaagcctttggggtgccctacgactatggcagcgtgatgcactactccaagaacgccttctccatcaacggacagcccaccatactggccatgcaagccaatggcgccgataaaatgggccagaggaatggtttctccgactacgatatccagaagctgaatcgtatgtacgattgtggcaccgtcaacgctgttccagttgccccaggattacccgcccctgctcctgctcctggcgcccctgctggcagtggcaatccgattgtagatagcttcatcggcggcctgatcagcggattgggattgggcgatgaaaagaaggagaccagttcatag

SEQ ID NO: 14799 - protein, 354 aa, DROSOPHILA
MSLKVFLVLALALSSCQALPYVSYDDVDDTEVIELPGNGIEEIPPTLGKDIIDLTPLGTALFGKPDEELTANRVGNFSADADEMNPEELGSYLEGDMLVPQTDLIMKNGLPTQSSRWPNGVVPYEIRGNFNARDMATIENAIGEYHRRTCIRFVKRSSERDYISIRGDNSGCWSSVGRVGGKQEVNLQSPGCLSRPGTAMHELMHALGFLHEQNRMERDGYVAIQYNNVQSSAMNNFEKAARTEAFGVPYDYGSVMHYSKNAFSINGQPTILAMQANGADKMGQRNGFSDYDIQKLNRMYDCGTVNAVPVAPGLPAPAPAPGAPAGSGNPIVDSFIGGLISGLGLGDEKKETSS

SEQ ID NO: 14800 - DNA, 13056 bp, DROSOPHILA
cggctccattattcctgtacttgcaatgccatttgcgtcagtttttagggataaaacacggagaagagtacgtcagcatttggcattagttcatttatatttagccatgggcacgaaaataacaatttaacaaatcgcagtgtttttctgccgcgttcgtttgttcagcatcccaggtacagttgcacaaacaacaagaaaacatctcgggggcaacaaaagcaaagacgagcccccgtgaaatgaaaaagcaagaactgtacctcggatttgagatctagaaaacaaaacatttctgctggtatgtacaaagtacatagcagagatatttgcagagcaacaattatccagaaccaattgaaagcggcatacagcacagatacacagacaaaaaataaatttctaagtatgtgcacaaaaagagccgcatgcatataggttttaaaagtgggaaacgcagcattaaatgtttattattgtctcagatatttagggtttttttatgttattatgaataggaaaatatattgacagtcttatggggccttggaaatttattacccattgaaatatatatgaaacaattttattgcatatctgtgtgttattaagaaattactgagttgtgcagatgtaatgaaactaagccgcaattttgtcttactttagaaatgaggtctgtgattattttataaaaaaaattaatacttattattgaaattttcgctctgtgtgacgttttacatatctaaaattgcaacatgacgtattaaaaattctatggaaattacctatcgaaaacagctgattccgaaaaagagaggaaaagtgcgtcccgaaagcttttccttgtggcatcaacttaactgcgcatcatcccatccttggcgctctcttgcgctctctcgtaaaatatgggtgtgtgtgtgtgtgggcagccggtgcgtatgtgtaatagaagcatacgccatgttgtacggcgctcagttccattcgctcgctcaatttcgccagatgcggcgctctgcggctgctaatcccaatctcccattgtcgctgaaacagtgcacttttcaccttacctggcgcagaacagctgagtgcgtcttgttattaaacgggttgttcaatcaaatagtcggcgcttacctgtcgcagaaccttcatctcgggatttgttttgtgaataatgcccgataagaaatgcacggagaacgagcagaatggtgcgtagattatatcctagaattcacattcctttcatttctgtccgcgtgtgtgtgtgtggtgctaggttttcatggccaactgagggacatccgtggaacagctgtttacctcagccttaaaagctttttttttggcgcgcgcctgttggcatgccagcatattttatatgttaaaagaaaactcatagattttacgggtgtgacaacaagctgtttatctatcgaatataatcagtgtcaatttgcaatttatatttattctttttcatgttcatatgtaaatttaatagcaaaccgagccaaaatattataaatataaaattatttgcaatgaaataggtaaatccttgctttttgaaaggctaatattgtaatagtgcaatcccattaacttgtttagatttatactgagaaacacactaggaaattcgaattgattaatgaaaatatttaaaattataaaaacctatcgcaccgctttagtagtccggaatcgaaatcgatagctttccagttccctggagaacgcgtagaaaaatcacatggtctggatgggaatgggggataattggggtggctttacagaaagagcgagcgaaagagagcgcagtgcgcagcaaaaagcttcgttgctctcttttacgctcttgctttctcaccgataaggcgacgacgtcgacgtcgctgcccgcgttttggcgaaaaaaatttataataaaaacttctactcatagattgtgtgatgccagttcgctctgctaatccgatacgcgctagaagtttgatccgagacaatttggagaaacaggctggttgtctaaatttaatccactccagaatgccgaacatcaaagtgttttcgggcacctcgcatccggatttggcccagcggatagtcgatcgcctgggaatcgatctcggcaaggtggttacgaagaagttcagcaacttggagacctggtgagtagtcctgcaggagaatttccttcgcaaattgcgtgtgtgaccaccaacaagtgtttaacgacaacggacaaatgtgtttttaaagtgcgctaattgagtttgacgaaaaagtgtttggtctgcaaacacatgtgctcaaaaggtccttgacattcgctgaaggttgctggcgtttcgctgccacaatcaacaatgggaatctatgggaatttgtgattacctaaaactgaatgatttttcctgaatttttgtggcctgcctttggcttgatttctttttatttttattgatttaacaagtggactgtacaccgtctttgtcgctatagccgtgcgtctgtgtgtttgtgtgtgtttagtggcgttgtgctggtatgagtgagagtaacacacacaccaacatacacgtgaagcttggccaatgtcgcgtgcaattttcacaaaatttaaattaaatttttttaaatcttcctagacaagaaatgcaaagaaaccgaaaatgatttttattatatatttttaattaaattagcagctgtgtgtgcgtgtgtgtgtatgtctaaacttgcggcttgcacgctttttgcttccctctctctcgcacgcactcacacaggcgcaaaaccagccagtcagctgctgatgcaacaacaacaataaataacaaataaaggcgcccatagtttttaccccacccactagcaagcacccttttcagtttatttggtgtcaactttccatcggttttttccaattttaataaaattaaacaaaagccccataagcaaacaattagaggaggtgaaaaggtgaaagaaacaaacgaggcaaacggaagaaaaccgaaacgaaaatagaggttataatacgcgctaagctttctgacatgatacgcgctccgtcggtgtgcgtgtgtttttgttatgctcgcactcactcgcacgcacaccaaggtacgcggcagcggaaagaactaaaggcggagcagagtcgaggctaggatgccctgttccaggtgttatgctgtacaaggtaataggagtcgtgtcaacttacaattgtttacagtctgatttcttatagcttgatattttatgatcctaagaaccaattgaagaaagtacgacgttcgacgaataaatcgtaataaatattttgtgaaaaaagtttcttggttatagagttagacatagtcttatctctaaaaatgcattattttccaggttccagtttttaactttctaataattctttaccattaccgaaagttgagacccaatttggcttactcgcttttatagtcgacatacccgactaaaggagggtaccaaatgcctgcgagtagagaaccacaacatgactctgtcacgtttttcatttgctgactgaacggagagtaagagaacgctctcttagggtgagagcgaaaggggagcttgagcgccacacaagagtcggcatacgttgcaacgtcgactgcggcagcgacgcccccgcatggtgggcatttggactctctttggagcccattctcccgctctctctctcttgctctcagactaagtgtcagacccccacgtgtgcatagtggttgttgctccactgttgttgttgctacaatatttctgtttgcacttgtcggctttgtttttgttgtttatcccattctatcactctctggcattctctagaagcagcggtcagaaaatcatgttgaccgttaaatgcgctctttttgctccaatttacactaggtgttgttgttattgttgcggctggtgtaacggttgaacttttgcttttatatttttcatactttgtcttgattacttttgttgataatagcgaacgcacggcgttgatgataatgattctgttgttgtatttctactcgctattgttgttgtgtttggtggggcgacagggctagagatcaagtttttagtctagattatgctcaattgaagggcgccaagatgacatcgcgaaattttaaacgaatgagaggtaatattaagactgacaccaatttctttttgcctaattcgctgataatggaagatatgagcataacaagagaagagagaaatagagaaaaataccatttaagaactataaaaactggcgatacccctttgtttgggtcacacgtgattgttctttatttttaacttatcacttcgcaagcttaataagagtttttttatttattagtaatgctgtataataattttattgcaaccctcaaacaattaagtaatcaatacagaggtcataaaatgtacaagtatctaatgttttttatggccgccaactaagaaaacccccaaacgaccttcgccacaggccaagaacaatttcagtggcagttcataataatttttcaataaccccaaagtgaggctctaatttccaatttcgaaggttttgccacacgcaattctaaactgttctatacaccaccccctcccttgaacccaaccaaccacccactgaaaatgtcaattactaagcgttttttttttgttttccattttcgactctaaagtttgatcgataaggaatttgcgtgcttgtcttgtgaggtcgttgtcgtatcagcgagcttttgaaaggaaggggcccgagttaatagtgataaggagcgtataaatcaagtggaaccaacagaaactaagcgaaagcgatttagattccgcccagactgagataagcttagtgggagacaattggcaacagttttttgtacctacagtacggcttctatatatagcacgatatatttccttaatagtaaactaaactacctttttagaatacatgatctttgaaacaaagtaattaatctagataggtccaggttttcaattttataacatggctttaaatttgattatgtttaatctacgaaatccgtacgataagcgaataataaaagcgaaaaagaatgttctaatcaaacatttaggaaaataaacaaaatccaaaaaagtgtgaaactggtgatttcaattagagaagtacgactgtttttcgttttcatgctttatttattttttttttttgtatttttcgttttacatttcgactcacatgagtctgtcgtctgacttgcggacgaggaaagagataaaaatacgtaaaaaacaaaggaaaacgaaatgaattctggctgaaattctatttgacggtcggccaaagaaacagctgctggctgaactgttgctagtagttgttggcaatgcggcggtttttctggcccattgccaactgtcttgcccagcacaccttttttccaccatcccccacacaccctcccttcgatttttcccaagatttcccggcatgctaacaatgtcacggcggctagcggtgaaagtgttttcctacagccccggcaatctattcaaaaatgcatgatttaatgccaaaatgcatccggccaaggttgatgaaaccgctgcatttagccggtccacattgatcttcttgaccagagtcgagataaggaatacatatgtatgtataataataccaatcaatattccacaaaaaaaaaaaaaaccggtcaatggtatgttttatgataagcaaatgcagaaataggttatactagagtatgctacaaaaacgtgtcacgcgattgacgacaggctccatcaatttgtttatgacaaaagataaacccgaattattggacaaattaattactcggccccactggcacaggtcgttcaatcgatagtccgttgtgggctgatgctcccgtacgccatgtaattgaattaaccttcgatggtaaaacaaaagccaaaagaaccatgagaatgcaaaaaaaaaacaaaaaaaaaaaaaaaccaaaaaatgggcgtacaagccgagaatcagttgaaaccgtgttttattgactgcaattgattgtttatttaatttaatttttttcgtactgggaatagagtttgtttgtttagagctggcaaagttctctggcgacgtttaaacgaaatttaatattacttcggttattgacgtatgttttctatataatatttccgcctttaaaacgctgactgaactatcaagggtatcgagaatctatagtccaagttgctaactgagcttcgcaaacgccaaccgaaaccgaaacaaaacaaaacaaaaacgaagtgtaaacaaaataataaacgaagcggcgtcagtggccattgcaaatattgcgcatacgccatgtggtctgtgtgtgagtgtgtgtgtgtgtgtgcgagagagagaattagagaagttttcgattagattgccttgccttgcagtttctttacggcttcgtcaaaggtcaacaattgggaggagattatcaatagtttttgggggagggtgtgtgcatactgaaaaggatacttttagaactagtgaatttgggacgtgttgagaagtgcgagcttgagacaagcaatggaaatttccgcacactgaaggactgacgtctactctagacaaacatatgtgcatacatatgccatgaatgctacaaggttgtttgcaaaggaattatggttattacctaacgttatttgattgaaatctgattgaacttaagctctgtactttaatgaagcacacatctatttccgttcgattgcagtgatatttttagataatgcttgcgccagtgtttgttttccgatcaatctatccgttttcttgctgacattttcccacagtgcaccaccagcccacatccagcctatcaactgacccccgctctctgttttcttgcagtgtggaaattggggaatcggtgcgcggcgaggatgtgtacatcgtgcaatcgggatccggcgagatcaacgataacttgatggagctgctgatcatgatcaatgcgtgcaaaattgcctcagcctctcgtgttacagctgtgattccttgctttccatatgcccgccaagataaaaaagacaaggtaggtttgcctcaacacgatccggccgcccaaaaattacacggtattattctgggataaccctctaatcggatatcgcgagcaaagaaaagcaacgtaaacgattaattaattcttgattaataatctgactataacgttcaacgcaaagcccacacacggtttcaattggggaaaagtggaaacgaaaatgcgtaaacttttcccccgaatgtttttcccaaaactttagctcgattgttgagtgctatacacatacatatataaccgatctatttatcctatatatatatacttctttttttctgtgtgtgactgtgtgtttctaatgcattttgttaagcgatttgaatttctttttcaaaaaactgtttgcaacgaagctaagctgcagaaaacttatgtaaaaatacatgcacgcaattggaaaatgtggaaaatttcaaaaaaatttaaaaagaaatccttacgtattgttttgctttatttttctgccgtttgatattaaatactatgtttatttttttattatcatgcaatgctcgctctctctttctcgccaacctgcaactatttccctctaccgcgcgtgtgtgtgtgccttggtgtatttctctctctttctccgtttctctatcgatctctgtctctctttccccgtgaagttggcaggcagtgaggataatgcggaaagcaagaaactagccaagaaaaactacgattggaaatttagggtatttactatgtaacttttcaataactaaacgataactcatccgattcacactttatgttcttctctatatatacatatatattcaaaactaatgggaaattctttattaattttctttcgatccaaaaacgaaacacttaaaacctggaagggaatatcaaagcgggcaatctctcattctcagaaactcataactcacgaaggaaatttatttgtcgtccggcttaacaagtttcacgtttttctcggaaacagtcgctttttgtctaatttgcatgtccctcccacccttgtcctttatccctaaattcccatatatccgctaataaactaataataaagaaattcttggctaacccgcacaaaaaaaaaaaaaaattcggtaaaaatgcaatgattttattggagataaaacgaaaaaacaaatgaaaattttccacatacttacgttgcctttgtttgttttgtttcggcggttcttcattgcaacaacaaaataaaaaatactgaatatgaaatataaaatttacattatttaatctatttttaataacgaatgtctaataaatatttttgtttgtgctgttgtttcgactgcctgtttgtttgtctcgattgttgtgatcttgcacttttgttcttattgttcttatcggccctgacaacagcctccttttgggggcttaaaaaaaaaataatgttttccattccacttgattaagtttttccgttgctagataataatccactgtgacgtcattcgatcggatcggcagtggggggtaaatatatatacagtatatagacaatgaaccccgcgggtcaaacgcgcgaaatgcacaaatattttgttcaattttgtaatctgtaaacgaatgagttccttgacgttcaagataatcagttgaaatggaaggaaaatatatatatttatagtattattttgaaaatatgtacttgaattggcattgcaacccttgaatttgaattgagaacaacccccccccccccccaacaaaccaaaacaaaaacagaaaacccctccacttgactaacaaaatacggattacgactttgttaactttaatatgcacacaagggataaacaacccgatcgcaccttaattttaattttaaactctgaattattctgaactttttgtgttttcttctttttctttttatactctttgtctctctctctctcttgcatcaaaaatgcacccaaaaatgtaaaaaaaaaaacaaactaaattccaattctgttgagcttaggagttttcagccaaacaatatactgtgagtagttcggttagtttctgtatcccaggcattattatttttaatcttgctgcggaactgaactaaaaacccaaaataaaaaagaaaattttgctttagaattattattgtcttaagccttttgctttgttgcgttcattaatgttttcccctttgagttgatgaaaccagacgacacgatccaaacctaaacttccatatagtatataccaccgatgttttgttgcatgccgatgtttgttgctccgaatattaattataccaaaatccaaaaatccaaatcgaatgagaaaagcgaaaatgaaaaaaaataatttgaaaatggttcaattttctttgcacttgtttgcagcatcttaacaatcaatctatctgtgcatctgtatctctaaatcgaaatctatcatctgggtatatatatgtatatatcatctatatcgattggatctgaaaatcattatttcccaggttctgctgcaccgaatcacatttgtgtcctttgtgttgtcgcaactgaattctctattctgtccatgaattatgtatcttcttcatatgcaatctattggaacgttaacctctctttgttgatttctgtctctatacatatgtgttgttcggtccatgttcggttttgatttccatgatttactactactactacctcctcataaatgcctagccttaagatataaacttgactactagttgcgctaatggaaacctctcctttgcatctctttctacgctggccaatgcacagagtcgtgcgcccatctcggccaaattggtggccaacatgctgtccgttgctggagcggatcacatcatcaccatggatctgcacgcctcacagattcaggtaagtcagcccatcaacaacatttgtatatttatctttgatattagagtgatttcttatcgtgccgcgatttgtatatcagtcaattaattacgataaagaaagtgtgattttccttttgaacgacgtaacaatttttgtttattaaagtgaggccaaagaaatacttatttaagggtttaaaataaattacaaaatatacagtacaaatatatccaataacatcaggtttgaatcaaaagaggagctataatctcgccggatcctcggagaaccgacaaatccatccgttggctaaaaggtgccgaattcatagcagggttcggcggcgttgtcagaccgggattgaagctctgtgtcgtcatcggtcccgttgagggtgtgtggcatggatagaatgctcacggatagtttggccatttgatggagtagcacatcaatacgttcattcttgagggcaattgtgttctccaggtgattggccctctcggcaatggaattgatgtagcgtgacttctcggcactctccctaatagcattggcatagtgttcgtactcgaccactttcttggataccttcttcatctgtccattgaccacaacattcacgtccatggtcagcacctggggttgactatcgatcgagcaggagcgctcaatcacttgggtgagggatcggttgagagtgcgtaccacagaattcttgttagccaactttttaatcaccacgctcttttgggagctcgttggcgatacactcagacggggtcttggtctgggactagcgcacttggtcaccgcgattagttcatggaacagtgattctatggctcctggcgctgctgacgccagctgctccagctccgaacgtgtcaaattgatgcccaatttcttcagtaccttctgattgaaggtctgccagctctggagtttcagggccacgctgctcttgggcgtatagttgtgcagatccaccagacgaggatgactgcgcttgacaatctttgccaccggcaagacatcggagaatgaacgacgagctttcagatccaggataatgcgctgctcctttagccactggttcaggtcattctgctgttcgttctccatacttagcaaggggtgatttggggttttcggattttacctgctttttaatttctgttgtaaatttattttggcaagtctagcttccatatatgtttcagacaataatgcttgatagacatactctctgccaatgactggcagctgtgtcaactggcaatgactactggatggctaaattaaaactcattcgataaattctccattcgcagggcttctttgatataccagttgataatctctatgccgagccggcggtactcaagtggatcaaggagaacattcccgagtggaagaactcgatcattgtgtcgcccgatgctggcggtgccaagcggttagttgcagtctttaatccatatgcgtaatagattaataatgctattaatatttcactttaagtgtcacctcaattgccgatcgactgaacgtggagttcgctctgatacacaaggagcgcaagaaggccaacgaagtggcctctatggtactggtgggtgatgtcaaggacaagattgccattctggtcgatgacatggccgacacatgcggcaccattgtgcatgccgccgatcgcctggtggaggcgggagccaccaaggtgtatgctattctgacgcatggcattttctcgggtccggcgatctcgcggatcaataatgcctgtttcgaggcggtagtggtgaccaataccataccgcaggatggacacatgcgggactgtcccaaaatccaggtgggttatatcatatatatgcttctttagatgtgaatataatttttattttttttttctcagtgcattgatgtctcgatgatgttcgccgaggccgtcagaaggacacacaacggcgagagtgtctcgtatctcttctcaaatgttccatactaaacaacaaacaatcggcagaaaaaccagcaaacgtttgataaaacagcaaccagaacaccgttagcaagccacagcaaaatgaaaagagaaaaaaacccactttaatagcaatttgtaatgcaattttcaacacaaacacaacaattcgaaaccacatattttgccatcatcatcgttatatattttttatggattaactattgtaattaaagtaaatgcaaactcagtagatgggaaatcgtcattgtgtaattatactaaataggagcataaaaaataacactaaataccgcaaaaaacaatacaaaagtacacaaatgcaatgcctttccttttgtatagtaagttctttgtttaaacaaactttttgccgttttctgattttacaagttaacacgaacgataaattcccagttgattggtgtaaacattggcctgctcttagagagaaatttagatttgtagattaacaccgtagaagatatacactcaaaacacacacactcacacaaacacacccacatgtacacccacacacacaacaacaaaaaattgtaattttacactgtgcaacaactttttgatgattctttattgtaagctcataaagaaaaaaaaaacgcaaaatacttgcaagttcaaaacaaaatctagtaaaattaagtaaaacaaaaaaatacaattgaaaagaacatagcaaataggcgttaaaaaataataaacaaccaaacaaacaacaaaaataaaactaaagaaaaaaatacaaaaaaaaatattacagaaaactaatgcaagaatgtgtttttactggatttgtggaaggattagatattgtcctataaaaagggaatattttctttttcgtactcgaatataattgttataggatctttagtttacttttactttaaatgcttaaaccaactttaattaactgaaatcctggtcttataaaccatatcctcatcccttgtccaaagaaactcataatgattcaaac

SEQ ID NO: 14801 - DNA, 1356 bp, DROSOPHILA
ctcaatttcgccagatgcggcgctctgcggctgctaatcccaatctcccattgtcgctgaaacagtgcacttttcaccttacctggcgcagaacagctgagtgcgtcttgttattaaacgggttgttcaatcaaatagtcggcgcttacctgtcgcagaaccttcatctcgggatttgttttgtgaataatgcccgataagaaatgcacggagaacgagcagaatgattgtgtgatgccagttcgctctgctaatccgatacgcgctagaagtttgatccgagacaatttggagaaacaggctggttgtctaaatttaatccactccagaatgccgaacatcaaagtgttttcgggcacctcgcatccggatttggcccagcggatagtcgatcgcctgggaatcgatctcggcaaggtggttacgaagaagttcagcaacttggagacctgtgtggaaattggggaatcggtgcgcggcgaggatgtgtacatcgtgcaatcgggatccggcgagatcaacgataacttgatggagctgctgatcatgatcaatgcgtgcaaaattgcctcagcctctcgtgttacagctgtgattccttgctttccatatgcccgccaagataaaaaagacaagttggcaggcagtgaggataatgcggaaagcaagaaactagccaagaaaaactacgattggaaatttaggagtcgtgcgcccatctcggccaaattggtggccaacatgctgtccgttgctggagcggatcacatcatcaccatggatctgcacgcctcacagattcagggcttctttgatataccagttgataatctctatgccgagccggcggtactcaagtggatcaaggagaacattcccgagtggaagaactcgatcattgtgtcgcccgatgctggcggtgccaagcgtgtcacctcaattgccgatcgactgaacgtggagttcgctctgatacacaaggagcgcaagaaggccaacgaagtggcctctatggtactggtgggtgatgtcaaggacaagattgccattctggtcgatgacatggccgacacatgcggcaccattgtgcatgccgccgatcgcctggtggaggcgggagccaccaaggtgtatgctattctgacgcatggcattttctcgggtccggcgatctcgcggatcaataatgcctgtttcgaggcggtagtggtgaccaataccataccgcaggatggacacatgcgggactgtcccaaaatccagtgcattgatgtctcgatgatgttcgccgaggccgtcagaaggacacacaacggcgagagtgtctcgtatctcttctcaaatgttccatactaa

SEQ ID NO: 14802 - protein, 341 aa, DROSOPHILA
MPNIKVFSGTSHPDLAQRIVDRLGIDLGKVVTKKFSNLETCVEIGESVRGEDVYIVQSGSGEINDNLMELLIMINACKIASASRVTAVIPCFPYARQDKKDKLAGSEDNAESKKLAKKNYDWKFRSRAPISAKLVANMLSVAGADHIITMDLHASQIQGFFDIPVDNLYAEPAVLKWIKENIPEWKNSIIVSPDAGGAKRVTSIADRLNVEFALIHKERKKANEVASMVLVGDVKDKIAILVDDMADTCGTIVHAADRLVEAGATKVYAILTHGIFSGPAISRINNACFEAVVVTNTIPQDGHMRDCPKIQCIDVSMMFAEAVRRTHNGESVSYLFSNVPY

SEQ ID NO: 14803 - DNA, 2771 bp, DROSOPHILA
gctagcatagataatttgtttttagaatttaacatatatgtagatcaattttaatctttccaaagggccagcaagtattccaccctccagctcaaaaagactctcccagcatgtaaccaaattatattattgattgtactgtattttatatttattatgttatttttatattatactgttatatgtttattacccagaaaatgcgcgatatttttgaattcttggggcgacggtcaacactgctcgtgtcaagtttaccagcactgacaaagatctaaataagtggtaaataaatagaataattaagaaatgcgtgcggttatacaaagggttaaggctgccaaagtgacgggtatgcaggatcaaatagttaccatctatcatataattttatactgctcccctagtgttggatgagctggtgtcctccattggaccaggcctgtgcgtgctggtgggaatcaaggccagcgacaccgccaaggatgttgagtatctgtaggtaaattccactctggtgataaccaccttaggtttagaccacctaacacagcttaccattcaagtgtccggaaaatcttggctctccgtttattcgaggaggagggcaagcgttggcaaaagtccgtgaaggatctgaacctagaactgctgtgcgtctcgcagtttacactgtatcaccgccttaagggcaacaaaccggattttttggctgccatgaagggcgaggaggcgcaggagttgtacaatcaatttttggatcgcctaggtcaatcctacgatagcaccaagattaaaggtgagtgataggaacactccagctggtcatgttttaatctcacttactataatagatggcaaatttggagcatacatgcaagtgcacatagaaaacgatggacccgtaaccattaatttggagtcccccgaacaaaaggatactgacagagaagtggacaaatgatttgaaaatatataacaaccaaagacaacatttatgtaccacggggtttttatataatgtattttttagcagcaacttaaactaagaaaaaatcagcgtactcgtccttaggcttctaacatctcgagatcctcgacccccattccctcctccagtttcttctcgagttcgcgtgcatccacgtaggtgatcttctcctcgggcagatcctcctccatgagggcggcctcctctgccgcctcctgggcacgtcgttgcttcagccctgcggctggggagcgaatcagggacatgttgcgctgcacatccttgacgtccatctgaatctcgacctggcgacccttgcgcagtcgctccatgacaaagtggctggtgcgtttctccttaatctccgtcacccgcttgatggcctccagacccttctgccaggtctcgcggctgtatttcatgggcacgttgcggcgcttctcgaactcgaaactgggatcgatggccagctccttgccggcggccttgcggtacgccttcgtccatcctaccttgcggggattcttcttgcgcttaaaggccttgtgacacttgcctcggcagaacttgaagacctgcgacggaatatggcgaagcaatataaacatcggagcacatgtaaacaggaaagcaaatcgttcttaccttgcagtcatttcgcacgaattgcaccccgtggcccgggtatattttgctagagcaaaaatagcacgtttgaatgcgcattttcgcaatttacgacggataaattacgaaaacaaaacaaatgcgcaagctgctagcacgtgtgctgctgaagaagaagaaatatgaaaatgtatcggcagtcagcagtgcgaccagtcactgcttatcgataacactggctaacatggaaaatagctagatgtagacaaaaaatatccaagcaagaaatacgtataaattgcaagtgactgcgataccagttgacagttgtattgttttgataatttcaattaccttcggtctttgtccaaatcatgtttttcccagtatgtttacattaacttaaactgaattgttgcacctgtttctcgataacatcgcatgcgctcgccagtttgcaccagctgttgcgccagctgatcgcccgctcatgcgctggtcacaccgccagcatccaaacaaacagagcagcagaccaagaaaatcggacacatcaccgcgaacgagatcttgctgacgtgcgaccagatgcagagccctgccttcgcgtaccgggaacacgcagaacactcgccgcgcgccatgtacatgcgcgactggcgatcggccctgcggacgcccacgtaccggattgggaatcggacggtgcgctttaactatcacttcgcccttctgattgtttgcgccttcgtactcgtcctactcttctactttgcgcgccagggatcgcactcctcctccgacggctactggctgcgccgcagttacacggatgcccggagtctggacaatggtggtccagtggtccaggcctacaatgccacatatccgctcacgtcacccatggtgctgcgtggcggtgtgataaactaccggatagccatgattgccgatctggacaccagttccaaggtgagcaagggcgatgggagcagcacgtggcgtagctacctgaagaagggctaccttacctacacggtggccaggtcagagatccagattagctgggatgacggggcgccgatagtcctggaatcagcatttgcccttaagggccgcggaatggagctatctgagctagtcaccttcaacg

SEQ ID NO: 14804 - DNA, 701 bp, DROSOPHILA
agcagcttgcgcatttgttttgttttcgtaatttatccgtcgtaaattgcgaaaatgcgcattcaaacgtgctatttttgctctagcaaaatatacccgggccacggggtgcaattcgtgcgaaatgactgcaaggtcttcaagttctgccgaggcaagtgtcacaaggcctttaagcgcaagaagaatccccgcaaggtaggatggacgaaggcgtaccgcaaggccgccggcaaggagctggccatcgatcccagtttcgagttcgagaagcgccgcaacgtgcccatgaaatacagccgcgagacctggcagaagggtctggaggccatcaagcgggtgacggagattaaggagaaacgcaccagccactttgtcatggagcgactgcgcaagggtcgccaggtcgagattcagatggacgtcaaggatgtgcagcgcaacatgtccctgattcgctccccagccgcagggctgaagcaacgacgtgcccaggaggcggcagaggaggccgccctcatggaggaggatctgcccgaggagaagatcacctacgtggatgcacgcgaactcgagaagaaactggaggagggaatgggggtcgaggatctcgagatgttagaagcctaaggacgagtacgctgattttttcttagtttaagttgctgctaaaaaatacattatataaaaaccccgtggta

SEQ ID NO: 14805 - protein, 191 aa, DROSOPHILA
MRIQTCYFCSSKIYPGHGVQFVRNDCKVFKFCRGKCHKAFKRKKNPRKVGWTKAYRKAAGKELAIDPSFEFEKRRNVPMKYSRETWQKGLEAIKRVTEIKEKRTSHFVMERLRKGRQVEIQMDVKDVQRNMSLIRSPAAGLKQRRAQEAAEEAALMEEDLPEEKITYVDARELEKKLEEGMGVEDLEMLEA

SEQ ID NO: 14806 - DNA, 14449 bp, DROSOPHILA; identical to SEQ ID NO: 14779

SEQ ID NO: 14807 - DNA, 2459 bp, DROSOPHILA
ctggccacgtttctatggcttaaatattcaaccaagttcgtctaaatttcggcgcgtcagcgagtgaactactttgtaaaactaggtggaactttgcaaagttaatttcggtgctcccaaaaattctaatccattaaacggcgcgcggccgtcaactctttcccaactttgtgacttttccgaaactatttaaaaatttattcaagtttgtctgacccaatcaacaatgagtgcaaccataatgaaggcgaagaggtcgtggaaagtgctggtctagggtggaaaaagcccagcatcgtcgaaagcagcaataattaaacccaagttattttacactctttgaacgattgttgagcaagtgcaaatgtcggggacacttgcagcgaggtcaacgtcccggcagcgtcgcatccggagccggagctcatcatcagctgccaccgggatcagcgggatcagtgccatcggaataatctccagagggaaagcaaagttatcacccgatcacaatcatcggcgtcgaccgcgcggcatgctccagtgcatcaactgaagcagcagcaatctctgcccacacctctaacacagcagcccagccacaattcgcaccacaatccccagacccccaagtccgtctccattctcgtctacaagaccttgaacacggtcttcaagagcagtcgcaagatcatcgttcgtgtgtgtgaggtggccagcgccaagaagtccttcaccatgttcaagttcaacaaggccgctcagcagcagcggatcgacaatcggaacagtgccgtcacaggacacgatcccttcgtccgaccaccagtgcccgaaaagaaagtgaggaacattatgaagaagctgcacaaggcgaacggcctgaaacgctccaactcggcgatcgagttcgatgtctcggccctgacagctgccaatcgccgacagatctatagtagcaatcggtcggcgagctcggagcaagataactcagatctatccgagcactcggagaaatcgccgctggttagcgcgaggttagacaatctagctaggctcttctttagcaagtcgatgccagcggaaaccggaagtagagataccatagattcagtactgacaacaaggcccaacatcaagtatcagtactccgccttggacagtggcaatgggatcgtggagcgaagtccccgggagcgagctcagagggaaaaggcactgaatgccactcaggaatggattcaaggtgccaatgggcgctacgaagtgattgcccacctggatgagatcggttcgaggcatggcaagaactggtttcttgtcacagatgcctcggtacgcacggatcgtctacagactctgctacctctgccccccgattgtgtggccttcgaggatctcccgcccaacgaatgcgccagggaaatactcatggagctcctgggctcgctgcatcatccgtacatatatcccgttctggacttgggctttttgcgcaacagctcgtataactacgcctgcctggtgacgccctttaactcgcggggcagtcttaaagatctcatctataaggcgcagtggaatgagccgtgggccaggaagtacacgcgtaagccaaatggcttaccggtgagccaggtgcagcgcctgggacgacagattctggaggcactgctcttcctgaaggagcgcggttttccgcttcacggtcacctgcacagcggcaatgtcatcctgcagaacggggcagccaggttatcgggcctggagaacggcctcctgggcctcagttcgcgcattaacgccgtcatgtggtcccgctcggtcaccgagatcgagaacgtggacatcgtctgctttggccacctgctctacgagatgtgcacgggccaggagctgacaacccccaagccgtccatgcgggtgctcgagatggagctgcagcactatccacaaattggccagacaagaaaacaaattctggagatattaggtctaatctttgagccgcctagcggtgtctgcccctccgttgaggacttagtcctttgcgatctgtttcgcagcatcgatttgcgcgagcttcgcggtccctgtttcagtacaattaagccgagcctcagcaggtccaccttgaacctgctgcaagcggtaaagaagcgccaatgtgcctccctgggccattccctcagtgaggccaactcgccctgtacgcccccttcgacgccgcacgatcgacgaacaggtgttctgcctgcgccctatgaagtctttcgtatgtactaaaccaatccaaaacgaaccgaaccaaaaccaaagaaatccgaacccgaacccaaaaccaacaatgaacaactcacaaagaatatctcacaattcaaatttacaaaacgaatatcgtgtgaaataaaacccaaatgaatacctgaataaaattaaataaaatcaatatacaaaccgat

SEQ ID NO: 14808 - protein, 515 aa, DROSOPHILA; identical to SEQ ID NO: 14781

SEQ ID NO: 14809 - DNA, 8898 bp, DROSOPHILA
tgcgacagagagcggcgatatggaactgaaacgactgcaatgtttttatattccggcaacgcatttcgcataaattacaaattacacagcataagtgaatgcaagtgcaggggcggcagtcaaatggccagctgcacccagaaaaagggcaataagattcgggataacaaaacttgatggcgttcccgattttcccggccaagggagcgtatatgtacacataaaaaaaaaaaacttaaccagccttgcataacgaaacacgtgcaataaaaatatggctgattgtcaacctctgctgcaacttaattgctgccgcagaggtaaaactgaaaaacataaaagggggcgacaagtgcagcaagcgaaaaaaaagaactcaaagagcgcatgcgcgccgctctcccactctctctccctctctccactgcgctggaatcttacaactcgtgtaggtgagccggatttttatgaatgaatgcgcctgtgtgcgtgactgcatgatgccattgcagcggagaactagtagaaaaaacttcacatttcagcagttggaaaacacatggccaacaggccaactcaattggccagcagctgtccttaaattgtcagcaaatagggcatttaatgcccattacaggaaaattatagctaaaatggtcaagctgtgatgaaataaacataaatattatattttatgatttcatcagattttaagcattatttttttaatttgtgttaggtggaactacaaagctaagaataattgaggatttctaggtaaaacttatattcttaaaaccatttaataattttcttgttttcttttatttgtagtaacattttgaaattggcgccaaacgtgttactttacagtgctgtgcaacagctaaatgtcagcattctctgcaacgcgttagcacatttctgagacgtttgcagatttttggcggcaacaagttatttacatttatttattttatttctgctaaacagcacggaaatgtccgactccagcaaaggcaaagtgctgcaaaatacgggtaaattcgtcagcgagaatcgcacagaagggtgagtggtcaaagttcgtgaatttcacgctgaacaagatattttccaatcttatccacagcgacgacttcttcaatgaggcgggctatcgtcaatcccgggagaacgataaaatcgactcgaaatatggcttcgatcgggttaaggacagccaggagcggacgggctacctcatcaacatgcattcggtaagttaggaagcccataaaacgttgaaaatcatgtccaataatggctatgccaattgcagaacgaagttttggatgaggacagaagattgattgctgccttggacctgttcttcatccaaatggatggttcccgcttcaaatgcacggtggcctatcagccatatttactcatccgaccagaggataatatgcatctggaagtggcgcgatttctgggtcgcaagtattccggccagatttctggactggagcacataaccaaagaagatttggatctgcccaatcatctatccggtttgcagcagcagtacataaaactttcgtttctcaatcagacagccatgaccaaggttagaagggaactcatgtccgcggtgaagagaaatcaggagcgacagaaatccaacacatactacatgcaaatgctggccacctcgctggcccaatcctccgcaggttccgaggatgccacattgggtaagaggcagcaggattacatggattgtattgtggacataagggagcatgatgtgccttaccacgtcagagtgtccatcgatttgcgcatcttttgtggacagtggtacaatatcaggtgcagaagtggcgtggaattgcctacgatcacctgccgaccggatattctggacagacccgagcccgtggtcctggcctttgatatagaaaccactaagctgccccttaagtttcccgatgcccagacggatcaggttatgatgatctcgtacatgatcgatggtcagggttatctgataaccaatcgtgagattatatcatccaatgtggacgattttgagtacactcccaagccggaattcgagggtaactttatagtattcaacgaagagaacgagatgcagctgctccagcgcttcttcgatcacatcatggaggtgcgtccccacatcattgttacatacaacggcgacttcttcgattggcccttcgtggagacgcgtgctgcagtgtacgatctggacatgaagcaagagattggcttctccaagctacgggatggcaattatctaagtcgccctgccatacacatggattgcctatgttgggtgaaacgagattcttatttacctgttggatctcaaggcttaaaggcggtggccaaggctaaattacgctatgatcctgtggaactcgatccggaggatatgtgccgcatggccgtggaacagccccaagtgctggccaattactctgtatccgatgcggtggccacatactatctgtacatgaagtatgtgcatccatttatcttcgccctaaatacgattattcccatggaacccgatgagatcctaagaaagggttccggcacactctgtgaaacgttgctgatggtggaggcttaccatgcccagattgtgtatcccaacaagcatcagagtgagctgaataagctctccaacgagggacacgtactggattcggaaacctatgtgggtggtcatgtggaggctttggaatcgggtgttttccgggcggacataccatgccgttttcgtctagatcctgctatggtcaagcaactgcaggagcaggttgatgcagttctgcgccacgctatcgaagtggaggaaggcataccgctcgagaaggtcttgaatctggatgaagtgcggcaggagattgtgcaggggctacagggtctgcacgatatacccaatcgcttggagcagccggtcatctatcacttggatgtgggtgccatgtaccccaacattattttgaccaatcgcctgcagccctcggcaatggttagtgacttagattgtgccgcctgtgacttcaacaagccaggagttcggtgcaaacgttccatggactggttgtggcgcggcgagatgttgcccgcctccaggaacgagtttcagcgcattcagcagcagctggagaccgagaagtttccaccccttttccctggcggaccacagcgagcctttcacgagctctccaaggaggatcaggcggcgtacgagaagaaacgtctgacggattactgccgcaaggcttacaagaagaccaagctaaccaaattggaaacgcgcacttcgaccatctgccagaaggagaacagcttctatgtggacacggtgcgagcttttcgcgatcgtcgctacgagtacaaaggactaaccaaagtggcaaaagcatcggtgaatgctgcggtggcttcgggagacgcggcagagatcaaggcagccaagggcagggaggtgctctacgattccctgcagttggcccacaagtgcatcctgaactccttctatggctacgtgatgaggagaggagcccgttggcattccatgcctatggccggcattgtgtgcctcacgggctcgaatattatcaccaaggcgagggaaattatcgagcgagttggtcgaccactcgaattggacactgatggtatatggtgcatattgcctggctcctttccgcaggagtttaccattcacacgagccatgagaagaaaaagaagattaacatatcatatccgaatgcagtgctaaacactatggttaaagatcattttaccaacgatcagtaccacgagttgaggaaggataaggaaaacaatctacccaaatacgatattcgagatgagaactctatattcttcgaggtggatggaccctaccttgccatggtgttacccgctgccaaagaggagggcaagaagctgaagaaaagatatgcggtctttaatttcgatggcacactggctgaactcaagggattcgaggtgaagcgacgcggtgaactgcagctgatcaaaaatttccagagttccgtcttcgaagctttcctcgctggtagcacacttgaggaatgctatgcatctgtggccaaggtggcggattactggcttgatgtactctacagcagaggatcaaatctacccgactcggagctattcgaacttatttcggagaacaagagcatgtccaagaagcttgaggagtatggcgcccaaaagagtacgtccatctccacggccaagcgattggctgagttcctgggcgagcagatggtaaaggatgcgggtctggcttgtaagtacattatttcgaagaaacccgaaggagcacccgtcaccgagagagctattcccttggccattttccaatccgaaccgagcgtgaggcgacatcacctgcgtcgctggcttaaggacaacaccatgggcgatgcggatatacgcgatgtgctcgattggaactactacatagagagattgggtgggaccattcagaagatcataaccataccggcggcactgcagggactggccaatccagtgcccagagttcagcatccggattggttgcacaagaaaatgctggagaagaacgatgtgctcaagcagcgtcgcatcaatgagatgttcaccagcagacccaaaccgaaacctctagccacagaggaggacaagctggccgatatggaagatttggctggtaaagatggcggtgagggtgctgcaggctgtccgatagtcaccaagagaaagagaatccagctggaggagcacgatgacgaggaggcacagccgcaggccaccacttggcgtcaggccttgggcgctccaccgcccatcggtgaaaccagaaagaccatcgttgagtgggtgagatttcagaagaagaaatggaaatggcagcaggatcagcgccagcgtaatcgccaggcgagcaagcgaactcgaggcgaggatccgccggtggtcagagcaacaggatccacagctacactgggcggattccttagacgtgcacaacgcaccctgttggaccagccgtggcagatcgtacagttggtgcccgtcgacgacctgggccacttcactgtgtgggccttaatcggcgaagagttgcacaagatcaagttgacggtaccgaggattttctatgtaaatcagcgaagtgcagctcctccagaggagggtcaactttggcgcaaggtcaatcgagttctgccacgatccagacctgttttcaatctctatcgatatagtgtgcccgaacagctcttccgggataactcgctgggcatgctggcggatctggcgacgcccgacattgagggcatatacgagacgcagatgacgttggaatttcgcgccctcatggacatgggctgcatttgcggtgtccagcgcgaggaggcacgtcgcttggcccaattggccaccaaggatctggaaacatttagcatcgagcagctggagcagcggccccagactcaggtcaaatatttggctagcgccaacaatcgattgcgcaaaatctacttgtatcagcataacacaccgacggccaagaaggagatctggtcactgatcctaatgcccagcaagaaggcatttgtttttgccttggacacagtgcgtgccaatcaaatgccgaacatgaggcaattgtataccgccgagcgtttggccctgctcaagaatctgacggcagaggagcaagataaaattcctgtagaggattacacatttgaggttctcattgaggtggatgtcaaacaaatttaccggcacatacagcgggcactgaccacctacaaacaggagcatcagggacccaccattctgtgccttcaaacggcgctgtcggcgcgtaaactcagcctggccatgccgatcctgctggagtttccccaggctgagattcatatctccgatgacgctagtttgctttctggccttgattggcagcgacagggctccagggcagtgatacgccactttctgaatctgaacaatgttcttgatttgatgttggatcagtgtcgctacttccatgtgcccattggcaatatgccgccggatactgtgcttttcggagcggatcttttcttcgctcgcttgctgcagcggcataactttgtgctgtggtggtcggcgagtaccagaccagatttgggtggccgggaggcggacgacagccggctgttggcggaattcgaggagagcattagtgtggtgcaaaacaaggccggtttctatccggatgtttgcgtggagctggctctggatagcctggcggtgagtgccctgctccaatcgactaggattcaggaaatggaaggcgcctcatctgccattacgttcgatgtgatgccgcaggtctcgctggaggagatgattggcactgttccggcggccaccttgccgagttatgatgaaacggccctctgttccgccgccttccgcgttatgcgctccatggtgaatggttggttgcgagaggtatccatcaataggaacatcttctcggacttccagatcgtgcacttctatcgatgggtgcgctccagtaatgcactactctatgatcctgctttgagaagatctctgaataatctgatgaggaagatgttcttgcgcattatagccgagttcaagagattgggcgccaccattatctatgcggactttaacaggattatccttagttcgggtaagaaaaccgtttccgatgccctgggctatgtggactacattgtgcaaagcttgaggaacaaggagatgttccactccatccaactgagcttcgagcaatgctggaactttatgctctggatggaccaggcaaatttctcgggaattaggggaaagctaccaaagggaatcgatgagacagtgtcgtcaatagtttccactaccatgatacgggattctgaacgcaatcaagatgacgacgaggatgaagaagaggattcggaaaaccgtgatccagtggagagcaacgaggccgagcaggatcaagaggatgagctgtccctggagctcaactggacaattggcgaacatctgcccgatgaaaacgagtgccgcgaaaagtttgaatccctgctgaccctcttcatgcaatctttggctgaaaagaagaccaccgagcaggccatcaaggacatctcacactgtgcgttcgactttatcctgaagctgcacaagaactacggcaagggcaagccgagcccgggcctagaacttatccgcactctgatcaaggcgttgagtgtggacaaaacgctggcggagcagatcaacgagttgcgccgaaatatgctgcgtctggtggggattggtgagttctccgacttggctgagtgggaggatccctgcgacagtcacatcatcaacgaggtcatctgcaaagcgtgtaatcactgcagggacctggatctctgcaaggacaagcatcgcgccatgaaagatggagtgtgagttacacaaaccagtacacataatttaccacaaataattgattaatgttggatttttcagacccgtttggctgtgtgcccagtgctatgtggcctatgataacgaggagatcgaaatgagaatgctggatgcactgcagcgcaagatgatgtcctatgtgctgcaggatctgcgctgttcgcgctgcagcgagatcaagcgcgagaatctggcagagttctgcacttgcgctggcaactttgtgcccctcatcagcgggaaggacatccagacactgctgggcacattcaacaaggtggctgccaaccacaagatgcagttgctccagcagactgttcatcaggcgctgaccacgccacgctaggacctagtttgttgttgttttctagatcgtagggcttaaatatattgtatttataatggaatttaattcgattttaatgagttttgagtttatgatgtcgcacaagacgaatgtctgtgttaaggaatggacgcgctttataattcaatgagattcacacacttttagtggctttcgcatacgaatcgcttgttgttttcccgattttattggttttttttgttgacttgcccgcggtttttgggggcgcacaggcgaaatcagcagctgaacttaaagcaattagactaactcattcgcgaagagcgatctctactgtggggcctgggtgatgggatcgaccttaacatcggggaactggaattcggggaacttcagcatgtcggtcttgccatcgctgccaaactgcttggccacacggtccagttcggtcttcagctcccgctcaatatcgggattggagtccaccagcttgccaccgctgcaggtgagcaaaacaaggattatgtcgaggcacaccaacggatgaaggagccagaacttacgcgctcttctgcttgtactcgcgcactttgtccaggaacagctgctggatgggatcggaggccttgttcagggcaggggcaacgattccgaagttacgacgggcctctgtgcgcaggacacgcatgccactcagcagggattgcgacagcatctggaattgatagatccttgttagaatagcaataaacggccttcttcatatgtaaccttaaaaaggttatgtaatacaattgtttgtttcgacgtttcccaatcggttttcaagccgactttgctagcaactttatcttgtattcaaattgtattccctcaatcaatttttatgtattttaaatcttgttttcaccttattttcctttgcaaatgctaactttcgtgcggaaaagttacaattgtcagttcacaatggcagttggtgttagtgatgtgcgcgtgatgggtgtatgcgatacta

SEQ ID NO: 14810 - DNA, 6584 bp, DROSOPHILA
atgtccgactccagcaaaggcaaagtgctgcaaaatacgggtaaattcgtcagcgagaatcgcacagaaggaacgaagttttggatgaggacagaagattgattgctgccttggacctgttcttcatccaaatggatggttcccgcttcaaatgcacggtggcctatcagccatatttactcatccgaccagaggataatatgcatctggaagtggcgcgatttctgggtcgcaagtattccggccagatttctggactggagcacataaccaaagaagatttggatctgcccaatcatctatccggtttgcagcagcagtacataaaactttcgtttctcaatcagacagccatgaccaaggttagaagggaactcatgtccgcggtgaagagaaatcaggagcgacagaaatccaacacatactacatgcaaatgctggccacctcgctggcccaatcctccgcaggttccgaggatgccacattgggtaagaggcagcaggattacatggattgtattgtggacataagggagcatgatgtgccttaccacgtcagagtgtccatcgatttgcgcatcttttgtggacagtggtacaatatcaggtgcagaagtggcgtggaattgcctacgatcacctgccgaccggatattctggacagacccgagcccgtggtcctggcctttgatatagaaaccactaagctgccccttaagtttcccgatgcccagacggatcaggttatgatgatctcgtacatgatcgatggtcagggttatctgataaccaatcgtgagattatatcatccaatgtggacgattttgagtacactcccaagccggaattcgagggtaactttatagtattcaacgaagagaacgagatgcagctgctccagcgcttcttcgatcacatcatggaggtgcgtccccacatcattgttacatacaacggcgacttcttcgattggcccttcgtggagacgcgtgctgcagtgtacgatctggacatgaagcaagagattggcttctccaagctacgggatggcaattatctaagtcgccctgccatacacatggattgcctatgttgggtgaaacgagattcttatttacctgttggatctcaaggcttaaaggcggtggccaaggctaaattacgctatgatcctgtggaactcgatccggaggatatgtgccgcatggccgtggaacagccccaagtgctggccaattactctgtatccgatgcggtggccacatactatctgtacatgaagtatgtgcatccatttatcttcgccctaaatacgattattcccatggaacccgatgagatcctaagaaagggttccggcacactctgtgaaacgttgctgatggtggaggcttaccatgcccagattgtgtatcccaacaagcatcagagtgagctgaataagctctccaacgagggacacgtactggattcggaaacctatgtgggtggtcatgtggaggctttggaatcgggtgttttccgggcggacataccatgccgttttcgtctagatcctgctatggtcaagcaactgcaggagcaggttgatgcagttctgcgccacgctatcgaagtggaggaaggcataccgctcgagaaggtcttgaatctggatgaagtgcggcaggagattgtgcaggggctacagggtctgcacgatatacccaatcgcttggagcagccggtcatctatcacttggatgtgggtgccatgtaccccaacattattttgaccaatcgcctgcagccctcggcaatggttagtgacttagattgtgccgcctgtgacttcaacaagccaggagttcggtgcaaacgttccatggactggttgtggcgcggcgagatgttgcccgcctccaggaacgagtttcagcgcattcagcagcagctggagaccgagaagtttccaccccttttccctggcggaccacagcgagcctttcacgagctctccaaggaggatcaggcggcgtacgagaagaaacgtctgacggattactgccgcaaggcttacaagaagaccaagctaaccaaattggaaacgcgcacttcgaccatctgccagaaggagaacagcttctatgtggacacggtgcgagcttttcgcgatcgtcgctacgagtacaaaggactaaccaaagtggcaaaagcatcggtgaatgctgcggtggcttcgggagacgcggcagagatcaaggcagccaagggcagggaggtgctctacgattccctgcagttggcccacaagtgcatcctgaactccttctatggctacgtgatgaggagaggagcccgttggcattccatgcctatggccggcattgtgtgcctcacgggctcgaatattatcaccaaggcgagggaaattatcgagcgagttggtcgaccactcgaattggacactgatggtatatggtgcatattgcctggctcctttccgcaggagtttaccattcacacgagccatgagaagaaaaagaagattaacatatcatatccgaatgcagtgctaaacactatggttaaagatcattttaccaacgatcagtaccacgagttgaggaaggataaggaaaacaatctacccaaatacgatattcgagatgagaactctatattcttcgaggtggatggaccctaccttgccatggtgttacccgctgccaaagaggagggcaagaagctgaagaaaagatatgcggtctttaatttcgatggcacactggctgaactcaagggattcgaggtgaagcgacgcggtgaactgcagctgatcaaaaatttccagagttccgtcttcgaagctttcctcgctggtagcacacttgaggaatgctatgcatctgtggccaaggtggcggattactggcttgatgtactctacagcagaggatcaaatctacccgactcggagctattcgaacttatttcggagaacaagagcatgtccaagaagcttgaggagtatggcgcccaaaagagtacgtccatctccacggccaagcgattggctgagttcctgggcgagcagatggtaaaggatgcgggtctggcttgtaagtacattatttcgaagaaacccgaaggagcacccgtcaccgagagagctattcccttggccattttccaatccgaaccgagcgtgaggcgacatcacctgcgtcgctggcttaaggacaacaccatgggcgatgcggatatacgcgatgtgctcgattggaactactacatagagagattgggtgggaccattcagaagatcataaccataccggcggcactgcagggactggccaatccagtgcccagagttcagcatccggattggttgcacaagaaaatgctggagaagaacgatgtgctcaagcagcgtcgcatcaatgagatgttcaccagcagacccaaaccgaaacctctagccacagaggaggacaagctggccgatatggaagatttggctggtaaagatggcggtgagggtgctgcaggctgtccgatagtcaccaagagaaagagaatccagctggaggagcacgatgacgaggaggcacagccgcaggccaccacttggcgtcaggccttgggcgctccaccgcccatcggtgaaaccagaaagaccatcgttgagtgggtgagatttcagaagaagaaatggaaatggcagcaggatcagcgccagcgtaatcgccaggcgagcaagcgaactcgaggcgaggatccgccggtggtcagagcaacaggatccacagctacactgggcggattccttagacgtgcacaacgcaccctgttggaccagccgtggcagatcgtacagttggtgcccgtcgacgacctgggccacttcactgtgtgggccttaatcggcgaagagttgcacaagatcaagttgacggtaccgaggattttctatgtaaatcagcgaagtgcagctcctccagaggagggtcaactttggcgcaaggtcaatcgagttctgccacgatccagacctgttttcaatctctatcgatatagtgtgcccgaacagctcttccgggataactcgctgggcatgctggcggatctggcgacgcccgacattgagggcatatacgagacgcagatgacgttggaatttcgcgccctcatggacatgggctgcatttgcggtgtccagcgcgaggaggcacgtcgcttggcccaattggccaccaaggatctggaaacatttagcatcgagcagctggagcagcggccccagactcaggtcaaatatttggctagcgccaacaatcgattgcgcaaaatctacttgtatcagcataacacaccgacggccaagaaggagatctggtcactgatcctaatgcccagcaagaaggcatttgtttttgccttggacacagtgcgtgccaatcaaatgccgaacatgaggcaattgtataccgccgagcgtttggccctgctcaagaatctgacggcagaggagcaagataaaattcctgtagaggattacacatttgaggttctcattgaggtggatgtcaaacaaatttaccggcacatacagcgggcactgaccacctacaaacaggagcatcagggacccaccattctgtgccttcaaacggcgctgtcggcgcgtaaactcagcctggccatgccgatcctgctggagtttccccaggctgagattcatatctccgatgacgctagtttgctttctggccttgattggcagcgacagggctccagggcagtgatacgccactttctgaatctgaacaatgttcttgatttgatgttggatcagtgtcgctacttccatgtgcccattggcaatatgccgccggatactgtgcttttcggagcggatcttttcttcgctcgcttgctgcagcggcataactttgtgctgtggtggtcggcgagtaccagaccagatttgggtggccgggaggcggacgacagccggctgttggcggaattcgaggagagcattagtgtggtgcaaaacaaggccggtttctatccggatgtttgcgtggagctggctctggatagcctggcggtgagtgccctgctccaatcgactaggattcaggaaatggaaggcgcctcatctgccattacgttcgatgtgatgccgcaggtctcgctggaggagatgattggcactgttccggcggccaccttgccgagttatgatgaaacggccctctgttccgccgccttccgcgttatgcgctccatggtgaatggttggttgcgagaggtatccatcaataggaacatcttctcggacttccagatcgtgcacttctatcgatgggtgcgctccagtaatgcactactctatgatcctgctttgagaagatctctgaataatctgatgaggaagatgttcttgcgcattatagccgagttcaagagattgggcgccaccattatctatgcggactttaacaggattatccttagttcgggtaagaaaaccgtttccgatgccctgggctatgtggactacattgtgcaaagcttgaggaacaaggagatgttccactccatccaactgagcttcgagcaatgctggaactttatgctctggatggaccaggcaaatttctcgggaattaggggaaagctaccaaagggaatcgatgagacagtgtcgtcaatagtttccactaccatgatacgggattctgaacgcaatcaagatgacgacgaggatgaagaagaggattcggaaaaccgtgatccagtggagagcaacgaggccgagcaggatcaagaggatgagctgtccctggagctcaactggacaattggcgaacatctgcccgatgaaaacgagtgccgcgaaaagtttgaatccctgctgaccctcttcatgcaatctttggctgaaaagaagaccaccgagcaggccatcaaggacatctcacactgtgcgttcgactttatcctgaagctgcacaagaactacggcaagggcaagccgagcccgggcctagaacttatccgcactctgatcaaggcgttgagtgtggacaaaacgctggcggagcagatcaacgagttgcgccgaaatatgctgcgtctggtggggattggtgagttctccgacttggctgagtgggaggatccctgcgacagtcacatcatcaacgaggtcatctgcaaagcgtgtaatcactgcagggacctggatctctgcaaggacaagcatcgcgccatgaaagatggagtacccgtttggctgtgtgcccagtgctatgtggcctatgataacgaggagatcgaaatgagaatgctggatgcactgcagcgcaagatgatgtcctatgtgctgcaggatctgcgctgttcgcgctgcagcgagatcaagcgcgagaatctggcagagttctgcacttgcgctggcaactttgtgcccctcatcagcgggaaggacatccagacactgctgggcacattcaacaaggtggctgccaaccacaagatgcagttgctccagcagactgttcatcaggcgctgaccacgccacgctag

SEQ ID NO: 14811 - protein, 2150 aa, DROSOPHILA
MDGSRFKCTVAYQPYLLIRPEDNMHLEVARFLGRKYSGQISGLEHITKEDLDLPNHLSGLQQQYIKLSFLNQTAMTKVRRELMSAVKRNQERQKSNTYYMQMLATSLAQSSAGSEDATLGKRQQDYMDCIVDIREHDVPYHVRVSIDLRIFCGQWYNIRCRSGVELPTITCRPDILDRPEPVVLAFDIETTKLPLKFPDAQTDQVMMISYMIDGQGYLITNREIISSNVDDFEYTPKPEFEGNFIVFNEENEMQLLQRFFDHIMEVRPHIIVTYNGDFFDWPFVETRAAVYDLDMKQEIGFSKLRDGNYLSRPAIHMDCLCWVKRDSYLPVGSQGLKAVAKAKLRYDPVELDPEDMCRMAVEQPQVLANYSVSDAVATYYLYMKYVHPFIFALNTIIPMEPDEILRKGSGTLCETLLMVEAYHAQIVYPNKHQSELNKLSNEGHVLDSETYVGGHVEALESGVFRADIPCRFRLDPAMVKQLQEQVDAVLRHAIEVEEGIPLEKVLNLDEVRQEIVQGLQGLHDIPNRLEQPVIYHLDVGAMYPNIILTNRLQPSAMVSDLDCAACDFNKPGVRCKRSMDWLWRGEMLPASRNEFQRIQQQLETEKFPPLFPGGPQRAFHELSKEDQAAYEKKRLTDYCRKAYKKTKLTKLETRTSTICQKENSFYVDTVRAFRDRRYEYKGLTKVAKASVNAAVASGDAAEIKAAKGREVLYDSLQLAHKCILNSFYGYVMRRGARWHSMPMAGIVCLTGSNIITKAREIIERVGRPLELDTDGIWCILPGSFPQEFTIHTSHEKKKKINISYPNAVLNTMVKDHFTNDQYHELRKDKENNLPKYDIRDENSIFFEVDGPYLAMVLPAAKEEGKKLKKRYAVFNFDGTLAELKGFEVKRRGELQLIKNFQSSVFEAFLAGSTLEECYASVAKVADYWLDVLYSRGSNLPDSELFELISENKSMSKKLEEYGAQKSTSISTAKRLAEFLGEQMVKDAGLACKYIISKKPEGAPVTERAIPLAIFQSEPSVRRHHLRRWLKDNTMGDADIRDVLDWNYYIERLGGTIQKIITIPAALQGLANPVPRVQHPDWLHKKMLEKNDVLKQRRINEMFTSRPKPKPLATEEDKLADMEDLAGKDGGEGAAGCPIVTKRKRIQLEEHDDEEAQPQATTWRQALGAPPPIGETRKTIVEWVRFQKKKWKWQQDQRQRNRQASKRTRGEDPPVVRATGSTATLGGFLRRAQRTLLDQPWQIVQLVPVDDLGHFTVWALIGEELHKIKLTVPRIFYVNQRSAAPPEEGQLWRKVNRVLPRSRPVFNLYRYSVPEQLFRDNSLGMLADLATPDIEGIYETQMTLEFRALMDMGCICGVQREEARRLAQLATKDLETFSIEQLEQRPQTQVKYLASANNRLRKIYLYQHNTPTAKKEIWSLILMPSKKAFVFALDTVRANQMPNMRQLYTAERLALLKNLTAEEQDKIPVEDYTFEVLIEVDVKQIYRHIQRALTTYKQEHQGPTILCLQTALSARKLSLAMPILLEFPQAEIHISDDASLLSGLDWQRQGSRAVIRHFLNLNNVLDLMLDQCRYFHVPIGNMPPDTVLFGADLFFARLLQRHNFVLWWSASTRPDLGGREADDSRLLAEFEESISVVQNKAGFYPDVCVELALDSLAVSALLQSTRIQEMEGASSAITFDVMPQVSLEEMIGTVPAATLPSYDETALCSAAFRVMRSMVNGWLREVSINRNIFSDFQIVHFYRWVRSSNALLYDPALRRSLNNLMRKMFLRIIAEFKRLGATIIYADFNRIILSSGKKTVSDALGYVDYIVQSLRNKEMFHSIQLSFEQCWNFMLWMDQANFSGIRGKLPKGIDETVSSIVSTTMIRDSERNQDDDEDEEEDSENRDPVESNEAEQDQEDELSLELNWTIGEHLPDENECREKFESLLTLFMQSLAEKKTTEQAIKDISHCAFDFILKLHKNYGKGKPSPGLELIRTLIKALSVDKTLAEQINELRRNMLRLVGIGEFSDLAEWEDPCDSHIINEVICKACNHCRDLDLCKDKHRAMKDGVPVWLCAQCYVAYDNEEIEMRMLDALQRKMMSYVLQDLRCSRCSEIKRENLAEFCTCAGNFVPLISGKDIQTLLGTFNKVAANHKMQLLQQTVHQALTTPR

SEQ ID NO: 14812 - DNA, 3582 bp, DROSOPHILA
ctacgaggaacaacgcagcacacacttgtagcgagccgcccttctcgttgtgcacattcagctcgcccctttgaatgggaaaatggatgtcgtagttgcgggcatccacagcaccgagtcgcaggatacggtcgtcgaacagcacgggtgcctcgcgatccagccagggctcgtccgccatctggccactgggcgccggcaccttctccgcctgactgctccggttgaagtgggccagttgctgcggcggagtggccacccgcaaccggtttttgttatcgacgacgcagtgctgcagaatgcgcgacaccaccaggcgctgctcctcgaactccaccatcaggccggagtttgagttgacgttgtccagcggcggcagcagcggatcatgatgcggcctatcgctggcccccggacgcctcctgtaggccaccgcgtgcagcagggtcagcggattaaggtcggccgccctgccgatcctcaagtgctgcgatccaggatggatgacgataatctttggcgcctccagtggctgcgcctgcggctggggcagcccaattggcggcggcgccggatgccggccactgctggtgctgctggctcgggatcgtctggacgaagggagagtagccaagttgcaaaattagttgcttcacataccacttacttattcacttactgcatcgtttgctttccgaaatccggatcctttgaaaatgcggaaatcggaggcaacaacaaatggcaacaaagccaatgtgaccgtggtgcgcaaatgagaacatttataaaacaggaacacaggaaaaacagaaagttaaagtaataaaaaaatagggctgatttacaaaactcatttttcattaattactattaattcattgttgaaattcaaagcactcatatatataacatataacaaattctttgtttagtatattgtgtgtggatggtgccgacgtgagtgccgtctggtcacactgtcaagaacgtggttttgttttttaatcatcaccattaaattgagcagccttactttccattgtgaaatacgccattccagagtgccaacgaaaacgagagtgccagtcaagcgatcatcgaatccactcagcgccacaatgtcgcacttcacctgcctgaactgcgatgcccgcttcgccagcgcggatgtgcagcggaatcactacaagaccgactggcatcgctacaatctgaagcgcagggtggcccagctgccgcccgttacggccgaggagttccagcagcgcgttcttagcgcccgcagcgccacggacgcggcactcgaggagcagaacctaagtgtctactgccacgcctgcagacgccaattcgccagccagaaggcgcacgacaaccacctgaacagccgcaagcacaaggagctgctggcccgcttcgagcgcgagcagatgacagctagcggcggcagcgccagcaccgccacatccgtgtgcacgcgcagcgtcgtggagcagcggccccatccggccctggccgccgcagccgctggcaagggtcgactggccttcgcggagcgggtggtcaaggccaataacgacgaggagatggtcgacgaggacgacgatgatttcgaggacattgaagaggaggaggtaggaagcgctatgcagatagagctcgcattagacttttccttgctcatagaagggttaccttgagaatgatttccttggagattctatgcctggttaagatatgcacctttacaacgtatacagcttcttataaagaacaacttgattttttgcaggtggattccgatgagtgggacaagatacccgagaatccgctgaccgagcgcgactgcctgttctgcacacatgccagcgaggatctggtggagaacctaaagcacatgtccgtggcgcactcgttcttcattccggacaccgagtactgcacggacatcgagggccttctgtactacctgggcgagaaggtggccaactacttcatctgcctgttctgcaacgatcgcggcaagaccttctattccctggacgccgtgcgcaaacacatgatcgacaagggccactgccagatgctgcacgagggtgtggcgctggccgagtatgccgaatactacgactacagcagcagttatccggacaatgtgagtatcacatagcacaagcaaacctccatttatgctgactgaatcttggaaaaccttttaacccgcacagaatgagggcatggacattgacgaagaggtggtgccggatctgctcgatggcgatgagtatcagctggtgctgccctcaggcgcggtcattggtcatcgctccctgcttcgctactacaagcagcgtcttcgtccggaacgcgccgtcgtcatcaagaagtccgaccgcaaactgcaccgcgtgctcagcgagtaccgggctctgggctggacgcaaacgcagcagctgtccgccgcccgcaaggcacgcgacattcatctgatgaagcgcgtccagtccaagtggcagatgaagctcggctgcaaggccaataagctgcagaagcactatcgtgcacaggttctgatctaatcatcgcttgcttttctttccaaatgctattggcctcccccctacttgtacaataaaaagtttttgagttttgcttaaattaagcatatttgtttgctttctatattactagcgatttctcgtcgaataaaattacataatttaaattaacaattaaataaagtttaattttgattcgtttatataaagtaaaagtatgtcgttacggttactgcataaagttaaacattataattagaccaaaaaaaaaaataggttctagcgtgtaaaaaaataaactctgccgaatccatcaaggcgcccacacggcatcccctccccgatcccgggcgactgggggcgtggccggtgctgtgggcgcggcggtgagagctcgaagtgactaatcagtaagaaccgcaggtgagtgagttttcgtgtgtttcgtgggacctgagggtcaatttcagctagttaatgttaatgtatttttattttggacatgtgtctgtgttgcagtgatcttcatcgggcgtcttgtcttacaatgaaccaagaatctcagcttcttttcaggaaaagctgaaagtgtgactattaccactcaaacaaaacaaaatgatcttcgctatttatccaattgaagtcacgttgtcacaatcgctaattaaaagaattttcatttaaaattgtctacatagaacagaaattttcttcacttaagatcttacaaaagcgcagatgaaaatattaacaattattcgtcaaaattagtagtatatgtacatcgaagtacatcgtacatggtatgtaaaattggaaaaacgtgtggacaagacccccgattaccgaccaactatggtgctgctgcgttggtgaatttgtggttccttggtttgtgggcgggtggaggcgttggttggcggtgcaataaatagcagcagagagcggcaaagggcgtgaaaagtagtgttttaagcgagcatccaacgttctttgcttgcttccagtttatgctaat

SEQ ID NO: 14813 - DNA, 1351 bp, DROSOPHILA
ttttttaatcatcaccattaaattgagcagccttactttccattgtgaaatacgccattccagagtgccaacgaaaacgagagtgccagtcaagcgatcatcgaatccactcagcgccacaatgtcgcacttcacctgcctgaactgcgatgcccgcttcgccagcgcggatgtgcagcggaatcactacaagaccgactggcatcgctacaatctgaagcgcagggtggcccagctgccgcccgttacggccgaggagttccagcagcgcgttcttagcgcccgcagcgccacggacgcggcactcgaggagcagaacctaagtgtctactgccacgcctgcagacgccaattcgccagccagaaggcgcacgacaaccacctgaacagccgcaagcacaaggagctgctggcccgcttcgagcgcgagcagatgacagctagcggcggcagcgccagcaccgccacatccgtgtgcacgcgcagcgtcgtggagcagcggccccatccggccctggccgccgcagccgctggcaagggtcgactggccttcgcggagcgggtggtcaaggccaataacgacgaggagatggtcgacgaggacgacgatgatttcgaggacattgaagaggaggaggtggattccgatgagtgggacaagatacccgagaatccgctgaccgagcgcgactgcctgttctgcacacatgccagcgaggatctggtggagaacctaaagcacatgtccgtggcgcactcgttcttcattccggacaccgagtactgcacggacatcgagggccttctgtactacctgggcgagaaggtggccaactacttcatctgcctgttctgcaacgatcgcggcaagaccttctattccctggacgccgtgcgcaaacacatgatcgacaagggccactgccagatgctgcacgagggtgtggcgctggccgagtatgccgaatactacgactacagcagcagttatccggacaataatgagggcatggacattgacgaagaggtggtgccggatctgctcgatggcgatgagtatcagctggtgctgccctcaggcgcggtcattggtcatcgctccctgcttcgctactacaagcagcgtcttcgtccggaacgcgccgtcgtcatcaagaagtccgaccgcaaactgcaccgcgtgctcagcgagtaccgggctctgggctggacgcaaacgcagcagctgtccgccgcccgcaaggcacgcgacattcatctgatgaagcgcgtccagtccaagtggcagatgaagctcggctgcaaggccaataagctgcagaagcactatcgtgcacaggttctgatctaa

SEQ ID NO: 14814 - protein, 409 aa, DROSOPHILA
MSHFTCLNCDARFASADVQRNHYKTDWHRYNLKRRVAQLPPVTAEEFQQRVLSARSATDAALEEQNLSVYCHACRRQFASQKAHDNHLNSRKHKELLARFEREQMTASGGSASTATSVCTRSVVEQRPHPALAAAAAGKGRLAFAERVVKANNDEEMVDEDDDDFEDIEEEEVDSDEWDKIPENPLTERDCLFCTHASEDLVENLKHMSVAHSFFIPDTEYCTDIEGLLYYLGEKVANYFICLFCNDRGKTFYSLDAVRKHMIDKGHCQMLHEGVALAEYAEYYDYSSSYPDNNEGMDIDEEVVPDLLDGDEYQLVLPSGAVIGHRSLLRYYKQRLRPERAVVIKKSDRKLHRVLSEYRALGWTQTQQLSAARKARDIHLMKRVQSKWQMKLGCKANKLQKHYRAQVLI

SEQ ID NO: 14815 - DNA, 2720 bp, DROSOPHILA
acttttgtaatgcgagtttaacgaatctttaatttagaaatacatttaataaaaataaaaaaccgattctaaggcacttttaacacgcaatatattgcaatgtttaattttataaaaaaacaggtttttcatcaccttctatttgtttgaagtttggaacaccacatttttagatagatcaatgattcagacgaaatgctatttaatgaagataaggaatatttatgactaaccaaaatgcgaatttaaacatacataagagtcttggaattttaattgtcaatatgttcgaacaatttcattaatatgcattatagcaaaaccacctgatcgagagtctgttttattgtttaccaaatatcaacaacgcaattcaaaaagccggcaaatggcgtttatagagagagagagagcgagagagaggagagaattccattagagtggacctttctggaaaagtttgttcggtttatttttgtacgtgtgcttgtttgtttgtgagtggaaaataacatagcttttgtaattttggacacctaatgtaaaaatatcgtttagtattgaaagtcaataaaagcggcgcaatattcataaatgcaaccttacacgcaaatttaaaccggaagaaatgatgcaggaatatgtgtgtgcaagtttaattacctgtgtaactggtgaactttcaatggaaggtctcgggaatatttccgtttgcaaactaacatacatacattacatacacaaataaatatgttcatacatgttctctttttggtcgatcgctgtaaacaaagaaaaaagtcgactgcaactgcttttgcgataatcgaggagctgagtgcaaatgagttcaactaaaaggctataaatatgcacaacagcacaccaacggcattcaaaaagctctctcgcttggaaaggtgcgctgcaaatgcaaatgaaaataagacgaccaggctattcagttttggttttctctttattttatatgtattacctaagtcaaacttcattatttgaaacgctctaaggcttagcaactaaaacttgcaagtctgaattagtttaggaatatattagaagctaagagtagtatgtgcctttctttttttgtgtttgtgaaattataagcgaaataaaattattataatgttcacaaagtttagcgccgcatgaaaagccaatgcacaatacaaatgcaatgtgtatttccagctggcttttgtttttctttctttccttccagcaaaactgctgcttgttcttctttttcttctctcctttgcttttgctttccttttaaattcgaagatttcttttctcctttcagcgcggccccgttacttctttctctcctgttccaccgcctccgtcgatgccctgcatcagttcttgcaggcggcggctttcttgttgttgttgttggtgttcatcagcttggtcagaatcttgcgggaatgaccggagggatcgaagtggttggtgtgctcattggcctccctcttgttgcgctgcttgccgctgtgtccagagaagatgtgcttgtcatggtcgaagttgtagtgctcgtactcatcgaagtgggcctcggacataatggcgatttaaggttgcaaaactaactgcgttcttggttggtgtctgctttttgtttctctgcaaacttgcaggctgctttccaaatttctcttctgcttttttttgttcacttttcgctgagctgcgaacggaattgaattttttcggtcgagcagcggcttttataggcgcgcaagctttctgttccgtaaccaaagctctctctccgtcagagttgccggatttagctaaagaaactactagaagggcatttaattgttgcttacgtgtagttactaaaaatatttaatttttctataactttctactgaacttttacaaaatatatttgctcttttttatgtaaaagaatttttagttattaaaattcatagttattgggcctgacaacccttttgcgctcaagagagtgcctccttgacaatttttgctgcgcaatttaattttttgctgtttacaaagtgcgcggtaaacaaaaaaactgaaatcgccaaacatattatttcgccttgttcatttattttaataatttaagaacttttaagcatacacacgttcctgagtggttacataacacacacccaccttggccctccgcaaacgaccatcaaagtgcatttaccctgcatttgtttctccacccaataaatatagaattaaatgcatcatatgttctggatacactgctcaaaatttgtttatttttttacactcaacaatatttgaatgttagggcacaagaaacaatttagcaataattataattcgaataacatttttgatttacaaaagatatactcataatggatatttattttggtgcattagaacctgatcggttgacccacttccctcccaccaggcaacgcatttgtttatttctgaatagcgaaaagctttcagtttgttttggtttaatggattttatataaacaaatgttacgtacatacatatatacatagccttctggcgttgataaggtgctaactatcgctctagttagtcatttggcaggtattcgttctgaaagttcgtcttcaaacgacgcaatagatcgtagtcaccatcttagataagatagaacggcctcaacaatgttgtttcaagaacctgccacaat

SEQ ID NO: 14816 - DNA, 720 bp, DROSOPHILA
ctcagcgaaaagtgaacaaaaaaaagcagaagagaaatttggaaagcagcctgcaagtttgcagagaaacaaaaagcagacaccaaccaagaacgcagttagttttgcaaccttaaatcgccattatgtccgaggcccacttcgatgagtacgagcactacaacttcgaccatgacaagcacatcttctctggacacagcggcaagcagcgcaacaagagggaggccaatgagcacaccaaccacttcgatccctccggtcattcccgcaagattctgaccaagctgatgaacaccaacaacaacaacaagaaagccgccgcctgcaagaactgatgcagggcatcgacggaggcggtggaacaggagagaaagaagtaacggggccgcgctgaaaggagaaaagaaatcttcgaatttaaaaggaaagcaaaagcaaaggagagaagaaaaagaagaacaagcagcagttttgctggaaggaaagaaagaaaaacaaaagccagctggaaatacacattgcatttgtattgtgcattggcttttcatgcggcgctaaactttgtgaacattataataattttatttcgcttataatttcacaaacacaaaaaaagaaaggcacatactactcttagcttctaatatattcctaaactaattcagacttgcaagttttagttgctaagccttagagcgtttcaaataatgaagtttgact

SEQ ID NO: 14817 - protein, 69 aa, DROSOPHILA
MSEAHFDEYEHYNFDHDKHIFSGHSGKQRNKREANEHTNHFDPSGHSRKILTKLMNTNNNNKKAAACKN

SEQ ID NO: 14818 - DNA, 11378 bp, DROSOPHILA
cccccgtgagccctccaaattgccttgtacttcaactttatcaattattcacaaaaacctttaccctgaactttaccagaccttcgatggcagctcaaaacagctgacttccttagtgcatgacacacggcatatcgtttggattacatttggtatttgatatatattattcacttggtgccatccaataatgttatacttgacttggtcataaaggacactggcaatcgcgttccttcctatctattgattgagttcgattttaaaggaattctggccagaaataagtcacgataattgatctgaataatagaacgaggtgtcgttttgctagacaatggagggataacctttatttgtttgatgccagctttcacttttgggagttcagattgaacttaacatttgtcatcaattaatttgataattatgcttacgtagaacgagaatctgaatcactttaacttttatagagtggctttcctttcagaatgtgataaatataaatatacatatatgaccccccccagatatttgcaattcaaattcattttgacttcgtagtatcttcaattcaagcgataatattctgggaaagttttattacgcattcccatcaatttccttagttagaattcggtttctgctcctatcatcgtgtcagtaaacagatatgagttgccagaagtaaagcaaatcatcaattgtaaatattattttgcatataccacagagtgtgtttcatttcgacagatgggccaatagcatgccattcatcagaccatgtggcagtattaagtttacagtgctttcctggcaattaagatagaaaaccgaaatattgaatgataaccaaacgacacgatacagttcccaaattcaagtccccaagtccggaattgggaccataaagggaactcgtttctctaaccaatttgagtttttttttttggggcgtgttcttgccacacccccacacttgatgatgattaaattgttgatggttgctgatgataatttctatttccagatttcgctttataggcgtgtcctagaaccaaggttgggtaaacaactaaaataacagatcacaaatcaaagattcatacagcatatatcgcgtatacgcaagttttagaatgccaaaacaattaataaatgtcacatcatagctgatttagcgctcatatctctacttaaagtatacaattttaggtttttcaataaactaaaattataaaatgtgattatttgtataaattatgagtaaaaataaatattgaattgttgttcccataaacgtgcttattttatgatttttttttttgcacatagagtgaatcatttttgggacttgtccagctatctacacatgtaattccatacctataaataactgataagtgtaatccgtttaatcgtaaaaccgataatgataatgtgtttcgttctttttttaaccaggcacaaatcaaaatccaaatgagcagcacctgagcgatccagctgcctcgccctccacctccagtccagccaacaacaacgcaacagctggagcggcaacaacatcaacagccactgtaatcactgcggtgggtggagcgggcggtggcgtagcggcagcgggagtgggcgtggttacaccaacaaagagcccacagcgtaacgctttccaggaagatgcttatcaggcgaacctggctggcggcgatagcgtcgataacattgaatcagctcaattggatggtggcaatccgagtggtggatcgcccggccagcgtcactcgataaactcggcggaatacacatccacaccaaagacgactcgtagcggtccgaatggtagcaccacggccagtggaacaacgtcgcccattaattaccagctgcccggcgatgactatccgtatggcatagaatatgagtcacagcaactgctataccaacagcaacagcagcagcagcaacaacagtcgcaacaacaacaacagcagcagcagcagcaacaacaacaattgccagtaggcgatgtggagcaatcgtcagcggtaacataccaaagtttgccggtcagtcgccagagttacgcttcaccgccagctctgatcattccccagcggcagtcgctgcttccctggggagctcattccaggagttcgatcatcaacgtcctgcccagttacacgcaagccgagatgcatgccttggccgccagggtggccagcgtggagacctcagctccacgacctggtgagatcgtgatgcgtaatctgttcagtgactttacggcccaagctgagaagaagatcgagctggtgatgctggagagtgccgataagaatctatcgaagctgctgcagcgcggcgaggatcagcaattcgatcagttactatccgctctgggctcagtggccgagcactgcctgccatcgttgctgcacaccttgctggcctggcatcgtcgccagttgtccgacatggagatcaagaatgacctcaagaaaccagcaccgagtggcagtagttcgcaggcggcaaccaataagcccaccgtcgatctggactttcagctgcagcgtagggaagcggctgtggagttcattttttgtctggctctcatcgagatactcaaacagttaccgtatcatccgggccacgaggatttggtgcgcagcatcgagaatctggcctttaagcacttcaagtacaaggatggtttgcagaacaatccaaatgccctcaatatccacatgattgcggatctgtatgcagaggttatcggtgtgctggctcaaagtcgatttgcatcggtgcgcaagcgtttcatgagcgagctgaaggagctgcgcggcaaggaggtgtcaccaacgaccacccagagcatcatcagtctgctgatgggcatgaagtttttccgggtcaagatggtgcccattgaggagttcgaggcgtcctttcagtttatgcacgagtgcggtcagtactttttagaagtcaaggataaggatatcaagcatgcgttggctggactgtttgtggaaatcctggtgcctgtggcggcggtgagtaaaaataccaattgcagcttttaatcaataaaataatacattcatttgttcacaggccgttaaaaacgaggtgaatgttccgtgcgttaagaactttgtggaactgctctatgtgcagaccttggatgcctccaccaagtctaagcatcgattggctctctttccgctggtcacctgcttgctctgcgtctcgcaaaagactttcttcctgaccaactggcattacttcctggccatgtgtttgagtaatttgaagaaccgcgatgccaaaatgagccgcgtggctctcgagtcactgtttcgcctactgtgggtctatatgatccgcatcaagtgtgagtccaactcggccactcactcccgtctccagagcattgttaactctctgtttcccaagtgagtaatgaattcaaaaccatgcaaaggaatattgcttatgcacaccaactgcttgcttgttttataggggctccaaaggagttgtgccacgtgacactccactgaacatctttgtgaagatcatccagttcatcgcccaggagcgtctggactttgccatgcgcgagatcgtttacgatttgctgtgcgtaggtcgttcgattaagctaatcctgaatccggaacgcatgagcatcggattgcgagccttcttggtcgtcgccgattcactgcagcagaaggctggtgagccaccgatgcccagaacggtgccagtccttccatctggtaacacactgcgagtaaaaaagacgtttaacaagatgtatgttttgttaacggatgacaccgccagaagtattggaatgtctacgtactttccacatgtgcgtagggtttttgtggatattttgagagctttggatgttcattatggtcgtccactgatgatgaccaatacacagaaccagaacaaggagccggacgagatgctctccggtgaaagaaagcctcgcatcgatctcttccgaacgtgtgttgccgccgtaccgcgattgatacccgatacaatgacccctcacgagcttgtcgacatgctctccagactgtcggtccacatggatgaggagttgcgaattctaacccaccagtcgcttacgactttggtcatagatttcccggattggcgtcaggatgtcgtgcacggttacactcagtttctggtgcgcgacgtcaccgacacctatccgcagctgctggagaactgcacgcgcatcctgttcactttcctcaacatctggcggtgtgccacaaatgtgaacgggaataacactaccagtgctcctagcggagcaaccaatgtggtcaatacatcacaagccaaaatgactacggccaccacaacgacaacggtggtgcaggctacagtggttcaggtcacatcagcgccagccaaggacaccgccagcagtcagttgtccaagcagcagcatttgaatacggccagtagtgctgcatccagcataactacctcaagcggaatgtccagtatcacgcaacacaccgtgctgaacatggccagcgatgtgggcaagaagaatgaaatccctctggccaccactctgcattttgtggagggctttgccctggtgctactctgcaactatcgcacgtatctgcgcaagctggccgcgttgatactcaaggaagtaaagaatctgatgcgagcattgggtatcccagaaacggagccgccgctcatcgatgtcatggatcgttgtgtgcctggcatcatagagaagtgcctgccacagctgccgcagacggagaagacggctattctgaatgccaattgcattgatctgcagtggatagctgaaaggtcgagtggagtgtggctagctggactgacagatggtaggcagttgttgaataccatttttaaaccaatataggaacataattcttttgatacttctttttacagacaactcgaaatcctctacgtctacgcttaacctctcgcagtccagttcaacaccgaatgcctcggcaacggcggccagctctccgcagcttccgttcgatccctgggcgacttgtttgtttggattgctggaacgacagaatgtcctgcaacagtgcccatcggctgtggcgcaggcctggccaatttgcttcacgcgcctgaatgcgttgtacagtgtcattgatcccacgtaagtttaatggggtttcaccagaatctatattaataatatttaaatatttcctgtaatgcagccccgtgagcgacaatcgagcttcgttgctgcgaagttcggcgcccaccaagaaagtgcccaccgagagccagaaggattcatatttgcgtctttggaggaatcaggtggcctgtgccatgcgactagtgccccaaattcccagtgtcgccgttcgatgtgcttcacctgacttgagtttgaggtgagtgacgaaacgcattgcatttgtaagccatgttcacacagatgaacaaataactgccaaattgaaatgaaatcgatttatgccaagccattgaaacttgccgtaagctgatgtgataaacctgtgaaaaaggttgacaatttgtgtgtgttatttttctctgtgcatctattgtgtcctttcactaacaactgcccaaagctcagaacaaacaagacacttcattacttctatttgactaacacttcgcattcaattacattcggcacgatttgcatgtagtgattatacatccgtgtactacagttgacctgtacattgttattaaaagtgcgtgtgaaattgtaatcaagttggaaattcattttatattttgttttcttgttcaaaccaattttcattgaagtgggtttgtgttttaagtttgtgcgacaagcaaaaagacagaaccgtatgtgtgtgtattttgatatttgaaaattggttttgtcttacatccatttgcatattaatggtgaatgcaaatcgctttaatatgtgattatcaataattggttcattcacgtaactcacaccgcatgttgtatgtttagctggtttattttacacgcatgcactcgattggattcttcagaagtcacccataagtttatatttggttaattgaactaaacttaatgtaccagcctgcataagcacaaacagcagggttcttttgtcaatatttgttcatgccatcgtgcgttcattagcttgtttattattttagagccaaaatgtaatgggttggatttggaatgctagctgaatactcacatttaataacactgttgcacacaatgagtacgacattagattacattatgggatctacaaaaatttggttgattatgatgcacaaaattgatgtctggtcaccaaaaaaacatgtactaaagctgggattccgtatagtttgaaaaaatgtcagtttgacatttttttacgctattgacaggctaacagattcttggtaattacattttgtcgtgattgtttcgcaattgtgcattgttgtaattaacaatattttctggatcccctgaaagtgtttttttcacgttcagcaatcggactaaaaataagctgcttatcaataaaattctttggaatttagtttttattttgtaccaaaataaatgatagaaaaggatatttaagaaaaaaaacatactattcaaaagcattatatttttgctatattgataaaaaaaattgatttggtataatggtgctttattgtaaatttagcaacagagttttgtaaaatttcataaaaagtatatgtgcatgttaagtgtatccgtctatttgttgtcattataaatttattatttccagcaattagatgggttttcaaaggaaagtttttattgaatttttataatatgttagcctgcacctcaaaccattttttcattgtgataaatcattgaaattcgtttccacggactgttcgtagaattcctaactagattcaactgaattaaatgcgaaatattgcaatccacaatacacacacacatcgcatttccatcacatcagtgtgtaaatgttggtcgacggtatatgtcaataaaaaggggtatttcagaaaaaatgttcactcctatttactccacgcccacactccaatccgctcatctgcccattcacccacgtggtcagtggccaccacattgcacctgtgtccccgtgaacattaaagtccatgtccacaccaagcgaacatcccacgggagctgggcaaacagattggtcagcattatgccaatatgatatctctctgtgcaagtgcgtacataaaacattgatcacatcaatctcgaaatcgaaccattcaccagtcaccatgaccagcaaccagtatcgcaatcagtatcgcaaccacacagctgtttatacatatatatatcaatatcaatatatatattatatatatatggattgtaatttatagtttacaagatcagtcggactcgcgttcgctgtccgattccttggacaatataccatccaatgtgtttgggcccgagggaatcgtcacgcgtttcacgctgccactctcctatggacgcaaagaggcgcgccaaaagcgacttgggtaaagcaaactacttacagccaaaaccaaaaccaaaaaccaaaaactaaatcaaaacttaaaccaaaaaccaaaatccaaatcaaaacttaaaccaaaaaccaaaatccaaatcaaaacttaaaccaaatacctaaaatcccaatcaaaacctaaaaccaaatcaaaacctaaacctaaaccaataccgagtaataatgaaacaaaatactatctgcaaaacaatagctcgatttacgtaactttttgtacaaatagttatgagcgtattctgtatgcaaaatgagtatattcctgtgtttattatatttttgttgcttgtctatgttatatgtgtgtgtgtgcagctttggcatgttgttaaaaatgttttgtattagctagaaaagttttgatcctttgtattcgcacttttaagtttgtaaggttttatgttacaattttcaaatagcaaaaatgggataaaagtttagtgtttatttccgtttgtttcttctttttgttaaaacgtataactagtttctgttcattctgaaatctatctcaagttagcaaacatactgcttaatttctagtaaaatggttgcatatttgtttctttctgaatgcaattctacttatttaagactgattttcctattttcatctggttattattgagttgtttccgttcaatttggcaaacagtttgctcatctccttctatcgttttttttcttctgccacgccccctatttgcagtgtgctgaaaataatttgaagacaagtttgtttatttttcatatagcgcatgtcagccagttgcccacaattcccaaaaccccacgaagcccgctgtccaaaaacccgcaaaagcttgatttagcttcgtgttcgctttttcagcagcagcaaaaaattatataaaattgttatttgcttgctgtcatttattattattcgtcctgaccaagcccaacccccagctacaaaagaaaaagggaaaattcaggacgacaaaaaaactggggttttaattgaaagatgatttcgagtttaaaattcataatgtttatcgttgcaccgtagaatcagagggtcccctttgaaaaacgtcctggaatttgaatttgtcaagtgagcgagttttcagagattcagcaccgcgtagcagtttaaatcgcagtaaactttatggactttcgctaaacgatgaccttgccaaggcagcacaagcacccacagccagagataggaacattaacagaaattactgccccggagcgctcgctgttcgacactaaaatccatggccataaatttgttttacagctcatcgccggactccctgaacgccgatcgcagtgacaagtcagcgatgggcagcgcatcaccccaagcgctctacaaactggtggtgccgctcctccggtgcgaggtcgtcgatgtgcgagatgccgccgtgaatgccttgggtctgataaaccacgatgcgctcaagtaagtcttaaccaagtctatatccaacttgatacaactgacaaagtgcgtgtgcgttctggcagggatttgatggaggagctggtggtgtacatccgtgaggcggtggactgcaagcaggagaacatgcgcaggcgacggcgacgcgatgccctgcgtctgcaggtggtgcgagtgctggagaagattgccgagaacggaacattcggtgtgaggtaaataacttctaagcacaatcatcaatatgattattgatggccacaacgtttccatcatccatttgcagcacctgtgtgctggaacgcgacacgatgtcgctgcatcccacctttgtgctgtatatctcgggcgccatgggctatctaacgtctgagacggacaaggataatctcagcattcgcgaggtgaaggcccacttttgcaatttcatacgcaaaatgattaagaacttcccacgtaagtcgacaaagtgctactcgaagagctgtcatcaccacagcgttgatggcgaatctccatccatttgctccaactgatggcctgttcgttctgctttcagtcgaggcctgtgccacgctactctcccgagtcctgaagcgtaatctcttcaatttatttgccgcctggtgcggcagcttctccaagccacttggttacaccatgcagagcgaccatacgctcgaggaggagaagctgcagttcagcgccctgcaggcaagttaaatatatatacatacatattacggtttttaaagccattagaaagtaacgctctaaatgacttgtctttcccgctttaggccatgtcagctctgctctgttgcggtcagatcttcaatccatcgtatctacaagatgatagcattatttacaagtggctggacatgctgctgacctccaaaaacgaaaaggtaacgcgtcacccacttgacccccacccacttgaaccagaattaacactgagatcacttttacacagatttaccagctggcaagggatacggtcgttctgttgctggagtccaatccggatatcggccaactattggaatgggtcatagaccgttgctatacatcgacaccacgtgaggcagatgcctgtttcctggccctggcctcgatctttagcgccaagtaagtgaaaggaaatggcactttaaacatgggcacacaaataccacttgcgcgctgcttaatcgccttacgttatgccctttaatttgtttcaacttgttcgacagccaagtacattacactccgcccacctcacttgccgccgtaatcgctcccatgccatatatgtatgtatgcaggtggggattgggggataaaggacttaaacaccgatttaactggcactcttaagtagcatttcacgtgtctgcccacaatggcaactctttaagcttacgcgcacacatgagtggttgacagcctatttgttcaggccaagttcgtttttttttttttttgtttcatttcctctgccagttgtttcttttgtatacacatatataaagtgcatataatattttgctttggccattatggcagcgaactgtggcgtttccggtacacatcgctagataaacagttgaggccatgaagcatagcatgcatggctcattgcatttaatgcaagtgcaactgtggatggacaaatgtgtcgaaagcgatttcctttactggttttaaatctccataaaaagaaaaatattttcagcgcaaaaggatacattaaaaaacacttacaaatcattatttaatttgaaaccatgcagttgctgagttctgtgccacaattatgttaaaaagcagacattttaaatatgtaagctgtctgaaaattctctaaaaaaaatgcacacatgtttctacataatttgcgtttgtttgctcggttttaatagaaactaattagctattctagaaaccaaaccgcctgtctaaccgcagtttaagcagttttcattcgcaatttgctaacatttgtcgcaggcactggaggcagtttaacatagtaacgagagaacaccagattgtggtttatcccggtggctgtgggaggtgtgtgatattttgcggttcccccaaaaccgaaggacaaaacgagagtagaagcatctcgaccacttcgaatgaacacacgcgttgcaaagatatttgtcggctggacagcgtcttattgcagttgcgtttcaaatggtgctatgtttcacataccctgtaatcgctgagtgcagttgtaggtttgataggaacttatcattcttagtttcaga

SEQ ID NO: 14819 - DNA, 4897 bp, DROSOPHILA
atggttgctgatgataatttctatttccagatttcgctttataggcgtgtcctagaaccaaggttgggcacaaatcaaaatccaaatgagcagcacctgagcgatccagctgcctcgccctccacctccagtccagccaacaacaacgcaacagctggagcggcaacaacatcaacagccactgtaatcactgcggtgggtggagcgggcggtggcgtagcggcagcgggagtgggcgtggttacaccaacaaagagcccacagcgtaacgctttccaggaagatgcttatcaggcgaacctggctggcggcgatagcgtcgataacattgaatcagctcaattggatggtggcaatccgagtggtggatcgcccggccagcgtcactcgataaactcggcggaatacacatccacaccaaagacgactcgtagcggtccgaatggtagcaccacggccagtggaacaacgtcgcccattaattaccagctgcccggcgatgactatccgtatggcatagaatatgagtcacagcaactgctataccaacagcaacagcagcagcagcaacaacagtcgcaacaacaacaacagcagcagcagcagcaacaacaacaattgccagtaggcgatgtggagcaatcgtcagcggtaacataccaaagtttgccggtcagtcgccagagttacgcttcaccgccagctctgatcattccccagcggcagtcgctgcttccctggggagctcattccaggagttcgatcatcaacgtcctgcccagttacacgcaagccgagatgcatgccttggccgccagggtggccagcgtggagacctcagctccacgacctggtgagatcgtgatgcgtaatctgttcagtgactttacggcccaagctgagaagaagatcgagctggtgatgctggagagtgccgataagaatctatcgaagctgctgcagcgcggcgaggatcagcaattcgatcagttactatccgctctgggctcagtggccgagcactgcctgccatcgttgctgcacaccttgctggcctggcatcgtcgccagttgtccgacatggagatcaagaatgacctcaagaaaccagcaccgagtggcagtagttcgcaggcggcaaccaataagcccaccgtcgatctggactttcagctgcagcgtagggaagcggctgtggagttcattttttgtctggctctcatcgagatactcaaacagttaccgtatcatccgggccacgaggatttggtgcgcagcatcgagaatctggcctttaagcacttcaagtacaaggatggtttgcagaacaatccaaatgccctcaatatccacatgattgcggatctgtatgcagaggttatcggtgtgctggctcaaagtcgatttgcatcggtgcgcaagcgtttcatgagcgagctgaaggagctgcgcggcaaggaggtgtcaccaacgaccacccagagcatcatcagtctgctgatgggcatgaagtttttccgggtcaagatggtgcccattgaggagttcgaggcgtcctttcagtttatgcacgagtgcggtcagtactttttagaagtcaaggataaggatatcaagcatgcgttggctggactgtttgtggaaatcctggtgcctgtggcggcggccgttaaaaacgaggtgaatgttccgtgcgttaagaactttgtggaactgctctatgtgcagaccttggatgcctccaccaagtctaagcatcgattggctctctttccgctggtcacctgcttgctctgcgtctcgcaaaagactttcttcctgaccaactggcattacttcctggccatgtgtttgagtaatttgaagaaccgcgatgccaaaatgagccgcgtggctctcgagtcactgtttcgcctactgtgggtctatatgatccgcatcaagtgtgagtccaactcggccactcactcccgtctccagagcattgttaactctctgtttcccaagggctccaaaggagttgtgccacgtgacactccactgaacatctttgtgaagatcatccagttcatcgcccaggagcgtctggactttgccatgcgcgagatcgtttacgatttgctgtgcgtaggtcgttcgattaagctaatcctgaatccggaacgcatgagcatcggattgcgagccttcttggtcgtcgccgattcactgcagcagaaggctggtgagccaccgatgcccagaacggtgccagtccttccatctggtaacacactgcgagtaaaaaagacgtttaacaagatgtatgttttgttaacggatgacaccgccagaagtattggaatgtctacgtactttccacatgtgcgtagggtttttgtggatattttgagagctttggatgttcattatggtcgtccactgatgatgaccaatacacagaaccagaacaaggagccggacgagatgctctccggtgaaagaaagcctcgcatcgatctcttccgaacgtgtgttgccgccgtaccgcgattgatacccgatacaatgacccctcacgagcttgtcgacatgctctccagactgtcggtccacatggatgaggagttgcgaattctaacccaccagtcgcttacgactttggtcatagatttcccggattggcgtcaggatgtcgtgcacggttacactcagtttctggtgcgcgacgtcaccgacacctatccgcagctgctggagaactgcacgcgcatcctgttcactttcctcaacatctggcggtgtgccacaaatgtgaacgggaataacactaccagtgctcctagcggagcaaccaatgtggtcaatacatcacaagccaaaatgactacggccaccacaacgacaacggtggtgcaggctacagtggttcaggtcacatcagcgccagccaaggacaccgccagcagtcagttgtccaagcagcagcatttgaatacggccagtagtgctgcatccagcataactacctcaagcggaatgtccagtatcacgcaacacaccgtgctgaacatggccagcgatgtgggcaagaagaatgaaatccctctggccaccactctgcattttgtggagggctttgccctggtgctactctgcaactatcgcacgtatctgcgcaagctggccgcgttgatactcaaggaagtaaagaatctgatgcgagcattgggtatcccagaaacggagccgccgctcatcgatgtcatggatcgttgtgtgcctggcatcatagagaagtgcctgccacagctgccgcagacggagaagacggctattctgaatgccaattgcattgatctgcagtggatagctgaaaggtcgagtggagtgtggctagctggactgacagatgacaactcgaaatcctctacgtctacgcttaacctctcgcagtccagttcaacaccgaatgcctcggcaacggcggccagctctccgcagcttccgttcgatccctgggcgacttgtttgtttggattgctggaacgacagaatgtcctgcaacagtgcccatcggctgtggcgcaggcctggccaatttgcttcacgcgcctgaatgcgttgtacagtgtcattgatcccacccccgtgagcgacaatcgagcttcgttgctgcgaagttcggcgcccaccaagaaagtgcccaccgagagccagaaggattcatatttgcgtctttggaggaatcaggtggcctgtgccatgcgactagtgccccaaattcccagtgtcgccgttcgatgtgcttcacctgacttgagtttgagtttacaagatcagtcggactcgcgttcgctgtccgattccttggacaatataccatccaatgtgtttgggcccgagggaatcgtcacgcgtttcacgctgccactctcctatggacgcaaagaggcgcgccaaaagcgacttggctcatcgccggactccctgaacgccgatcgcagtgacaagtcagcgatgggcagcgcatcaccccaagcgctctacaaactggtggtgccgctcctccggtgcgaggtcgtcgatgtgcgagatgccgccgtgaatgccttgggtctgataaaccacgatgcgctcaaggatttgatggaggagctggtggtgtacatccgtgaggcggtggactgcaagcaggagaacatgcgcaggcgacggcgacgcgatgccctgcgtctgcaggtggtgcgagtgctggagaagattgccgagaacggaacattcggtgtgagcacctgtgtgctggaacgcgacacgatgtcgctgcatcccacctttgtgctgtatatctcgggcgccatgggctatctaacgtctgagacggacaaggataatctcagcattcgcgaggtgaaggcccacttttgcaatttcatacgcaaaatgattaagaacttcccactcgaggcctgtgccacgctactctcccgagtcctgaagcgtaatctcttcaatttatttgccgcctggtgcggcagcttctccaagccacttggttacaccatgcagagcgaccatacgctcgaggaggagaagctgcagttcagcgccctgcaggcaactctgctctgttgcggtcagatcttcaatccatcgtatctacaagatgatagcattatttacaagtggctggacatgctgctgacctccaaaaacgaaaagatttaccagctggcaagggatacggtcgttctgttgctggagtccaatccggatatcggccaactattggaatgggtcatagaccgttgctatacatcgacaccacgtgaggcagatgcctgtttcctggccctggcctcgatctttagcgccaaccaagtacattacactccgcccacctcacttgccgccgtaa

SEQ ID NO: 14820 - protein, 1632 aa, DROSOPHILA
MVADDNFYFQISLYRRVLEPRLGTNQNPNEQHLSDPAASPSTSSPANNNATAGAATTSTATVITAVGGAGGGVAAAGVGVVTPTKSPQRNAFQEDAYQANLAGGDSVDNIESAQLDGGNPSGGSPGQRHSINSAEYTSTPKTTRSGPNGSTTASGTTSPINYQLPGDDYPYGIEYESQQLLYQQQQQQQQQQSQQQQQQQQQQQQQLPVGDVEQSSAVTYQSLPVSRQSYASPPALIIPQRQSLLPWGAHSRSSIINVLPSYTQAEMHALAARVASVETSAPRPGEIVMRNLFSDFTAQAEKKIELVMLESADKNLSKLLQRGEDQQFDQLLSALGSVAEHCLPSLLHTLLAWHRRQLSDMEIKNDLKKPAPSGSSSQAATNKPTVDLDFQLQRREAAVEFIFCLALIEILKQLPYHPGHEDLVRSIENLAFKHFKYKDGLQNNPNALNIHMIADLYAEVIGVLAQSRFASVRKRFMSELKELRGKEVSPTTTQSIISLLMGMKFFRVKMVPIEEFEASFQFMHECGQYFLEVKDKDIKHALAGLFVEILVPVAAAVKNEVNVPCVKNFVELLYVQTLDASTKSKHRLALFPLVTCLLCVSQKTFFLTNWHYFLAMCLSNLKNRDAKMSRVALESLFRLLWVYMIRIKCESNSATHSRLQSIVNSLFPKGSKGVVPRDTPLNIFVKIIQFIAQERLDFAMREIVYDLLCVGRSIKLILNPERMSIGLRAFLVVADSLQQKAGEPPMPRTVPVLPSGNTLRVKKTFNKMYVLLTDDTARSIGMSTYFPHVRRVFVDILRALDVHYGRPLMMTNTQNQNKEPDEMLSGERKPRIDLFRTCVAAVPRLIPDTMTPHELVDMLSRLSVHMDEELRILTHQSLTTLVIDFPDWRQDVVHGYTQFLVRDVTDTYPQLLENCTRILFTFLNIWRCATNVNGNNTTSAPSGATNVVNTSQAKMTTATTTTTVVQATVVQVTSAPAKDTASSQLSKQQHLNTASSAASSITTSSGMSSITQHTVLNMASDVGKKNEIPLATTLHFVEGFALVLLCNYRTYLRKLAALILKEVKNLMRALGIPETEPPLIDVMDRCVPGIIEKCLPQLPQTEKTAILNANCIDLQWIAERSSGVWLAGLTDDNSKSSTSTLNLSQSSSTPNASATAASSPQLPFDPWATCLFGLLERQNVLQQCPSAVAQAWPICFTRLNALYSVIDPTPVSDNRASLLRSSAPTKKVPTESQKDSYLRLWRNQVACAMRLVPQIPSVAVRCASPDLSLSLQDQSDSRSLSDSLDNIPSNVFGPEGIVTRFTLPLSYGRKEARQKRLGSSPDSLNADRSDKSAMGSASPQALYKLVVPLLRCEVVDVRDAAVNALGLINHDALKDLMEELVVYIREAVDCKQENMRRRRRRDALRLQVVRVLEKIAENGTFGVSTCVLERDTMSLHPTFVLYISGAMGYLTSETDKDNLSIREVKAHFCNFIRKMIKNFPLEACATLLSRVLKRNLFNLFAAWCGSFSKPLGYTMQSDHTLEEEKLQFSALQATLLCCGQIFNPSYLQDDSIIYKWLDMLLTSKNEKIYQLARDTVVLLLESNPDIGQLLEWVIDRCYTSTPREADACFLALASIFSANQVHYTPPTSLAAV

SEQ ID NO: 14821 - DNA, 3958 bp, DROSOPHILA
gtgagcaaaacaaggattatgtcgaggcacaccaacggatgaaggagccagaacttacgcgctcttctgcttgtactcgcgcactttgtccaggaacagctgctggatgggatcggaggccttgttcagggcaggggcaacgattccgaagttacgacgggcctctgtgcgcaggacacgcatgccactcagcagggattgcgacagcatctggaattgatagatccttgttagaatagcaataaacggccttcttcatatgtaaccttaaaaaggttatgtaatacaattgtttgtttcgacgtttcccaatcggttttcaagccgactttgctagcaactttatcttgtattcaaattgtattccctcaatcaatttttatgtattttaaatcttgttttcaccttattttcctttgcaaatgctaactttcgtgcggaaaagttacaattgtcagttcacaatggcagttggtgttagtgatgtgcgcgtgatgggtgtatgcgatactattggacgtaagctttttaaatagtaagggtatttcctaagctgattttttgctttatcctgtatttgtcagctgtatcatatagattatattcgttgcgaacaagaattttaatcaacaatccgtttaaattacttgcctctatcgaaatacagcctataataaaaatattacaaattatgaaaagctaatttatacactgtgtctgtttatgtatcttactatacatgtccaacttaaatcaaaactgctccataaacgttcataccaaaacaccacctaaactgtatctaaaatcccacacaagccaaaacccgatctaaattgaatataattaataaattcttgttttactataatatgaatatgaataatatgaatatgaactaaaaactttgaaattattctatctcatctatggactagagtgaccatgtgatcaattgcaagtgtaaccatcagccactgccgcgctcaggtcacactgctcaaccaggttccacgtcaagcgccggaaaaaaacacgacttgcatttaatcaatttatctggcgaccggacgaacggatttcgagcaagatggtgagcctgctgcaagagatcgacaccgagcacgaggacatggtccaccacgcagcgctggacttctacggcctactgttggccacctgctcctcggacggcagcgtccgcatctttcactcgcgcaaaaacaataaggcgctcgccgagctcaagggacaccagggaccagtgtggcaggtggcctgggcacatcccaagtttggcaacatactggcatcgtgctcctacgaccgcaaggtgatcgtctggaagtccacaacgccccgggattggactaagctgtaagtaaacgggcacacccataccaacaaagttatgtttgttttaggaatcgaccaggggatacccattgttaggaccttgattaataataatactttaatagcttgatccttgattaataataatactttaatagctttggaaatcattattttaatatttatgcttggacgtcttgtatcaaatgtaatttatcatttataattgtttacatcatggtattgaaaatatttaacaagaagaatcagatcttgttataataaatatatataaatatatatatatgttggtgtcctttaaattgttccctctgtcataacacaataaaatactctcttattgacgagattacgaggtagcaatgcgccatgtcatacttatgtttagatttccgttatcatttaaagagtgccacatctaacctctgtgcttgccacatttcagctacgaatacagcaaccacgactcctcggtaaactcggtggacttcgcgccatccgagtacggattggtgttggcctgcgccagttcggatggctcggtatcggtgctcacctgcaacacggagtacggtgtgtgggatgccaagaagataccgaatgcgcacacgatcggagtgaatgccatctcgtggtgccccgcccaggcaccagatccagcatttgaccagcgcgtaacttcgcgttcggcggccgtaaagcgcctagtgagcggtggttgcgataatttagtgaagatttggcgggaggacaacgaccgctgggtggaggagcaccgactggaggcgcactcggattgggtgcgcgacgtggcctgggcgccgtcgatcggattgccccgctcgcagattgccacggcttcgcaggatcgccatgtgattgtgtggagcagcaacgcagatctatccgagtggacctcgactgtgctgcacacattcgacgatgccgtgtggagcatctcgtggtcaaccaccggcaacattcttgccgtcaccggtggggacaacaatgtcacattgtggaaggagaacacggagggccaatggatccgcatcaactacgagtcgggtacggccatccagtcgaagcagccctcgcaccttccgcattcccactcccagcagcagcaggcgctacaacagcaccaacaacaggcgccatcgcatccaggtccttcctccgattcggagcatagctcgaacctgtccaactcgcagctctccaactgagccagccccgaaatattgtcgtgctgaagtcgtggttaaaagtgttactttacaaatatatatatacgaaatactatttaatgtgcccctttaaacgctgtttagtgtatgtttatttggacttcatatgggatccctatttgaatcttctgaaattataatgaattctaaagacaagtttttgtcgaaatggtatcattttttttaagttttatcaaatatatttgcaaattgtaagtagtatgtatttaaaaataatagtataataagatttaaataattaaccaaattttattcaaacttattatttttaaccatacagataaattccaaaactaaaatttttacacaatttttgaatgtcactttaggtttgtgtacaagcttgttgtaatctagtttccgaaccatgtctgcctagtactactgtgaatcaatttaagtaaaaacgaggcagaaacagcaaatagctaaaaaacattttaaattaatgaatattaaaagtaattaaaataaattgtttaattcagtagtgtataactgtaatttttggaaaccaaattggtatatagtggtatttatttccagaccgggtggtattttttaacgtgtctcgcgcgggcacactggcctctttcttttctgcgcaccacgtttccgattcgacgtcaaaatgaatgcgaaccttccgatttccaagaaacgcaaggtaattggggaaaaatgagacaggattacctccggcatgtaatgcagtgtccgtacgttcgttgtttcatcggagttgtgtgaaaaacccggccggaaagcgcgaaaatccatcggcttcggagttaacctcaaagcagatgggcgtcccaaaaactttggaactcaacaacgcgtggtgaaacaacaacaacaagaaggaggattgctaggtgtgcaatagatgtggaatgcggattataatggtttctttttgctccccagttcgtttccgatggcatcttcaaggctgaattgaacgagttcctgactcgcgaactcgccgaggatggctactccggcgtggaggtccgtgtgaccccctctcgcactgagatcatcatcatggccaccaagacccagcaggtgctgggcgagaagggccgtcgcattcgggagctgaccgccatggtgcagaagcgtttcaacttcgagaccggacgcattgagttgtacgccgagaaggtggccgctcgtggcctgtgcgccattgcccaggctgagtcgctgaggtacaagctcaccggaggactggccgtccgtcgtgcttgctatggtgtgctccgctacatcatggagtcgggagccaagggctgcgaggtcgt

SEQ ID NO: 14822 - DNA, 1513 bp, DROSOPHILA
tcaaccaggttccacgtcaagcgccggaaaaaaacacgacttgcatttaatcaatttatctggcgaccggacgaacggatttcgagcaagatggtgagcctgctgcaagagatcgacaccgagcacgaggacatggtccaccacgcagcgctggacttctacggcctactgttggccacctgctcctcggacggcagcgtccgcatctttcactcgcgcaaaaacaataaggcgctcgccgagctcaagggacaccagggaccagtgtggcaggtggcctgggcacatcccaagtttggcaacatactggcatcgtgctcctacgaccgcaaggtgatcgtctggaagtccacaacgccccgggattggactaagctctacgaatacagcaaccacgactcctcggtaaactcggtggacttcgcgccatccgagtacggattggtgttggcctgcgccagttcggatggctcggtatcggtgctcacctgcaacacggagtacggtgtgtgggatgccaagaagataccgaatgcgcacacgatcggagtgaatgccatctcgtggtgccccgcccaggcaccagatccagcatttgaccagcgcgtaacttcgcgttcggcggccgtaaagcgcctagtgagcggtggttgcgataatttagtgaagatttggcgggaggacaacgaccgctgggtggaggagcaccgactggaggcgcactcggattgggtgcgcgacgtggcctgggcgccgtcgatcggattgccccgctcgcagattgccacggcttcgcaggatcgccatgtgattgtgtggagcagcaacgcagatctatccgagtggacctcgactgtgctgcacacattcgacgatgccgtgtggagcatctcgtggtcaaccaccggcaacattcttgccgtcaccggtggggacaacaatgtcacattgtggaaggagaacacggagggccaatggatccgcatcaactacgagtcgggtacggccatccagtcgaagcagccctcgcaccttccgcattcccactcccagcagcagcaggcgctacaacagcaccaacaacaggcgccatcgcatccaggtccttcctccgattcggagcatagctcgaacctgtccaactcgcagctctccaactgagccagccccgaaatattgtcgtgctgaagtcgtggttaaaagtgttactttacaaatatatatatacgaaatactatttaatgtgcccctttaaacgctgtttagtgtatgtttatttggacttcatatgggatccctatttgaatcttctgaaattataatgaattctaaagacaagtttttgtcgaaatggtatcattttttttaagttttatcaaatatatttgcaaattgtaagtagtatgtatttaaaaataatagtataataagatttaaataattaaccaaattttattcaaacttattatttttaaccatacagataaattccaaaactaaaatttttacacaa

SEQ ID NO: 14823 - protein, 356 aa, DROSOPHILA
MVSLLQEIDTEHEDMVHHAALDFYGLLLATCSSDGSVRIFHSRKNNKALAELKGHQGPVWQVAWAHPKFGNILASCSYDRKVIVWKSTTPRDWTKLYEYSNHDSSVNSVDFAPSEYGLVLACASSDGSVSVLTCNTEYGVWDAKKIPNAHTIGVNAISWCPAQAPDPAFDQRVTSRSAAVKRLVSGGCDNLVKIWREDNDRWVEEHRLEAHSDWVRDVAWAPSIGLPRSQIATASQDRHVIVWSSNADLSEWTSTVLHTFDDAVWSISWSTTGNILAVTGGDNNVTLWKENTEGQWIRINYESGTAIQSKQPSHLPHSHSQQQQALQQHQQQAPSHPGPSSDSEHSSNLSNSQLSN

SEQ ID NO: 14824 - DNA, 3306 bp, DROSOPHILA
atcctctccacgctgcaacttaaggagctcgaggcgctcacaccagggccaaatcatatagtccagaatgcccgtctgctcgccaccaaagaattccgtaccacgtcgagccagctccctttcgtagatgtccaggccgctccagaagggctccagatcaccgccatcggatgccttgaagaaggcacctaacaccgctctaaatcgctcgattagtaacttgtcctgcactttcttcagcggatcacgtggatagagtggtcgcaatggatactgctcgtccagatattcacaaatcagtagcgactctgtgagcacaggtggtccaggttctcgcacgatttctagagccggcaccttgccctgtggattcttctccagcagccactccggcttgtctgtgagattaatgtagatgctgtgatacgggatctgcttggcgtccaggaccagatgcacccgttgggcaaatgggcagaagcgcatcgagtacaggcgaaggataccatcttcgggaacatccggcatgggtgagcctagtgggcgcatttattatcaattatgattatcctggtttcctggctctacccaccttttgccaaatgcctgccgttactcatgatgtgcgtgctcgggtccagagatgcaagtggtgatagcgattgtcattcgagtgatttataaagtgcagctcactgcccttcgccggttggcttcgcttacgcggctgaacttggtggcttgcggctgacacacataccaagccatgtggatacagtgaagcccccttgcaacctgcatattgctccaaaatatttgtttaaaacaaaactttttaagaactaagtttttcgaaccacgttctgtgaatctggaacggaattcttgcctttctagccttaattcatttctttgtcacataaaatattttagtttttattgtttttagaacattattaaatctcctttgttatataatagtttcattttcagtaccgatctaagccagcagatcgtagtttgcattgccggccttgcgggtgcgccagaactcgttgtgctgctcgggagtggcatagaaggactgcaccaccgagtccgccttcaggagggcaatccacttggtgatcttcgggaaacgactctcgttgaagttgtactccttctgcaacttcaactcgattacagagaggcgttcgaaccagggccagatcatgtagtccacgaatcccggcttgttgccgccaaaatatggggtgccccgcttggtcaactcctcctcaaagatatcaagtgccgtccagtaatcctccagaccggtgccctgcacaaggatgtttatgaaggcactggtgatgctgctgaaacgttccagcagaatcttgtcctgtgcccgcttcaatgggtccttgggcagcaacggattctccgggtacttatcgtccagatactcggcaataatcagcgactcgatgagcgagggctcacccttctccgccaccagctgcagggcaggcaccttaagcaacggactcacttccaccagccactctggtttctcggtgagattgatgtagacactgtgatagggcacattcttggcgttcaggacgagatgagcccgctgagcgtagggacagaacctcatggagtacaggcgaaggactccatcgtcagggagtacaggcttgggggaacctaaagatagaatttatttaccagttaaatttaggttatacaaataaatcaataacttcatgagtcacttgtggaaccctaaaatccacccctgtattattatttgtttagcaagtcattgcacttaagttaatgttgatagggcccagtcgtgataaagctcaaattttgtagctacgttatcttttagagtgtaaatattatgggttatctgatatcggggtgaaagctatagctaaaaatgtaagtaaattttacaaatcaaataattaatttaatgcattacctacaattgtaaaagaataaagatcgtattgaaatttaccaaataatatacctttctaactttttaaccaaaaaatcccagttattcatgccaatattctttaacattatgaaatataaaaatcgttattcgataattacgctgaatgttggagaacttgttttataaataatactataaacactctaatgacatgggcgtttctcttggcggcggcgacaactggttttgcttgctctcttacctttggccaaatgtttaccagaactcattttgtttaattgcagaactgaacaaattcgcttaactgttgaaatgtcgacggtgaaatgcgaactgagttttctcttcgacggcgctctgtttatataaagttttttgtttgtgttttaacgcgaataagaataatcgagctttttgcgacgtgactcttagttttcgttagcttttaaaaacgatttctcatcgcagacgtttatttcgatttaaaacgctttactacatttgcgatttgttttgtgggaagagacaatcatttcctccgcattatacatagtacatctacttagtttgttaataatcacgcctgtttgtaaatatagatatattttgtttttacatggtttggggggagctttatttttgtttttaattgaacctcggaactactacgtacatttagagttttaagtttatgaacttttcgtaaaaagtttcgatcggcggactttcgaaatcaaacttaatctatgtacaaaaaagttctcgaaatttccgttcatgccttacaaaaaatacaaaaaagtattaatacatatacaacagagttgctgacatcattgagtcgcgataaatagttgttatcagtaattgcattcgaaaaaccaaattggaaagtaataaataatgacaactacacttgctgctggaattaattgtttatcaaaatgtaaaaagatcctttcgctgcttttggtcctacaaatgggatttcttttgatgcatccttttgaaaactcaagtggatgattaatttttagtttttaattcattttaaaaatgtccgcaaatggtaaacattaaaatttaatgattaaactgtatcgttttttttcccgaatcaattgcgcgttgttgttacggtaaatacatgggataaatagctaaaactaagtaaatacgtacacttaaaaaaattctacacactggagttaaatgttgctttgctttcgtttctgaatttcttgctttgtcttgttttgcatcgttgcctgacgatttccattctaagtttcgtttatagtttcgttaatttttttttg

SEQ ID NO: 14825 - DNA, 776 bp, DROSOPHILA
tcgacatttcaacagttaagcgaatttgttcagttctgcaattaaacaaaatgagttctggtaaacatttggccaaaggttcccccaagcctgtactccctgacgatggagtccttcgcctgtactccatgaggttctgtccctacgctcagcgggctcatctcgtcctgaacgccaagaatgtgccctatcacagtgtctacatcaatctcaccgagaaaccagagtggctggtggaagtgagtccgttgcttaaggtgcctgccctgcagctggtggcggagaagggtgagccctcgctcatcgagtcgctgattattgccgagtatctggacgataagtacccggagaatccgttgctgcccaaggacccattgaagcgggcacaggacaagattctgctggaacgtttcagcagcatcaccagtgccttcataaacatccttgtgcagggcaccggtctggaggattactggacggcacttgatatctttgaggaggagttgaccaagcggggcaccccatattttggcggcaacaagccgggattcgtggactacatgatctggccctggttcgaacgcctctctgtaatcgagttgaagttgcagaaggagtacaacttcaacgagagtcgtttcccgaagatcaccaagtggattgccctcctgaaggcggactcggtggtgcagtccttctatgccactcccgagcagcacaacgagttctggcgcacccgcaaggccggcaatgcaaactacgatctgctggcttag

SEQ ID NO: 14826 - protein, 241 aa, DROSOPHILA
MSSGKHLAKGSPKPVLPDDGVLRLYSMRFCPYAQRAHLVLNAKNVPYHSVYINLTEKPEWLVEVSPLLKVPALQLVAEKGEPSLIESLIIAEYLDDKYPENPLLPKDPLKRAQDKILLERFSSITSAFINILVQGTGLEDYWTALDIFEEELTKRGTPYFGGNKPGFVDYMIWPWFERLSVIELKLQKEYNFNESRFPKITKWIALLKADSVVQSFYATPEQHNEFWRTRKAGNANYDLLA

SEQ ID NO: 14827 - DNA, 3883 bp, DROSOPHILA
tggtggccatggcagatttcgtacgaccagtaggcctcgatgcggtacgtgcaagtcagggcggagaaaatgggctgcagcagagtaattggagctgcggaattcggaaattatgtataatccaatgggatgttagttgcaatgccaatttcttacacaactctggcttgtcggacttttcctcctctttttggtgttccaaagtgggaatcaggcagtcgtacttctccttatccggcgtgtagaatgttcgcagctgattgcccaagctctaaacagcattacttaaggaaatttgtttatgtctgcattaataaatttgtactcactggctgcacatctaaatccggcacttcgaaatcaattttatacaaaattgaatcgtcaaaatctttggcttcgtgggaaaccgctgcaattattaaattcagcagcaatgctattctcgcaattatcacgtaggacttgcccattttcgtgtttaaggcagcgatttctttacatgagtattttcgtgacaatatacaaatagttgcaaatgctacgtgttgtttttctcaaaaaaataaggaacatatgttgattgtgtgtgcggcactgtgaatggttactgcgaaagaagaagaaaatctgctggcctgcatgggcattttagcttggaaatagctaaatatcaaaaaataacagtcgcagtcgacggcacatacaaattttttgaattcaaattctttaaaatctaagttttgcatttaaatctagtcattgaatatttctcattaacaaaatacaaaattttatctcttaaacttaactgaatgttttcgtatttattgcagatttaatggtcattcatcataaaatcttttaagaatctgtatgaaaatccaaaataagtcgagaaactaaagccacgtcctccaacaaattaaactcagttcccagtttatcttcaacataattatattttccttaacaaatatcgcatatggtagtcagttccctatctcattcccagcgccggcgtgtccttttgcgccgtggaccagccgagctccttgtccttatcatgatccactggcaccttgtcgatggcatccagtataaactggatggaatgcgccgtccgtggcagccactccatgatacgagaggtggtcgagacgggcggtgtcgctgcatcgccgtcatccacgaaatccgcatctccgccggacaacgaacgaactccacccaggtaatccgtgtagtcgtaatcactggtcagcggattcaccttggagtagtaaatggcagcgaacgtcgagtagataatcagcagtgctgtgcccacctataagttttatatacatatttaaaacgattatattacacattgcactcatatactttatgtattttcactcacctgaaagacggcccagaacttgtaggagccctccgtgatgacgaaatcgtagtatcctttgagaggatcacccttgatatagcgaccctcgcccacatccgtgtcggccttgtcctccgcctcggcatcgcgtctttggcgcagtccacgcaccgatctcagatttcccttttccccctttagtgccgagactttggtggcgggtgccgatggtgtgactgtctcaactttctccactgtcttctgcgactgttcctcctcctccgcttcctcctcctcctcatcagagacatctggagcagctgtcgtcgtcgtcgtcgtggttgccttagttgtcgttgtagccggcctcttgttctggttctttttgtttccctcgatgcgcggcggttttttggagtttatcctgttcttctgctgctgctgctgacgcagttgctccttctcggctttcttcgccgcctgctcttggcggaacttctcagtgctctgctgatggcgttcgctgaccgcgttccaggcactcatcagtgcctgatacagatcccagatctgcttgaggctcttcagcacggtgaccagtgtggattcactttggatttggactactgcattgtcggacgtgggctgagattgtttggccatcgctgtttccggatgtgggcgcggctggaagcccatgggatagtcgtacatctcatcgtaggcgggataaggcgatctgtagaaaaatacatacgtttcgtttatgttgttgtaataatttcatccaacacccatgacccagatctagttggattaagcatttctcacctgctaggagctaaagacgcctgaagctttctattattgccctcggcagcgggatgagtagcgactggagctggctgctgtttatatgaccacggagcgtagaaggaatcgtagggacgtgcctgctgtgacctgccctcaccggtgtattccttatcatagaaacgctcatcctcttccgactcctgcttggactctgcactgggatatcgttcaggtccgtagtcatcggccacatcgtagtacggatcctgctcgtaggaatcctcgcgactctgcggcggaccgtaggcatcctggcgttgtcccaacacgggagaatccatgctctctgcattcaccaccaccgcctgctgctcctcgtagaagtttctgccctgctgcgatgcggatgcactcggattgcttgcatttccggcatccctagcaattcgctccaccgtggcaatttctgtatcattatcggcaccggacttgaaatgattccacatgcgcgtaaggattaggagatcgctttctccgcccgcgttgctctgtgcccgtccagcttcgatcacggccagcgccgttaaggtggtggcaaagagaagaaacgtgaccaccagaaaccatatgggtgagaggcgtcgtggcgccttcgccggcattttctcgtaggcagacattatccgtttgtcactattgattctattgtttcgaatcctggttcagcacacaccgcacggccagttggctcggagttaagtcgacaactaaccgaagatgtcccaatgctgagccagaaaaactccgcccggcaatggtgctaatggcgggtttttgggtatctagaacatccatccgtagtggctcgttgaaaggtgctaatccgcgggccgcgtgcatcatcgttattgggccagtgctccagtttcgatttaacggttcatccaagccaccaagtgccgcggcaattagcaccatccatatcaccaatgtagccagtactacgatcccatcccatccgatgctaacttccattctccattcagttatgcataattcccgattttgttgttcgccacaaattcgtttttttttttcgcggtgaaagtgtgcaatatgattctctttccagaagatggactatggaatttaggaaatcgtaattggaatggctttgtgccgttggagcacaaagatccacgcctgtggagtggccgccatcgaggtccgtcgtcggtcgtgtgccaggcgaagatcacgatctaggaagctgcatacatgcccatatttagacacaaatcgtggcaagcgtgcgactttcattaatggggttgaaaagaaatctatttctacaattaagatacgttaagtcaacatcaatggggtgtttgtacattggtgagatcgccttaacgattcgaaatttgaagacaacaccattttaaaaatgctaatacacagttttttttgggaaattggtatactacacaaagtaaccaaaaagaaaggatatcgtattagaatattgtatacacatatgagcttatcatagtttattatatagatacatataggtagccacctattaaaactcatatcttagaaaagaaagcgatgttaacaattttattctttaatgcgaattgaaatgaaatgaaaattgctcatgttatgaagtta

SEQ ID NO: 14828 - DNA, 1716 bp, DROSOPHILA
atgtctgcctacgagaaaatgccggcgaaggcgccacgacgcctctcacccatatggtttctggtggtcacgtttcttctctttgccaccaccttaacggcgctggccgtgatcgaagctggacgggcacagagcaacgcgggcggagaaagcgatctcctaatccttacgcgcatgtggaatcatttcaagtccggtgccgataatgatacagaaattgccacggtggagcgaattgctagggatgccggaaatgcaagcaatccgagtgcatccgcatcgcagcagggcagaaacttctacgaggagcagcaggcggtggtggtgaatgcagagagcatggattctcccgtgttgggacaacgccaggatgcctacggtccgccgcagagtcgcgaggattcctacgagcaggatccgtactacgatgtggccgatgactacggacctgaacgatatcccagtgcagagtccaagcaggagtcggaagaggatgagcgtttctatgataaggaatacaccggtgagggcaggtcacagcaggcacgtccctacgattccttctacgctccgtggtcatataaacagcagccagctccagtcgctactcatcccgctgccgagggcaataatagaaagcttcaggcgtctttagctcctagcagatcgccttatcccgcctacgatgagatgtacgactatcccatgggcttccagccgcgcccacatccggaaacagcgatggccaaacaatctcagcccacgtccgacaatgcagtagtccaaatccaaagtgaatccacactggtcaccgtgctgaagagcctcaagcagatctgggatctgtatcaggcactgatgagtgcctggaacgcggtcagcgaacgccatcagcagagcactgagaagttccgccaagagcaggcggcgaagaaagccgagaaggagcaactgcgtcagcagcagcagcagaagaacaggataaactccaaaaaaccgccgcgcatcgagggaaacaaaaagaaccagaacaagaggccggctacaacgacaactaaggcaaccacgacgacgacgacgacagctgctccagatgtctctgatgaggaggaggaggaagcggaggaggaggaacagtcgcagaagacagtggagaaagttgagacagtcacaccatcggcacccgccaccaaagtctcggcactaaagggggaaaagggaaatctgagatcggtgcgtggactgcgccaaagacgcgatgccgaggcggaggacaaggccgacacggatgtgggcgagggtcgctatatcaagggtgatcctctcaaaggatactacgatttcgtcatcacggagggctcctacaagttctgggccgtctttcaggtgggcacagcactgctgattatctactcgacgttcgctgccatttactactccaaggtgaatccgctgaccagtgattacgactacacggattacctgggtggagttcgttcgttgtccggcggagatgcggatttcgtggatgacggcgatgcagcgacaccgcccgtctcgaccacctctcgtatcatggagtggctgccacggacggcgcattccatccagtttatactggatgccatcgacaaggtgccagtggatcatgataaggacaaggagctcggctggtccacggcgcaaaaggacacgccggcgctgggaatgagatag

SEQ ID NO: 14829 - protein, 571 aa, DROSOPHILA
MSAYEKMPAKAPRRLSPIWFLVVTFLLFATTLTALAVIEAGRAQSNAGGESDLLILTRMWNHFKSGADNDTEIATVERIARDAGNASNPSASASQQGRNFYEEQQAVVVNAESMDSPVLGQRQDAYGPPQSREDSYEQDPYYDVADDYGPERYPSAESKQESEEDERFYDKEYTGEGRSQQARPYDSFYAPWSYKQQPAPVATHPAAEGNNRKLQASLAPSRSPYPAYDEMYDYPMGFQPRPHPETAMAKQSQPTSDNAVVQIQSESTLVTVLKSLKQIWDLYQALMSAWNAVSERHQQSTEKFRQEQAAKKAEKEQLRQQQQQKNRINSKKPPRIEGNKKNQNKRPATTTTKATTTTTTTAAPDVSDEEEEEAEEEEQSQKTVEKVETVTPSAPATKVSALKGEKGNLRSVRGLRQRRDAEAEDKADTDVGEGRYIKGDPLKGYYDFVITEGSYKFWAVFQVGTALLIIYSTFAAIYYSKVNPLTSDYDYTDYLGGVRSLSGGDADFVDDGDAATPPVSTTSRIMEWLPRTAHSIQFILDAIDKVPVDHDKDKELGWSTAQKDTPALGMR

SEQ ID NO: 14830 - DNA, 4530 bp, DROSOPHILA
cttacaacaatagatgcacatactgacactcgccgcacacttacactcgcacagatgggcaaaatattgaaaaattgccaaaataagagaccagacatttttcgaatgtcgaaagcaagacatactatagacaccatataaaataatgggaagacctcttgaaaactcaccatgctcataaggcgaaaaggttccagcatctatattgatataggggtcaatcttgatcgaggttacatccagaccacaggatttcaaaagcgttccgaacgaggaggcaatcactccttttcccacgccactaatgacgccaccagttaccaggatgtatttcatcctttcgtctcgaatgtcaatctttgggatcaccaaatgtggaggattatcgtgttatcggttcaattcgcggtggacactcaatctgaggcaatccgagccacaatttattgtttatttgcctttgctgcacgtggttttagaaattggattcgtttaatatctcatacgtatttatggtatgaccaccgctcatttcattgagaataccagtgactcaccgtgtgttgttaaacgtcacaaaaaccgcgcggtttcctatgcattaaaattgagttcccgcaaaaataaacaagaatcaaatgtaattttagcatagcagtgaggactggttacatatttatttggaaacttgcgatttaaatctaaagaaaaaatggcctataattcgtattactttcccttgtttatatttttactctttgtgtatagtttgcgtttttaaaaggaatttcacgttttatattaccaattttaagtgtaaataaatcataatatccggtaaatttgaattgtcatagatccaaacaactttaaatgtgcatatttaaaattatattaaataatttaaaaagaaatttcaccgagaaaaaatattttttgaaaataaacatcaaattcatattgaagataaacacactcccatttcaaagcgcaaagcattaaatgttgcatatttattgaattttataagaaattattgaattattgaattttatttatacaaaaataagaaaactttgaaactctgtaaatgcgtgccaagcgaaagaaactccttgatcaaccagttacttgctggcctcctgctgttcgaacagaggatactgttcggtgacactctcccaggtggttctcgccgtcgacaagtccttgacgacgcccacaacctcctccagaccgacgcgcacctgtttcatagtattccgatctcgcagagtcaccgtatgcggttcctttagagtgtcgaagtccacggtgatgccatagggtatggcaatctcatccgtgcgggcataccgcctgccaatggatccactggagtcgtccaccttgtgcgaaagttccgccttggtcagggcagaagacagtttctgagtataaggttgaaagtcggtgttgttggacagcggaaggatggagcacttgatgggcgccaccagaggcggtagcgtaaagtagcaccgctgctcgtcgccgtcgcggcattggaaactgtgctccaacagggagtacatgatgcgaccaatgccgaatgaaggctcaaccacactcgggatgaactcctccacatggaccgttttcgtagagtgcttaacgctgatggtgtcctttccgagatcgtggctttggccatcggccgtggtcagtttgtattgaccatcgccagccagctgttcctctaccttggttatctcctccagcgaaagcttagccaacgcatccgtgatgttctttgcctccttcttgaaggtctttccgagagcctgcttgtttggcacaatctcgctgacctcgaccgttttgggagccggcagacgcttctcggccaccaaacgcacacctgtggcggccgtatgctgtcccaaatcgtaggcactgcgatccgcacatcctacgcactccacccatccgtaggaggtaagaatttcggcatcccagcaatcgcatgcatagtgagccatctcattggacatgtgctgccggaatcgcaagcactccggtttgataccaatggccaacaggaactgctgaatgcgggccatatagtaaccaagtgtctcattagccaccagtttggatgccactgcttcgccgatttgcacctgagcggcagactttccatccatctggttgcacgccgagtaaagggtcaacttttccgatttgatgttgccaaatttgggatggtccttgagcacgggatcacagaaatgttcaatctctgccatggtgaactctcgcacacggatcaatcccgatcggggtgagatttcattgcggaaggagttgccaatttgagccacagcgaagggaagcttgccttgattgaattccagcagtcgcttgaagttgacgaagataccctgggcagtttcgggccgcaggaatcccttgaccaagccagtgggtccaatttgggtggcaaacatcaggttgaactcaatcggttctgttaaatcattgccggttaatggagatttgatgttgtatttggccaggacaccagccaattcctgtttgttcaggccatccagtttaatgataatatcctcacactcggcctgcagggcgggagttgcatccttggccttagatagcttttccaaagcctgcttaatgagatgatccaggcggaagcactcgccggtcttgacatccttgaccatcagatcagcgaaacgctccacatgaccagaggctttgagcacaggttcgggagtcagaatagagcagtccacctccagcatttgctcttcgagggcgaaatactgacgccatagggccagaatgttggacttgagggcacagcccatgggtccaaaatcgtactggccggtgatgccgccataaattgcgaaactctggtcgtagaagaagcgacgcttgagtagatcctccatcttcgcgcgatcgaaactaacgacactgggggtcagggcgagctctttgtcctccagcagcttcttgcgtgccttcagctcggctactgcctttttcacatcgatctcgggggcacccttcgccttgagatccctcaccaggttaccctgctcctgaactcgttccctcaatggggcaagttgagcctcaatctcgggattcgacatgatgaactcggcagcggcggatcttagttttacctttctattttgcttcttggtgccccaacttgtggttgcagctggctgctgcggttgcgttggtggaggtggtggtggtgcggagggagtaggttttgtggtagtggtgctaaaaaacactttcgtggcaatgtgctcgctccacgttgttcttgcaatctgagttctcacggctgtggtggcgctgcgcaggtggggtagcgcttttaacaactgcaatgacataaagaggcttttattttttcagccgaaaaacgcgaatttatgtaataaaccgtccaattggctactgctgcaataccttcactttcggctgcaatttcgacttggatgagtcttagtcggccggcttgcagcactgtctttgcacaacactgattatggttaacagagctgctcagtgatgcgcaatgttgcgactttggtaaatgttatttgtttttattgttttatatttattttttatttgctatatttggtaaatgtgtcttggatagtttggtttcaacatagtttcaacatattctttcatctttacttatagttgaataagcgatggaattattatttaataatattaaaaaattaattaaatttaaaaacaatgctctgataaaattaaggtatcccaaaatcactgttaccgtgtcggcaacattgatcacttgtccctaacagggcggctgataataacagcaccttatgatgtttttcagcactccagtacatcgatatcgggtagggccttcttcgttatcgatatgtttagtttttgttttaattatgtaggcgcagcattgcagtctggtttttcccatataatttgctcaattttggtttagttcggccgaactcaagtgctgcccaaaccaattgctcaaacgcgtagcgcacaaattgaaaaacaagcggttaatgtgaaaaacaggacgagtttagttgttttctatccgaggggacgcggcgttgcaacaacagcgacgctatgcgaccgcatttcgagcgataaaacagaaaggtgtgcttctctctccctctctcggcactctctcacctgagctgctaatacaaatgttgttttcctgccaattttccgaaatctttattgcaaacacttaaaaaattaactcattcacaggcgctgccacacataacggttgatgtttgtttttacgacaacgcacacacacgtacaccggccaaagaggcagcggtcacaacaacaaaggtcttcgttcggtgagttgcgagttgtttttgtttaaccgtttttcgttcttgacctgtttttgttgttgtcttgttgttttctttttttttatgagtgggc

SEQ ID NO: 14831 - DNA, 2454 bp, DROSOPHILA
ccaagtcgaaattgcagccgaaagtgaagatgtcattgcagttgttaaaagcgctaccccacctgcgcagcgccaccacagccgtgagaactcagattgcaagaacaacgtggagcgagcacattgccacgaaagtgttttttagcaccactaccacaaaacctactccctccgcaccaccaccacctccaccaacgcaaccgcagcagccagctgcaaccacaagttggggcaccaagaagcaaaatagaaaggtaaaactaagatccgccgctgccgagttcatcatgtcgaatcccgagattgaggctcaacttgccccattgagggaacgagttcaggagcagggtaacctggtgagggatctcaaggcgaagggtgcccccgagatcgatgtgaaaaaggcagtagccgagctgaaggcacgcaagaagctgctggaggacaaagagctcgccctgacccccagtgtcgttagtttcgatcgcgcgaagatggaggatctactcaagcgtcgcttcttctacgaccagagtttcgcaatttatggcggcatcaccggccagtacgattttggacccatgggctgtgccctcaagtccaacattctggccctatggcgtcagtatttcgccctcgaagagcaaatgctggaggtggactgctctattctgactcccgaacctgtgctcaaagcctctggtcatgtggagcgtttcgctgatctgatggtcaaggatgtcaagaccggcgagtgcttccgcctggatcatctcattaagcaggctttggaaaagctatctaaggccaaggatgcaactcccgccctgcaggccgagtgtgaggatattatcattaaactggatggcctgaacaaacaggaattggctggtgtcctggccaaatacaacatcaaatctccattaaccggcaatgatttaacagaaccgattgagttcaacctgatgtttgccacccaaattggacccactggcttggtcaagggattcctgcggcccgaaactgcccagggtatcttcgtcaacttcaagcgactgctggaattcaatcaaggcaagcttcccttcgctgtggctcaaattggcaactccttccgcaatgaaatctcaccccgatcgggattgatccgtgtgcgagagttcaccatggcagagattgaacatttctgtgatcccgtgctcaaggaccatcccaaatttggcaacatcaaatcggaaaagttgaccctttactcggcgtgcaaccagatggatggaaagtctgccgctcaggtgcaaatcggcgaagcagtggcatccaaactggtggctaatgagacacttggttactatatggcccgcattcagcagttcctgttggccattggtatcaaaccggagtgcttgcgattccggcagcacatgtccaatgagatggctcactatgcatgcgattgctgggatgccgaaattcttacctcctacggatgggtggagtgcgtaggatgtgcggatcgcagtgcctacgatttgggacagcatacggccgccacaggtgtgcgtttggtggccgagaagcgtctgccggctcccaaaacggtcgaggtcagcgagattgtgccaaacaagcaggctctcggaaagaccttcaagaaggaggcaaagaacatcacggatgcgttggctaagctttcgctggaggagataaccaaggtagaggaacagctggctggcgatggtcaatacaaactgaccacggccgatggccaaagccacgatctcggaaaggacaccatcagcgttaagcactctacgaaaacggtccatgtggaggagttcatcccgagtgtggttgagccttcattcggcattggtcgcatcatgtactccctgttggagcacagtttccaatgccgcgacggcgacgagcagcggtgctactttacgctaccgcctctggtggcgcccatcaagtgctccatccttccgctgtccaacaacaccgactttcaaccttatactcagaaactgtcttctgccctgaccaaggcggaactttcgcacaaggtggacgactccagtggatccattggcaggcggtatgcccgcacggatgagattgccataccctatggcatcaccgtggacttcgacactctaaaggaaccgcatacggtgactctgcgagatcggaatactatgaaacaggtgcgcgtcggtctggaggaggttgtgggcgtcgtcaaggacttgtcgacggcgagaaccacctgggagagtgtcaccgaacagtatcctctgttcgaacagcaggaggccagcaagtaactggttgatcaaggagtttctttcgcttggcacgcatttacagagtttcaaagttttcttatttttgtataaataaaattcaataattcaataatttcttataaaattcaataaatatgcaacattt

SEQ ID NO: 14832 - protein, 765 aa, DROSOPHILA
MSLQLLKALPHLRSATTAVRTQIARTTWSEHIATKVFFSTTTTKPTPSAPPPPPPTQPQQPAATTSWGTKKQNRKVKLRSAAAEFIMSNPEIEAQLAPLRERVQEQGNLVRDLKAKGAPEIDVKKAVAELKARKKLLEDKELALTPSVVSFDRAKMEDLLKRRFFYDQSFAIYGGITGQYDFGPMGCALKSNILALWRQYFALEEQMLEVDCSILTPEPVLKASGHVERFADLMVKDVKTGECFRLDHLIKQALEKLSKAKDATPALQAECEDIIIKLDGLNKQELAGVLAKYNIKSPLTGNDLTEPIEFNLMFATQIGPTGLVKGFLRPETAQGIFVNFKRLLEFNQGKLPFAVAQIGNSFRNEISPRSGLIRVREFTMAEIEHFCDPVLKDHPKFGNIKSEKLTLYSACNQMDGKSAAQVQIGEAVASKLVANETLGYYMARIQQFLLAIGIKPECLRFRQHMSNEMAHYACDCWDAEILTSYGWVECVGCADRSAYDLGQHTAATGVRLVAEKRLPAPKTVEVSEIVPNKQALGKTFKKEAKNITDALAKLSLEEITKVEEQLAGDGQYKLTTADGQSHDLGKDTISVKHSTKTVHVEEFIPSVVEPSFGIGRIMYSLLEHSFQCRDGDEQRCYFTLPPLVAPIKCSILPLSNNTDFQPYTQKLSSALTKAELSHKVDDSSGSIGRRYARTDEIAIPYGITVDFDTLKEPHTVTLRDRNTMKQVRVGLEEVVGVVKDLSTARTTWESVTEQYPLFEQQEASK

SEQ ID NO: 14833 - DNA, 2845 bp, DROSOPHILA
aaatattaaacccatatataaagtagaccatcaaatgttatttctaccttttcaactgggatttgggtcagtgcttttattcctgccaattaatcaagcttacattgatcttacaggttccaccaagcccgagctgccagaagatggagttcctcgtttcttttccatggcattctgccccttcagccaccgagttcgtctgatgctggccgccaaacatattgaacatcataagatctacgtcgatttgattgagaagcctgaatggtacaaggatttcagtcctctgggcaaagtgccagccctgcagcttactggggtgaaggaccaaccgaccctcgtggagtcgctcatcatagcagagtacttggaccagcaatatccccagacgcgactctttcccacggatccgcttcagaaggcgctggacaagattctaatcgaacgttttgctccagtggtcagtgccatttatcctgtgctgacttgtaatcccaacgctccgaaagatgccataccgaacttcgagaatgccttggatgtttttgaagtggagttgggcaaaagaggaacgccctactttgccggccagcacattggaatcgtggactacatgatttggccttggttcgaacgttttcccagcatgaagatcaatacggagcaaaagtatgagctggatacaaaacgatttgagaagctggtatgtttaagtaatccaacataagatgatgcatgtatctcatcaaaaatccattacagctcaagtggcgcgatttgatgacccaggatgaggttgtgcagaagacagctttggatgtccagttgcatgctgagttccagaaatcgaagacccttggaaatccccagtacgacattgccttcaagggtacaccatagaacgacaactggtttagacaagatcaaatctttggaaccggttatggactgcatttatgttttattcattccatgcgaaaaattcaataaaccaagtgcatcaggcatccttgaccagcagattgtaattgggtcgacccaggctccgtgtacgcaggaactccgcctgaacctcggcctccatgtagaaggccatcacagccggatctcgtttcatgcgttccagccaaagggtctgaaaaatggtatactaatgtacttcatcactcctgggatacacggacctgctcaccagctgggggaagcgactctgatcgtagttataatcctctccacgctgcaacttaaggagctcgaggcgctcacaccagggccaaatcatatagtccagaatgcccgtctgctcgccaccaaagaattccgtaccacgtcgagccagctccctttcgtagatgtccaggccgctccagaagggctccagatcaccgccatcggatgccttgaagaaggcacctaacaccgctctaaatcgctcgattagtaacttgtcctgcactttcttcagcggatcacgtggatagagtggtcgcaatggatactgctcgtccagatattcacaaatcagtagcgactctgtgagcacaggtggtccaggttctcgcacgatttctagagccggcaccttgccctgtggattcttctccagcagccactccggcttgtctgtgagattaatgtagatgctgtgatacgggatctgcttggcgtccaggaccagatgcacccgttgggcaaatgggcagaagcgcatcgagtacaggcgaaggataccatcttcgggaacatccggcatgggtgagcctagtgggcgcatttattatcaattatgattatcctggtttcctggctctacccaccttttgccaaatgcctgccgttactcatgatgtgcgtgctcgggtccagagatgcaagtggtgatagcgattgtcattcgagtgatttataaagtgcagctcactgcccttcgccggttggcttcgcttacgcggctgaacttggtggcttgcggctgacacacataccaagccatgtggatacagtgaagcccccttgcaacctgcatattgctccaaaatatttgtttaaaacaaaactttttaagaactaagtttttcgaaccacgttctgtgaatctggaacggaattcttgcctttctagccttaattcatttctttgtcacataaaatattttagtttttattgtttttagaacattattaaatctcctttgttatataatagtttcattttcagtaccgatctaagccagcagatcgtagtttgcattgccggccttgcgggtgcgccagaactcgttgtgctgctcgggagtggcatagaaggactgcaccaccgagtccgccttcaggagggcaatccacttggtgatcttcgggaaacgactctcgttgaagttgtactccttctgcaacttcaactcgattacagagaggcgttcgaaccagggccagatcatgtagtccacgaatcccggcttgttgccgccaaaatatggggtgccccgcttggtcaactcctcctcaaagatatcaagtgccgtccagtaatcctccagaccggtgccctgcacaaggatgtttatgaaggcactggtgatgctgctgaaacgttccagcagaatcttgtcctgtgcccgcttcaatgggtccttgggcagcaacggattctccgggtacttatcgtccagatactcggcaataatcagcgactcgatgagcgagggctcacccttctccgccaccagctgcagggcaggcaccttaagcaacggactcacttccaccagccactctggtttctcggtgagattgatgtagacactgtgatagggcacattcttggcgttcaggacgagatgag

SEQ ID NO: 14834 - DNA, 732 bp, DROSOPHILA
atgagtaacggcaggcatttggcaaaaggctcacccatgccggatgttcccgaagatggtatccttcgcctgtactcgatgcgcttctgcccatttgcccaacgggtgcatctggtcctggacgccaagcagatcccgtatcacagcatctacattaatctcacagacaagccggagtggctgctggagaagaatccacagggcaaggtgccggctctagaaatcgtgcgagaacctggaccacctgtgctcacagagtcgctactgatttgtgaatatctggacgagcagtatccattgcgaccactctatccacgtgatccgctgaagaaagtgcaggacaagttactaatcgagcgatttagagcggtgttaggtgccttcttcaaggcatccgatggcggtgatctggagcccttctggagcggcctggacatctacgaaagggagctggctcgacgtggtacggaattctttggtggcgagcagacgggcattctggactatatgatttggccctggtgtgagcgcctcgagctccttaagttgcagcgtggagaggattataactacgatcagagtcgcttcccccagctgaccctttggctggaacgcatgaaacgagatccggctgtgatggccttctacatggaggccgaggttcaggcggagttcctgcgtacacggagcctgggtcgacccaattacaatctgctggtcaaggatgcctga

SEQ ID NO: 14835 - protein, 243 aa, DROSOPHILA
MSNGRHLAKGSPMPDVPEDGILRLYSMRFCPFAQRVHLVLDAKQIPYHSIYINLTDKPEWLLEKNPQGKVPALEIVREPGPPVLTESLLICEYLDEQYPLRPLYPRDPLKKVQDKLLIERFRAVLGAFFKASDGGDLEPFWSGLDIYERELARRGTEFFGGEQTGILDYMIWPWCERLELLKLQRGEDYNYDQSRFPQLTLWLERMKRDPAVMAFYMEAEVQAEFLRTRSLGRPNYNLLVKDA

SEQ ID NO: 14836 - DNA, 4330 bp, DROSOPHILA
atgcagacgccgaatcgattcaggcgagatgggtgcgtaatcccaaggaagtacctctccgagccaacgacatactcagtatcattgagattggaagggcgtatcatcaggggcaaaagattgccattagcccttcaccctggcatgggaccatactgcccacacgtttcgcccacaaacgtaactatctgcgggttctggctgtagccagaaagcgagcacacaactcgctgaacatcctggtcagtgaaaagaacgcccaccactttcccacggtcgaactgcatccgaatcgcagcctgcactctacgctgcgcaagttcatgattgagatttttggtgcggagctgccacagcatcgaccacatggcttacttagcgtggagcactcagcttcggagcaggagaacactgatggaatatgccttaatctgctggtggctttccgaccgccactggaggaaatctcgctgatcggcaagtgcatttggcaggaactgggtgcgccacttgacgagatgctgggacgtatcgtcagcagcaagaacgcatccattccgctgaatgtggtgcgctaaaatgccttagactagagtaatctgtccttatttatggtgcaagcaatctatccgttgttagttgcaattaaagatagcagatgtctgccagatgtccgactgtaaggcaaatgtttccctccttggtgctaaatagtgaattacgtagataagtctctgccaatctgtcataaaacgcctagaagtaatcttaacctcttaacccattcccctttcttggtgaaagatctaatctgaagtttactcgtttgcgtagcctaatctattctagagatttacttagaaaactgtttactattatatagtaccaattaaaatattcacgttttcatgcgaactaaataatccaaaaagccttacctatttcatccagtctagctatgatttatatgggaacttcaaatagactcttcagatttaattcaatttttaaaacaagctgtataatttctatagccacttacccattgcgggtatagagtgtatataaaatgctttcttggaatatgtcacaaaactagaaactattgcaacagtcgactagggaacaatgggaacagaggaaaatgcacgagtgggttttttggggtagaaggatgaactaagtaactaagtcgccaagccgaatcgccgagttacacccacaccttgttgaacagatccatgaaggagtcgtagatcataaaggtgatggccacatccaggcacacacgacctaatcttggcacggtgcccttgtagaaggcggcgggaccttcgttcttcaagatctccaccgcacagtgggcagtgttcttgtatttcgatgcttccagaccctgcatcctcgtcttgaccacatccagcggcgtattaccgaacacagaggctgctccggcgatagctccaaacactccaaccaccaacttgggcactggcttcgtgtgatcgtcacccttgtacaaatccttaagggactccagtacgaagaagcgaatggcctggttggagccctgtttcagaatggtgggcgttaggcccttgtagataccagagatgccctccgacttgatgatttggccaacgccgtgggcgaatcccctgaacttgggattgccgctgcgctgatcgttgatgaacttcaccttgatggtctccatcggggtcactgccacgatggcctcacatacgccagctcctaagccgcaaagcaactttccggagttgctcagttgtcctcgggagtccacggcgttcgatttcaggaattcaaaagcaccgaatctgaaagttatcttttaatcagcaaaacatgaactataaccaaaagttatataacttacctcgccgctgacttaggaatgctgccgtagacgagcacactgagacctcggtagagacccaggaatccacgttctcccaccgtcttcttaacgcaatcaaagatgccgttgtacttcttcgccgctcccttctcgtccagctgcagttgtgtcttcacatactcggtgggataggtgatgcagatctcgatgccgcccgtaataccgccggcgacgatgcccttaaggcccacctggccgctgtccgcagccgccgctccgtgctccgtcatccacggacgtcggcggtacgggctgacaagggacgcgaaggcggagcgatccatgctgactgggtgttaggtggggaattagctgaaagaaaatagtagaattcatttattgtactgagtgaattccagctgatttctgtccgattgaatgttatttatatcctattgttgtaaatggatcaaaatagactcgttctgcgtgggtgcgcggatttcaaaatattccccaaaacttgtatgaaaatatggcatttgttcttcatagataatgatatctgaagtattccttatcatctatttaaacaatttaactatatctgtgacgtacaatcgtgaaccgcgtatctatgcgaatatcgaccttaattatcgtattaaatgtttgtttaattgcagttctgctctactagttatgcaatttctatgaggaaaagaattccacttggctggaatggctccagcgggctccaatttaaagttagtaatcaatgccattatcataggtaacttcccattgtatcgttgactctcttttcccccaaaacatattcatttcaccttggggacaaggttcgaaaactgtgaacgaagagtcgacaaactaacacaaacagagcgaaaaaccaaatgttcgaaaatctcaatagtgattacttaagatcgggtgatatagtctgggacggtttgagtgggagcggtactatatcaatatcagcaggctcgttggttgtttcgctctttgcacttgacaaattaatattgtttcagtgcgattacataacttttgcatgaccataaattataatcgcacacagttgcaagttcataattattcattttatgccgctgtttaagccaatttccgtatcggtctggaaatctggataaacataaacaatacccactgataagtcggcactggaaagtttctaccgacttccacacacacacacagacttcaaaagcggttgattaagcccacacccacacactcaaagcgcactgctgtctggcaaaagtcgcgcttaatttttgctcatgcagctttgctatcgggtattgttctctactactcacattagaattcaaaaaaccgaaataattataattttggaaagcccaggcagcggtgaagtgaagtggcgatggggacagcggttgaatctcaactgatcggggctacgaaaaaattccattttccaatcgacgagcgaaagcgatacagtgcatcccggaactaacggactttggattttcagatccaacagtcagcagtccgaacaactctatcccaatagatttaaaatggtagattcttctaaatatcaaactttttgtaaaataaattgaatcgatagactgagcacgctattctctatagttcactgcatcaggggcgcactgtaattccaatggtcggcgttttgtaaacaacagcacttcagcggtatccactctccccgcgctcagtaatgtacacagtaaaatatttctattttgaaaatcaatcagaaattgaaaataaaagaaatgatacgtggatctatctagtaaacgatcctaaacgagtaacatacacatacatcagttcgatcctaataatggaatattaagtttctaaagattgattccacattgataaaggtattttgatagctatataagtgcgtttcgattactttatggagaacttttttctgtgcagagagtgcgaagagtagcgccaaagtaacgtttttttgctgacaccgcagtgaagatctctctttctctctctaatcggaaacccgtttgtccagcaacaacaaagtggacagagcttttggggcggactggaaaagctccgctgaagaacaacaagaagaacatttgactttaaattttgaatgttaggtacgccgcaaagtagaccaacattttttctttagcgattacacaatgagttcacacacacacaatgcgcgtagcctacgcacacccacgcggtagttttatccaggttatcagagcatttagtgctacactaataaaatcgataacggcgcttttgctttttaatttataacgcccaattgaccaacaattaagtgtctactatttaccgactgacgcaactcggcgtcatgcggatacacgtagttctaacgccgccggcaaa

SEQ ID NO: 14837 - DNA, 1276 bp, DROSOPHILA
ccgctgtccccatcgccacttcacttcaccgctgcctgggctttccaaaattataattatttcggttttttgaattctaatctaattccccacctaacacccagtcagcatggatcgctccgccttcgcgtcccttgtcagcccgtaccgccgacgtccgtggatgacggagcacggagcggcggctgcggacagcggccaggtgggccttaagggcatcgtcgccggcggtattacgggcggcatcgagatctgcatcacctatcccaccgagtatgtgaagacacaactgcagctggacgagaagggagcggcgaagaagtacaacggcatctttgattgcgttaagaagacggtgggagaacgtggattcctgggtctctaccgaggtctcagtgtgctcgtctacggcagcattcctaagtcagcggcgagattcggtgcttttgaattcctgaaatcgaacgccgtggactcccgaggacaactgagcaactccggaaagttgctttgcggcttaggagctggcgtatgtgaggccatcgtggcagtgaccccgatggagaccatcaaggtgaagttcatcaacgatcagcgcagcggcaatcccaagttcaggggattcgcccacggcgttggccaaatcatcaagtcggagggcatctctggtatctacaagggcctaacgcccaccattctgaaacagggctccaaccaggccattcgcttcttcgtactggagtcccttaaggatttgtacaagggtgacgatcacacgaagccagtgcccaagttggtggttggagtgtttggagctatcgccggagcagcctctgtgttcggtaatacgccgctggatgtggtcaagacgaggatgcagggtctggaagcatcgaaatacaagaacactgcccactgtgcggtggagatcttgaagaacgaaggtcccgccgccttctacaagggcaccgtgccaagattaggtcgtgtgtgcctggatgtggccatcacctttatgatctacgactccttcatggatctgttcaacaaggtgtgggtgtaactcggcgattcggcttggcgacttagttacttagttcatccttctaccccaaaaaacccactcgtgcattttcctctgttcccattgttccctagtcgactgttgcaatagtttctagttttgtgacatattccaagaaagcattttatatacactctatacccgcaatgggtaagtggctatagaaattatacagcttgttttaaaaattga

SEQ ID NO: 14838 - protein, 317 aa, DROSOPHILA
MDRSAFASLVSPYRRRPWMTEHGAAAADSGQVGLKGIVAGGITGGIEICITYPTEYVKTQLQLDEKGAAKKYNGIFDCVKKTVGERGFLGLYRGLSVLVYGSIPKSAARFGAFEFLKSNAVDSRGQLSNSGKLLCGLGAGVCEAIVAVTPMETIKVKFINDQRSGNPKFRGFAHGVGQIIKSEGISGIYKGLTPTILKQGSNQAIRFFVLESLKDLYKGDDHTKPVPKLVVGVFGAIAGAASVFGNTPLDVVKTRMQGLEASKYKNTAHCAVEILKNEGPAAFYKGTVPRLGRVCLDVAITFMIYDSFMDLFNKVWV

SEQ ID NO: 14839 - DNA, 11153 bp, DROSOPHILA
tagaatcaataattaagtggaatgaaaaaagaaaagaaacacatctatgtgtagccaaaaaagaagtcacaaatgaccattaacaataagggagcaaggaaaattaaggcgattgaagagcaaacacaatgaagcgtgtttcataggccaggaacttgacaggctcccgctaggccagcgaatttttccccaataatgtttcccgctccctctgggttttcccagacctctgcaaacttggccaaaagccatggccaagacaaatggcaggcggagaatatgagcgaacaagaagtgcgaaacaattgcgtgctaaacgccaaaaacgtcaaagttgcttggaaaaaatggagcattggggtagtaaatggtaagataaatggcatacaccactgaacagaaggggaaaactcggagaagcgatcaaaaatatgggacattgcatcccagtaaactttattgtgccctacgaattattccaaaaaattctaagtgattaccctaaggctaacgaaatcaatcaatttagattgggttttagaagttttttatttattattattcataattttgttgttgtttttttttttaatgttttattacaaatcgaaaatgttcagcatatgtatgtatatatggaaaggccgaatgttggatgtgttgtggcagatatacatatatgccttatacatttttctaaatgtcatcgagctccgcatgagagacgatacttttttacaaatacaaatagttgtataaatattttatatatagcatctaagatatacaaaaaaggaacaatttatgaagcccattgagtgtgcgatgttgatgttgcaaatgggaactcataagttgattttattgttttattataataaatgtaaatcgatttttttcatattcttgcacttaacatttacgataaggttcttaagaaatcggaaaataataaaaattaaacagatagtttgagttttatacggttgtttttttttttctacgggaattacgcacttcttggcaaatattttgagaaccccagacgaaagtgatggttgttttctcgttccgaggggagttcttgcagttttgaaaaaattcaaacgtttttcacggatattaagacttgcaaagccttttgctactgatctactccaaagcaggttgtcattgttttgggggccccttgtgtgatgcattcgttgttttagttcttcaggatgttatttagttggtgtgtagttcgttgtttcgttcgtttacaaaattgagcggtgagctgcgaatcggaaataatagtattattacctctaagccccaaatattattcgatataaacatataaatgaaataagaagtatgtggcgtgcagaagttgtatcatgtaacatgggttaaaaacaatttggattggaatgagagagctctgtagtgtatatcttacaaaacttgaatagagtatagtgatattttagaatatattgtaaaaataataattaaatacgcaacataaatttacatatttcatttatttgcagcaggagccgacttcaagtaaaaaacaaaatttgaggcatgccacaatgcatcagtaaggtaattcttgttcaaatattttactttttttttaaccattacataaactacagaacccaatcattcaaagacttatgcatatatcaattctatgttattaacactacgtgatggggaagactactaattcagggtactacaggtcgcaatattctataggatattatatgagcactacaagtcagttgtgtagtttctacaatgaacaaatttatcgtttttcatgccatttcctttttcttaccaatttgtttttttttttacgtttcgttacgtgtaatttatgtaaaattaagtacaaaaaaattacagaactgctatatgatttgtatagcgtcgctttgttattagagctaaacgattgtttgtgattttgaatctatataatttgtttagaataaatcctcttcctcagctgttcatgataattcaaatgtaaataaaataaaaataataatgttaaatataaacaatattggaaaatgtgtcgggtaaaaacaaaattttttcaaaaccatgaaagaaaatcttatgcaaatatttaaagaacaaggaaaacttgtacataacattaaggcttaaaattttaaattctacaatacaatgcagccatttaaaaagactttaacaaatttttcctaaaaatctgaaatggttctatctgattactttaaacattttattgatgcaattatatttctctcatgcttttatggcaatttctctatggacatctagggatggggagcaccaattcgaaaatatttacaaattgttcatctatatacagactatatacgatcttaccaacagccaatgaaaatggttcccccaagtttattacaattttagccccacagttggtaagacccgaatgtagctttaggaatcgggaatctttagcttacgtgtcaagggtctagctgggtgcttggaccacaagtagcggttcttcaccggcgacaagtacgaatcccgggccacggggctcgaggcacggggcaccgaggtggcgcggaagggcaccaggtcatccacgtcccaccagaagggatcgcgcacaatcgaggagatcggcaagttggggctggggctcagcagatccctgaagcggttgcgtgggtgaaagatggggagtcctattttgttggcatttcagtagcagtagtagtagtagtagtaatccagagatggtatgattggatcgtatcgtatggatgttgtatggcgttgttgtgcgtttcgttgggtatacaatcagatgttgttgggtttcagtttcatttgatattgtttgtattgtcgtagcaatgtatacaagaagagcagaaagaaaaatattttttgtttttgctatgtttttttttttaaactaaaataaaagtaaatcaaataaaaaaaataacgctttaacaatcaacaataatttgatattttccatgcgtatgttggggtttcgttgtggaaaaaataccaaaggataatggggggcaaaatgcgaggaaaagggataaggtaattcgattggaagtgacaggtgagcaggatgaacaggcgctacagtgagcacatcgataagcgaaccagtgggcatatgaaggtggggttctggtttctggatcgtaagggtaatgcaaaccgattcaatgaagcgttaaatgggttttcaaatttgcaaaatttatctttatcggatttttggcattcagaattggacagagaggtattcaattatttacactaatattttatgacgatctgggcttgtatattactttattattaaagttttacttggcattcaaatgtattgaaagtgagtacaaattaagaatttccaatatgtttttgccatttcgaaaatttgaaaatcattaaatcgatttgccttcgaggacggaaagcgcggcgcttacactttgggcagtactgtactaattttgctgatgctgctggcaaactcaaactcaaaacacgacaaatactcgtgctggcgaagccaaggagtgaaaataattttgacaaattatatatggccaccagatgggcggaatgggcgaaagtggtccgaacacgtcgcgaaaaatatggcaacgatttttcaacgcgttcgccgcacatcatcgccatcataaactccatcattgttttgtctcgcatttcgagaggcaaaggaagccgacataaagtcacataaatttttaacaaaacacgcaaatttcgtctcttcttcgaattttttttttttttttttggtagggaaagtataggtgaaatttggatttttaccctcagcatcgtaggcgacttcggtgggacggggtccccagcgaccggctttcacgggagtgggacttggcgaaccggcgcgctcaaagataccgagtggccgactgggcgcatcagctggcgccgaatcagcctcggcgatcgcgggcaacttacgttcaaagagttcgtccagcggctccagggagctggcacggaagctgggccgcgtgaacggggccaagctggtggcacgatcgaagaccgagggtcctccgcgtggcacgctgccctcgcggttccagtagctcggcggtggcacgtacggctcgctgccggcacgggtcgtcctggcagggcggaacggcgaggccgagcgacgagctgaaaccagaacgggggtgagcaagtgagtaaccatgtcgagaatcaccaagtggggaagctgaaaatctctaattcctacgataaatgactgagaaaagtaaacttgttgaacttgtagtttaacctttaaatagttggtaaatactttaaataatatactaaaatcacatgatattacaatgaaattgaattaaaattaggaaggaaacctattaatcactttaagatttgtttaagtctacattgcatagatactatgctagctgctcaccctttttggtagtaagacttctttaactttaacctctaattgaattaaaagaattttcaaaggcataaacaatttttcaaaattactaccattgcatctgctaaaatccctaaaatcctgtacttaccagagttaaaagcctcaccaaccaacgatgttcaagatactcttgcaatggaaaacaaacaacatcggaaacaaaatacatagtacaaattacacaaaactgtgggcacgaaacacgtttacaaaattggaagtttttgattggaaatctatagattgtctgccagagaatatgaaacatacattttcaatacacagttcgttaaatatttcatttgagtttgtataaatgtttagtttttttttttttttaagtatatttggcagtttatatacaggcaccgcacagtgtaatgcgaatttctatgttttgattttagtagtgaaacgagggactagacgaaatacaacagcgaactggacaaggaaaacataaacattgacttgtattaatatcgaaatgcgaatgaattgttagagaattaaggaccataagagacgaatttccgttgcgataaaaagatccaaaacacaagttttattgattggtattaaatatgtttttattactgattaaggttggttctttaaagtaactgaagatcggaaatagggttttttttttgggttttttggttcgggtatagtcgccagtggggctacagtgggctcaaatagttgatttagcagcaaaaactatgctctttggtacagcagctgttagaagaaaggcttaagataatcggggtatgaatgggatggtttttaggaacgaatgagtggatggatgggttcgttaaatatgtttatttaaatatatttaatggctaaaattaaaattagagttcggttttttataaatgttttgttgttggttttattacttttgttgttgttgttgttgattttgtataagttaataattaaaataaagcagttgtaattttatatttatatattatacaatgaaacatttaacgaaattttcactcgatatgactattgctgcttatcggggatttctttttacagacaaatattgattacaattcattttcgtttatcccttcacttcgtttaagttgaacagattttgcgttaatttacaagagtctaactacgagctaagcaaacaaaagtatttattttcactaacgctcagcgtttcaaactcttatagctgcaaaatagagttaaacaaataagattttagtcgaaaatcgagttgtaacgagattgagaaaagtctgcaaaagtatttttttttttttgtgttggctgaatttgaaaaaaatttcgttgagttcgtttttggatgttgcgatcagatttcatttgctatttttttttttttttgagttcgtgcttacatttcgtataaatatattaattttaaaattttcgttgttgatgttgttgtgttgtttactttcctgctgatgttggtgtcggacttttgtgtctggcattggatttagaaaatgtctttgatatccttacccttgttgagctcagccagcagcttgtcctctggctcgtactccaggggcaccagcgagttgggcgtgagtggcttgtccctcaagtagagaccatagcgagatgggtacctaagtggataataagtcccaaaaagataagtgatccttgccggaatataatggctgtaggggcacccacctgcgctcgatctcctgcatgcgcttcagatgatcattccaggccttctctgcgtcgtagttagctggaactgtgcacagaaaagattgatattaccaataactaaacatactccctaagctagttgagcattccaatagttacgcaagcaaagaactcaaaaatagatgcttacagaaagtggcatgtttaaagcgtgggctcacacgacgtatgcgcaatattcgatacgtacgccatcccagaaagcaatattatcatatatcatagcgaaagcggcaaatagaagaagaagggaatcgggaaatcagtaaagcgtattaaaaagcaatttattataaatgaactgtaagccgtggtcatgatacaagtcgatgggagttcatagcaaaccctttgatggcccttgatggatggtctggttgatcggatggtctggatggatggatgcaacaccacagaaaagcaacagcatgttgtttacagattttatttcacacacaaaacacatacatatatttatatacagatgtatatactggctactcaataatttgctttctaatttcaatattttaactaaaaactacacacaaaatcctgttcactaaatttaagttgtcttttgcctagagagaacaacaaatatatatataaatatatatcgagagagtgcgcataaaatatcaagaaaatttatatatatactacatatgtatatcgctcggatacatatgtgtatttatcttgacgacacacatttatgtatattctgaaacatttatgaaagagagagaaaaagaaaaaaacaattggttagtccaaaaaaaagcgaaaagaaaactaaataatttaggcaaacggggtaccaggttgaaggtgaaatgggcggacttcagggggctgggtgttcggatttgggtgcttggggcttttgccagtgtgtgagtgtgtggaaattcggaaaatcggaaaagagaacttcggtttccgcgcaccgagggccgccacagtcatttgatcccagagcacgcaccgaaaaaaaaaattgagtcaaaaattccgcttatatacctgacttgatatatagcgcctgtgtgtgttgcctatattattgtcttcattttttttattttttttgttcatttttgaggccttttgccaaaatcaacacgaccgaggcgaaacgaaacgatacgaaacgaaaattttcattgacgtaattgtatttggccgtttggcgctgtccatttttatttttaaatttatgaaatcatagcgctcgcaccagttttcatctcaaatgaaacgcataaaaatatggcggttttgagatattcaaggtgttgtcaaaagcttcaatagcaggcagtggcgagattgcagttgtaagatgattgtaatgactcgactgattgactgactgattgactgactgactgactgattgatggatggcgcatcgaagcgaagcagaaaggctgaaagaacttgtggcgttcggatggaccgaagcttatgtaaccttgcaaataacaatcaggtgattgccttttttaattttaaattttaattaaaattttaaacgtttttttctaaaaaactagattgaaagcattgacataaacttttgaacctgaatttcatctatgttactattccagtttcaagaatgttaaaaatatcttttagtttcatggcggataatttgttatgtaaacaatcataatcatttatctatattatttgaaatatactttaaatggtaataacaggatatcttagttcaatatccacatttgcaaggccaccgatttcggaagcattaagatacagatactcggctgtgtgaagcagttaggcgggaatcggctgtagatagtacagtatgtggtccgtatatggtaccaacttacttgttcggctgtagtgatgatcgtagatggcacggggcgagtagccgtaggtgtcgcggctcactggcagatatctgtagccagaggactggacgcgctcattggcggtggcgggctcgtcatagatgctcctgtaggagggcgagtccaggtaggagctgtagggacgagaggcacggggcgcctcgtgggcacggatatcctcggagcctataaatagttgtttggataacgacgcgttagttcattgcttttcaaatatttcggctattctattctcactatttggctcaatgccagcgctgcagaaatgtatgatttctattcggtttctatcatagatgcgccccctgtatgtgtatcctatattttagcctattctttgtttaaggcctgagcatatatattttacaaatttctctctatatattcgaatatactatggcgaaaagctttcccagcagagcgtgtctaagtatatagcttggctgatatgacacctgccaaaataaatagactatacacatataggctaagctatttgtgttgctcactggcgaccagagtttaataatatcacttttgagtgtcccttaatcatatcgaaatgggaacacttcgagttaatcttcaattgttttttgaattattttggaactatgcaaactccctactattgtgactaagcaatcaatagtagttttgaataactatcctatcttttaatgtaatttttgagcttatttagtgaatgcttacccttcagggacctgatgtaggactgccagaatttcgccttcttgctggggctctcattgcgcccaatcatttccaagtggtttttgaacattttgatcgatttgttttgttctgttcacgaaaaaatcgttgaactcgttcgctgtaataaagttgggaagagagatggcttagcaattttccaatgtgtttcaaatttcctttccgcctattttattttattttttttttttgtccgttttcaatttaatctatttcccgggaaatgccaggcagcacgcacgaattcgaatcgcttgtctctcgattgatgggatgttttctcagttgaattttttgctttcgcgttgaaagtctctcggttcgaaaataaacagactgtgtgccactttagagcagtgcaaagtttataaaacatatacataaaatctaatataataccgcgatcgggcaacagcagctaacgcaagatcaatctcactaaaaataaatatatttcggttcggtttttgtgatttttcatgtatcgtggtattctcctggttgctcgaatataaaaatatttttttgttgcatagcaaatttcacacttctgagtatgagaacaaatattctaggtgtcgtcagtgtgtgcgtgtaaatgggtgagtggatgtaagtgtatctgtgtgtaagctgcagctaaattgggttttatttttaaatgtccttgagttgaaatcgttctgttattctggcttttagcggaatttacttaagtatcgaagaagtgtgcaaagtctaagaacaatttagttgaagtatgtttaaaataggcctttattatccattaaactaaattaattttgaatttaattcaatgtgggatttttgttttttatatttcactgcacaaactcttgatgagctccaacacttcggtatcaaatgtcattgagtacgatctctcttatataattatagtcaatgtcttttcgctatggaacatatcggatcattcataatgcgatcataattccataattatttcaccagttaattgttcgtctccacattcagatgtgatggtgcactttatttaatttgattttattgtttttcatttcgtttataattatttaatttactattcagttgtatgttgtttaatatgtttcgggttcgcttacaatttaaatttactcctaaaaaatagcgatctatcctcaacgaagaattttttcaaactgcaaaccccaagaaaattcgcctcaccaattttcctcgtttcagaattttgccattccgtttcggcaccaaaagcacggcgcattcctttacggcgtaggttgctctatccgtgagcgattttcatcgcatctgtgtggcaaagctccggagattggttatgggaaagctttcccaccacattctgatagatcgtgtggtggcacccactcattgtttgcaacgattcaataccgaaatcgcgatgacgctggcgatgatcataaaaagaaagccagccaagtcataccacacatacacaatacatatgagcccatatttctttcagaaaatcccacaccctattttctgtttttgtttttcctatggtttttcataattttaacatattctttgaatgtttcaagggaaaggcgtcacttgtggtattgaattgatcagtgaactataagctctaactaatacattacaatatttggttttttgtaactaactaattcaaaatgtggttagaggccgatggaatttttgccataaaagcatttaaattccgtttatttgtttatgttttcttttggctttggcattagctataatttagtttcctgataatggaaaaatcatttccagcaacatgcccacacaggtaaataaacaaaactggtccagatacatttaaccaaataatagatactttaagcacacaatatattatttataatgaaatctgtatgaatagtttgatattttctagcttgttatgtaaaatttgccgttaattgattatttaaaacattagtaactcatttttttcgattataccctcctgtagggtatatcttttttgctcacgtgcgacccaatgattgataatctaaacacaaattttccagggaaattcctacgaaaacgaataaacaaagatgggtaaagcttcccccatcatatacaattacatcgaaacgagttgaagggcagat

SEQ ID NO: 14840 - DNA, 1446 bp, DROSOPHILA
gaggatagatcgctattttttaggagtaaatttaaattcgaacgagttcaacgattttttcgtgaacagaacaaaacaaatcgatcaaaatgttcaaaaaccacttggaaatgattgggcgcaatgagagccccagcaagaaggcgaaattctggcagtcctacatcaggtccctgaagggctccgaggatatccgtgcccacgaggcgccccgtgcctctcgtccctacagctcctacctggactcgccctcctacaggagcatctatgacgagcccgccaccgccaatgagcgcgtccagtcctctggctacagatatctgccagtgagccgcgacacctacggctactcgccccgtgccatctacgatcatcactacagccgaacaattccagctaactacgacgcagagaaggcctggaatgatcatctgaagcgcatgcaggagatcgagcgcaggtacccatctcgctatggtctctacttgagggacaagccactcacgcccaactcgctggtgcccctggagtacgagccagaggacaagctgctggctgagctcaacaaggctcgtcgctcggcctcgccgttccgccctgccaggacgacccgtgccggcagcgagccgtacgtgccaccgccgagctactggaaccgcgagggcagcgtgccacgcggaggaccctcggtcttcgatcgtgccaccagcttggccccgttcacgcggcccagcttccgtgccagctccctggagccgctggacgaactctttgaacgtaagttgcccgcgatcgccgaggctgattcggcgccagctgatgcgcccagtcggccactcggtatctttgagcgcgccggttcgccaagtcccactcccgtgaaagccggtcgctggggaccccgtcccaccgaagtcgcctacgatgctgagggactccccatctttcacccacgcaaccgcttcagggatctgctgagccccagccccaacttgccgatctcctcgattgtgcgcgatcccttctggtgggacgtggatgacctggtgcccttccgcgccacctcggtgccccgtgcctcgagccccgtggcccgggattcgtacttgtcgccggtgaagaaccgctacttgtggtccaagcacccagctagacccttgacacctcaccgctcaattttgtaaacgaacgaaacaacgaactacacaccaactaaataacatcctgaagaactaaaacaacgaatgcatcacacaaggggcccccaaaacaatgacaacctgctttggagtagatcagtagcaaaaggctttgcaagtcttaatatccgtgaaaaacgtttgaattttttcaaaactgcaagaactcccctcggaacgagaaaacaaccatcactttcgtctggggttctcaaaatatttgccaagaagtgcgtaattcccgtag

SEQ ID NO: 14841 - protein, 364 aa, DROSOPHILA
MFKNHLEMIGRNESPSKKAKFWQSYIRSLKGSEDIRAHEAPRASRPYSSYLDSPSYRSIYDEPATANERVQSSGYRYLPVSRDTYGYSPRAIYDHHYSRTIPANYDAEKAWNDHLKRMQEIERRYPSRYGLYLRDKPLTPNSLVPLEYEPEDKLLAELNKARRSASPFRPARTTRAGSEPYVPPPSYWNREGSVPRGGPSVFDRATSLAPFTRPSFRASSLEPLDELFERKLPAIAEADSAPADAPSRPLGIFERAGSPSPTPVKAGRWGPRPTEVAYDAEGLPIFHPRNRFRDLLSPSPNLPISSIVRDPFWWDVDDLVPFRATSVPRASSPVARDSYLSPVKNRYLWSKHPARPLTPHRSIL

SEQ ID NO: 14842 - DNA, 7829 bp, DROSOPHILA
tggatgcaaaggtgataacgcccacttgaatgggattgtcgtgagtgaccagtgctccgccagagtcgccaccgcacacggacttgccatcggtggcccgggtgcacatatcagtgctggccaccgatccgtatgacctggcgcattctccgttgctaatgacttgcacgtccatgcattgcagccagtcggccaatcctccattggccattcctccccagccgcaggccacgcaccaccagttctcgaaacgctcacctttttggctgaacttgggcagcgaaactttgttgatcagattggtgaagctgacgtacggggtgcgaatgagtccgatgtcgtgaccagcgctattgggatatcctggatggcgaaagaagttattcttgttcaccgtatgctgaagctgaccgttccaggcacgattcgagccgtagtgtatggtcacggaatcggtggtcaggcaatgggcagcggtcaggacccaattgtttccaattacggaacctccgcccacggctccattgttcattcgcaggcccacagcatatggtgccttgccttcgtaggctggatagccatttacaatgatgtccttgggaccaccaccatgatgagccgtacgattgcgattcctgtgggcacagacagtggcaacaaacaatagcaacaataccagctttttagacatgcttaaaattaaatctatatcgcaatggtttttgctttttatagaagaaatggttgcatgtgttatttacggctgggggtaattagtctccagtccaacgtgggttatcagtgctttcgacacttaatgagtgtgggtattagctcagatatactttgtcaatggtaatacattttcacaaagaaatacatttttatttttaaacccatattgcctaaatttacttaacgctgcgaagtttttctgattcctccatttaatgttgtcatactatatacatataacacttgcagatgcaatgtggccgttatgctgctcaccgacattgtagtggacggcattccgggcatcgactggacccttcacttgcccctgatgctgcacatcctcttcctgggactggaccacacgcgcatcattgtgcgggagcattgcaaacagctgtgcgtcaatctgctgatcgtgctggcggagcacaatgatcacctgacggtggcccgcatccttttgaacagtgaaacgagtaaactggatctgggactcacggtgccagcgctgcccgtgatcgacaataactttacggagctccatcagcaattcgacagctatctgctgcacgtaagtccccaggcggcagcctatgccctgcagcacaatctttccagctccacgatcatagcagcgcatcaccagaatttatcacaaacgccgcagagtcagcagcagacgggttcgcagaatggacagactacgacgcccccaggtttgactgctactccagctgcactgcaaataaatccgaataactcggagaattcggaggtaccgctgatccatcccgatgagcatgctcctccacaaccgggtcccagtatgcccattgcccatgtgatcaagagcctgctgaagttcctcgcacaggacacgtgtcagccactatggaactatgaggatattacggccaaggtgtgggcagtaaaatctgccgagcaattaagctgcttcctcaagcacatggtcaaggtgtttgcagatagttatccccaagctcgcatcgccgagcgctgggcgcagactgccctccagttgggtttatcctgctcatcacgtcattacgccggtcgatgtctgcagatcttccgggcgttgaatgtgcccatcaattcgagaatgctatcggatattctctccagactggtggaaaccgtggcggagcagggtgaggacatgcagggatatgttacggagttgcttctaactctagaggctgcagtggatagtttggattcggatttccgacccctggatgtgatgaaggatatattcaagagcaccccgaatctgaacaacaaggatggaggaccgaactccattttgcccggcaagaaatcaccatcgggaatgacgccacaatcatcgaactactcgattcccagtcatggaaggagtaccagttactcggtatcctattgcggacgaaaggcaaacaattcaccctgtgacaagcaggtggagctgaggaatcgatcctctggaatcgatctagagcgcagcgtcgtctgcaagttcggcgttggcggcggaggagctggatcagcactttcccgttcccggagcgcccagagtctgaagatgctgggtgatacggccacgcaggatgataagatgaccattttggcgcaactgttttggctctctgtttccctgctggaatcggactacgaacatgagttcatgttggcactccgtctgctgaccagggtattgcatcgacttccattagatcggccagatgcacgggataaggtggagaagttgcagcagcagctaaagtggacagcctatccgggtgttcatgccctcctcttgaaggtatgtttctcaattccctcaataattaccaaaaatttaccaaaaatgttttttatcaattttgtagggctgcacacacagtgccacgtatgaacccaccattaccctgctgtcccaattcgcaccgttactgacccttcccgtttgtgatcccacccaaagctgcgccttccccatgaatgtaatcgccctgttgccctacatgttgctgcactacgaggatgccaatgaaatttgcattcgcagtgcagaaaacattgctcaggtttcaacggagctgggcgcaaaactggagaacctgggcactgtgatgacactctacagccgaaagaccttctgcaaggagtcgtttcagtggaccaagtgtgtggtcaagtaccttcatgacacctatgcgcacatgggactccacatggtggcgtttctcatcgaggttctggaaaaagggccgcagcaggtgcaggtgcccgtactgaatgttattcactgcatgctacactacgtggatttgtcggcgccgcaggctcagagtataaatgccgacttgctgagggcgattggaaaatatctggatgtaagtagaatatagaatatatgtatatgtgtatctggttatttccctcgtcagtgcaaacaaaaaatcagtttgaagcaccctctattaaaagtaaagctatctcattgaaactttaaaccagtacatattattattatgtcataaatctgccaaatgataagtgcattttgtttattgtaattattctgcctttatgggccaacatctaatctaaataaccgagcgagcttcaaattaagattattgttggtgggcacttaaataatttccaaaaaagaaaacatggtgtgatcaaccaacattatttattacaatatttaagcatgtatcaaaatgaaatactgaattcttttaatacttttagacggcttactggaaggactcgctgaagatcctgaagctgatcgtgacccggagctcgtccctgcaggtggtgccacccagcgacggcagcagcgccggcttatcgttctctttctatggcgcatatccggactcggatatgttctgtaaaaaggaactggccggtcgcactatggagtttacgttcgacgtttcgcaaacgccactgatcggtcggcgcattctgttgaagacggaagagccggtagccggcggagccgtctccaccacgggcagctcctcgctgaactccactctgacaaatgctaccactgtgacggtggcgcccagtgctgcccagcagcaaaccaatgtccagatgcaacagcagcgtgccaacaccaatgtggcggccctggcagccgcagcagctgcccaacaccaacagcagcagcatgccatcggagctggcagcagcgtggtcggaacacccaactcgccgcgtcggagtgccagcctctcgccggcggatacggtgccactgagcggatggaaacgaccctggatgtcgcagtgtcgagtgcgtgagtgtctggtcaatctgctgaccacctgcgggcagcgcgtcggcttgcccaagtcgccatcggtaagtgttgcccaggatccaaacagccgaccgcttgtacatagccaggtgcatgccttaggctcccctagagctcccctcttctcatgcatttttgcaattatcaattgtgcaattattacctctaactctttttctttcatgtaaacaataccaaataccaataccaaatccaataccaaatcaaaaacaaactaacacgcattatcatcattaaccaatcaatctgataccaaaatcgaaacatatctaggatgatttcataaactcaatttgctcaaaggtaaaggacacgtttctatgtgccgcgtctagttttgctttgtgtgattttagttctcgcatgtggtagctatacagaaaaattgttgtcattttgaacttgatattttcagttgaattacaatattaatatcatatcaagtacttgttgatatgaaaattacaaagattattgatcatcatttttgtttttgtcctgtgttccattccacacaatcgagtcacacaaaaataccgtcattttgcttttctattccgttgttccgttcgcatgtggcatgctttgtttcaaactgtacttttcgtttatatactctttatctaaacacatttagtcgttgagcacgtcactactaaccggatcgattgcgaccagacaaagcgtaagctttatctcaattactcttctatactattcatctaaatgttaatcgctatcttttgtaaacctaactaatcgcttaacctggacatatataggtgatcttcagccaatcctcggatctgatggagcgccagtcttcggccgcatcgtctacggaagaaacttccggtcctcagggtgacctgagcagtgggtcaaggcgcgacgatggtcagcccgattttaccgtcttcaaggactttgatttcctggagtacgaggacagtattgccggtgaatccacggacaacttcaactggggagttcgtcgtcatcagctcttcgagggcgatgaggatcgcttgaattgcggcagtggcattggtggctccattaaaggaggtcactcatccgcctttgaggacagcttcagtgataagactcccattttgagtaagaggaaacgacagattgcggacgattcatccgacgaagaggctgaatcggaatcgcctttggacgaggatcatcgacagtcgttcctgaagtccgggtacagtgctgtgccccccacatcattgagtcttcgagagcgcaggcgacgcaactcggtgtcgcgaagcgataccagtggatccagtgctggggatttaggtgaccttacaccctgtaatgcctcgccacatcttccgggaatcattcgattctccgccgccattcatgatgaggcggaagagaactggcgtcgccaggtgcaggctttgttggtaaatcagccatcggcccacacctcggaactactgcagcagctatacagactgatcaaggagcttactttcaaaacggtcaacatttccaaggaggcgaagaagttctttaccggaattggctcacaactgggcaacaggatctcgcttttcacggatttgctcagttctcgggctgatcctcctcaggtttggtgcagcgagctgcaggcaacctcacccaagctctttgagacgttgcgctttaatgttttggaggtgcaggagcatttggaaaccttcttcgatcgtaaagatcaggttttggaggtatacctactcatttataaaataggatggcatttatctaacgaaattgtcttgttcatagtgtttggatgccgtgaagacaagttgcaaactgtcgctcttcaacgaggcggatgtggctgcttctgggctggagttgccaagcacctccagtatagtctatatgcccttcgatccagcttccactgaggtggtcctcgacttgggccgctcgctttacaaactgatgttccaacttttgctgctcatcgaatcaaatcataagatatcctcgaatgttgttaatcatttccgtatgaatgaagacgtgagtgaaaagactgaactttattgagaaccagttgtaataacgaatcctgttgcagatgcacgacatatccgatctctatgccctggtacgcgatgccctggtgcgctatatcagcgaggccgaactggattgcttggagtcatccacttcgacggagggcgagcatacaccaacgccttcgcctggcttgcctatgaccccagaggaattcgaggctgtccttaccgagcacatcgatctgcagcgctggcccagcgccatagctcatgtgcgacagtatcgacggatttcaactctcaacgctagcggttatcaaaacgttaccatatttagctataatagcgcggacaatcgacagaagtgggatgaaatttccgtgatactaaatgcttatgcgcatggtattatgaaggatcgcacaggtatgctaataagacaaagttacaagtgctccgtaactaaaagctttttactcttccagcagaagcctttatagtatccaaatccgactcggaggtgttcgagatctatgccattctgtcggaaaacttgtatcaagtatccagcgctctgactaacatggagatcagcatgaagagctactcggcaggcagcgcatcgggcaattcgcatcgcagcgaacaggacattgtgacaaatctttaaagtaatctgtaaactaagctaatcgcagaagtaggctcccttttatatgtaatcttttagtgagtaggcagcatattagacactgcggtgtacgtaagcgatcattacaatgtaagttaggtacgattcaatatatttatcaattacagcacaatacgtttatactttccatttaaacgaaaacttgcacattaccttcttgtggtaaaccactgacttggtaaatccaacatttatttattaataagtatttacatttaaaaaagccatgaaaatggtgactggctgccagctaggcaaaaagatttttaagggcatttcgttgttgtcggttgtactgggccaggagctgcttggtgctgttcagttcatttaggatctgtttattctccggcaggagattgtgagccgttttcagatcgtttatggcctcctcgtagttgcgcaatccgcgctgcgcctgggcgcgtcgatagaaagccttgctacatttcggatctagacgaatggcttcgttgcaaacttctctagcgctcgtatagttgccaacttttaggtccacagcggctgcattaatgttgtttaccacggagaagccgtcgaccttgagcagatcctcatctacaaggtgttttttgagaggattcagctgctgccaaccgaactgtctgctcaggtaatgatagtatcgattcgccttgcgatattttgcccgtgcttcgtgatagcgtccaagctgatagaagtgattgcccgattggcgaatgcccgtgagaagttccaccgccccatctccctgttgcacaacaagtagtgatattgacggattatatatgtaaccataactcactgtgaacttgtcgagcttgcgcggccagtcttggggataggcaggcaacttgtccgtcgtctcgtcgttgcactcgatgccccagtcctcgttgtgagctatctctccgcagtcccgtatcacgatcggcgccgtgggatcgccctcgtc

SEQ ID NO: 14843 - DNA, 4359 bp, DROSOPHILA
atgctgctcaccgacattgtagtggacggcattccgggcatcgactggacccttcacttgcccctgatgctgcacatcctcttcctgggactggaccacacgcgcatcattgtgcgggagcattgcaaacagctgtgcgtcaatctgctgatcgtgctggcggagcacaatgatcacctgacggtggcccgcatccttttgaacagtgaaacgagtaaactggatctgggactcacggtgccagcgctgcccgtgatcgacaataactttacggagctccatcagcaattcgacagctatctgctgcacgtaagtccccaggcggcagcctatgccctgcagcacaatctttccagctccacgatcatagcagcgcatcaccagaatttatcacaaacgccgcagagtcagcagcagacgggttcgcagaatggacagactacgacgcccccaggtttgactgctactccagctgcactgcaaataaatccgaataactcggagaattcggaggtaccgctgatccatcccgatgagcatgctcctccacaaccgggtcccagtatgcccattgcccatgtgatcaagagcctgctgaagttcctcgcacaggacacgtgtcagccactatggaactatgaggatattacggccaaggtgtgggcagtaaaatctgccgagcaattaagctgcttcctcaagcacatggtcaaggtgtttgcagatagttatccccaagctcgcatcgccgagcgctgggcgcagactgccctccagttgggtttatcctgctcatcacgtcattacgccggtcgatgtctgcagatcttccgggcgttgaatgtgcccatcaattcgagaatgctatcggatattctctccagactggtggaaaccgtggcggagcagggtgaggacatgcagggatatgttacggagttgcttctaactctagaggctgcagtggatagtttggattcggatttccgacccctggatgtgatgaaggatatattcaagagcaccccgaatctgaacaacaaggatggaggaccgaactccattttgcccggcaagaaatcaccatcgggaatgacgccacaatcatcgaactactcgattcccagtcatggaaggagtaccaagcgcagcgtcgtctgcaagttcggcgttggcggcggaggagctggatcagcactttcccgttcccggagcgcccagagtctgaagatgctgggtgatacggccacgcaggatgataagatgaccattttggcgcaactgttttggctctctgtttccctgctggaatcggactacgaacatgagttcatgttggcactccgtctgctgaccagggtattgcatcgacttccattagatcggccagatgcacgggataaggtggagaagttgcagcagcagctaaagtggacagcctatccgggtgttcatgccctcctcttgaagggctgcacacacagtgccacgtatgaacccaccattaccctgctgtcccaattcgcaccgttactgacccttcccgtttgtgatcccacccaaagctgcgccttccccatgaatgtaatcgccctgttgccctacatgttgctgcactacgaggatgccaatgaaatttgcattcgcagtgcagaaaacattgctcaggtttcaacggagctgggcgcaaaactggagaacctgggcactgtgatgacactctacagccgaaagaccttctgcaaggagtcgtttcagtggaccaagtgtgtggtcaagtaccttcatgacacctatgcgcacatgggactccacatggtggcgtttctcatcgaggttctggaaaaagggccgcagcaggtgcaggtgcccgtactgaatgttattcactgcatgctacactacgtggatttgtcggcgccgcaggctcagagtataaatgccgacttgctgagggcgattggaaaatatctggatacggcttactggaaggactcgctgaagatcctgaagctgatcgtgacccggagctcgtccctgcaggtggtgccacccagcgacggcagcagcgccggcttatcgttctctttctatggcgcatatccggactcggatatgttctgtaaaaaggaactggccggtcgcactatggagtttacgttcgacgtttcgcaaacgccactgatcggtcggcgcattctgttgaagacggaagagccggtagccggcggagccgtctccaccacgggcagctcctcgctgaactccactctgacaaatgctaccactgtgacggtggcgcccagtgctgcccagcagcaaaccaatgtccagatgcaacagcagcgtgccaacaccaatgtggcggccctggcagccgcagcagctgcccaacaccaacagcagcagcatgccatcggagctggcagcagcgtggtcggaacacccaactcgccgcgtcggagtgccagcctctcgccggcggatacggtgccactgagcggatggaaacgaccctggatgtcgcagtgtcgagtgcgtgagtgtctggtcaatctgctgaccacctgcgggcagcgcgtcggcttgcccaagtcgccatcggtgatcttcagccaatcctcggatctgatggagcgccagtcttcggccgcatcgtctacggaagaaacttccggtcctcagggtgacctgagcagtgggtcaaggcgcgacgatggtcagcccgattttaccgtcttcaaggactttgatttcctggagtacgaggacagtattgccggtgaatccacggacaacttcaactggggagttcgtcgtcatcagctcttcgagggcgatgaggatcgcttgaattgcggcagtggcattggtggctccattaaaggaggtcactcatccgcctttgaggacagcttcagtgataagactcccattttgagtaagaggaaacgacagattgcggacgattcatccgacgaagaggctgaatcggaatcgcctttggacgaggatcatcgacagtcgttcctgaagtccgggtacagtgctgtgccccccacatcattgagtcttcgagagcgcaggcgacgcaactcggtgtcgcgaagcgataccagtggatccagtgctggggatttaggtgaccttacaccctgtaatgcctcgccacatcttccgggaatcattcgattctccgccgccattcatgatgaggcggaagagaactggcgtcgccaggtgcaggctttgttggtaaatcagccatcggcccacacctcggaactactgcagcagctatacagactgatcaaggagcttactttcaaaacggtcaacatttccaaggaggcgaagaagttctttaccggaattggctcacaactgggcaacaggatctcgcttttcacggatttgctcagttctcgggctgatcctcctcaggtttggtgcagcgagctgcaggcaacctcacccaagctctttgagacgttgcgctttaatgttttggaggtgcaggagcatttggaaaccttcttcgatcgtaaagatcaggttttggagtgtttggatgccgtgaagacaagttgcaaactgtcgctcttcaacgaggcggatgtggctgcttctgggctggagttgccaagcacctccagtatagtctatatgcccttcgatccagcttccactgaggtggtcctcgacttgggccgctcgctttacaaactgatgttccaacttttgctgctcatcgaatcaaatcataagatatcctcgaatgttgttaatcatttccgtatgaatgaagacatgcacgacatatccgatctctatgccctggtacgcgatgccctggtgcgctatatcagcgaggccgaactggattgcttggagtcatccacttcgacggagggcgagcatacaccaacgccttcgcctggcttgcctatgaccccagaggaattcgaggctgtccttaccgagcacatcgatctgcagcgctggcccagcgccatagctcatgtgcgacagtatcgacggatttcaactctcaacgctagcggttatcaaaacgttaccatatttagctataatagcgcggacaatcgacagaagtgggatgaaatttccgtgatactaaatgcttatgcgcatggtattatgaaggatcgcacagaagcctttatagtatccaaatccgactcggaggtgttcgagatctatgccattctgtcggaaaacttgtatcaagtatccagcgctctgactaacatggagatcagcatgaagagctactcggcaggcagcgcatcgggcaattcgcatcgcagcgaacaggacattgtgacaaatctttaa

SEQ ID NO: 14844 - protein, 1452 aa, DROSOPHILA
MLLTDIVVDGIPGIDWTLHLPLMLHILFLGLDHTRIIVREHCKQLCVNLLIVLAEHNDHLTVARILLNSETSKLDLGLTVPALPVIDNNFTELHQQFDSYLLHVSPQAAAYALQHNLSSSTIIAAHHQNLSQTPQSQQQTGSQNGQTTTPPGLTATPAALQINPNNSENSEVPLIHPDEHAPPQPGPSMPIAHVIKSLLKFLAQDTCQPLWNYEDITAKVWAVKSAEQLSCFLKHMVKVFADSYPQARIAERWAQTALQLGLSCSSRHYAGRCLQIFRALNVPINSRMLSDILSRLVETVAEQGEDMQGYVTELLLTLEAAVDSLDSDFRPLDVMKDIFKSTPNLNNKDGGPNSILPGKKSPSGMTPQSSNYSIPSHGRSTKRSVVCKFGVGGGGAGSALSRSRSAQSLKMLGDTATQDDKMTILAQLFWLSVSLLESDYEHEFMLALRLLTRVLHRLPLDRPDARDKVEKLQQQLKWTAYPGVHALLLKGCTHSATYEPTITLLSQFAPLLTLPVCDPTQSCAFPMNVIALLPYMLLHYEDANEICIRSAENIAQVSTELGAKLENLGTVMTLYSRKTFCKESFQWTKCVVKYLHDTYAHMGLHMVAFLIEVLEKGPQQVQVPVLNVIHCMLHYVDLSAPQAQSINADLLRAIGKYLDTAYWKDSLKILKLIVTRSSSLQVVPPSDGSSAGLSFSFYGAYPDSDMFCKKELAGRTMEFTFDVSQTPLIGRRILLKTEEPVAGGAVSTTGSSSLNSTLTNATTVTVAPSAAQQQTNVQMQQQRANTNVAALAAAAAAQHQQQQHAIGAGSSVVGTPNSPRRSASLSPADTVPLSGWKRPWMSQCRVRECLVNLLTTCGQRVGLPKSPSVIFSQSSDLMERQSSAASSTEETSGPQGDLSSGSRRDDGQPDFTVFKDFDFLEYEDSIAGESTDNFNWGVRRHQLFEGDEDRLNCGSGIGGSIKGGHSSAFEDSFSDKTPILSKRKRQIADDSSDEEAESESPLDEDHRQSFLKSGYSAVPPTSLSLRERRRRNSVSRSDTSGSSAGDLGDLTPCNASPHLPGIIRFSAAIHDEAEENWRRQVQALLVNQPSAHTSELLQQLYRLIKELTFKTVNISKEAKKFFTGIGSQLGNRISLFTDLLSSRADPPQVWCSELQATSPKLFETLRFNVLEVQEHLETFFDRKDQVLECLDAVKTSCKLSLFNEADVAASGLELPSTSSIVYMPFDPASTEVVLDLGRSLYKLMFQLLLLIESNHKISSNVVNHFRMNEDMHDISDLYALVRDALVRYISEAELDCLESSTSTEGEHTPTPSPGLPMTPEEFEAVLTEHIDLQRWPSAIAHVRQYRRISTLNASGYQNVTIFSYNSADNRQKWDEISVILNAYAHGIMKDRTEAFIVSKSDSEVFEIYAILSENLYQVSSALTNMEISMKSYSAGSASGNSHRSEQDIVTNL

SEQ ID NO: 14845 - DNA, 3126 bp, DROSOPHILA
ttcgcaggatcgccatgtgattgtgtggagcagcaacgcagatctatccgagtggacctcgactgtgctgcacacattcgacgatgccgtgtggagcatctcgtggtcaaccaccggcaacattcttgccgtcaccggtggggacaacaatgtcacattgtggaaggagaacacggagggccaatggatccgcatcaactacgagtcgggtacggccatccagtcgaagcagccctcgcaccttccgcattcccactcccagcagcagcaggcgctacaacagcaccaacaacaggcgccatcgcatccaggtccttcctccgattcggagcatagctcgaacctgtccaactcgcagctctccaactgagccagccccgaaatattgtcgtgctgaagtcgtggttaaaagtgttactttacaaatatatatatacgaaatactatttaatgtgcccctttaaacgctgtttagtgtatgtttatttggacttcatatgggatccctatttgaatcttctgaaattataatgaattctaaagacaagtttttgtcgaaatggtatcattttttttaagttttatcaaatatatttgcaaattgtaagtagtatgtatttaaaaataatagtataataagatttaaataattaaccaaattttattcaaacttattatttttaaccatacagataaattccaaaactaaaatttttacacaatttttgaatgtcactttaggtttgtgtacaagcttgttgtaatctagtttccgaaccatgtctgcctagtactactgtgaatcaatttaagtaaaaacgaggcagaaacagcaaatagctaaaaaacattttaaattaatgaatattaaaagtaattaaaataaattgtttaattcagtagtgtataactgtaatttttggaaaccaaattggtatatagtggtatttatttccagaccgggtggtattttttaacgtgtctcgcgcgggcacactggcctctttcttttctgcgcaccacgtttccgattcgacgtcaaaatgaatgcgaaccttccgatttccaagaaacgcaaggtaattggggaaaaatgagacaggattacctccggcatgtaatgcagtgtccgtacgttcgttgtttcatcggagttgtgtgaaaaacccggccggaaagcgcgaaaatccatcggcttcggagttaacctcaaagcagatgggcgtcccaaaaactttggaactcaacaacgcgtggtgaaacaacaacaacaagaaggaggattgctaggtgtgcaatagatgtggaatgcggattataatggtttctttttgctccccagttcgtttccgatggcatcttcaaggctgaattgaacgagttcctgactcgcgaactcgccgaggatggctactccggcgtggaggtccgtgtgaccccctctcgcactgagatcatcatcatggccaccaagacccagcaggtgctgggcgagaagggccgtcgcattcgggagctgaccgccatggtgcagaagcgtttcaacttcgagaccggacgcattgagttgtacgccgagaaggtggccgctcgtggcctgtgcgccattgcccaggctgagtcgctgaggtacaagctcaccggaggactggccgtccgtcgtgcttgctatggtgtgctccgctacatcatggagtcgggagccaagggctgcgaggtcgtcgtgtccggcaaactgcgtggtcagcgtgccaagtcgatgaaattcgtcgatggcctgatgatccattcgggagatccgtgcaacgactatgtcgagaccgccacccgtcatgtgctcctccgccagggagtgcttggtatcaaggtcaaggtcatgttgccctacgaccccaagaacaagatcggccccaagaagccgctgcccgacaatgtgtccgttgtggagcccaaggaggagaagatctacgagacgcccgagaccgagtacaagatccccccgcccagcaagccactggacgatctgtccgaggcgaaagttttgtaaacctagttttactgttcatccaatgagcgactagctgaaagagttgccctcaaatacaacaaaacaacagaaacaaaacaaaaacacataataattcaataaacaaaatcaataagtaataacccacttgtgcagtgcagtgtagagtgcgagggtcaaacataaagttgtgtctgtccgatatgcaaacctgttttccaaaaggaaaggatagcttttgaaactcaggctaaaaatagacttagtccctcaccacctcgccactatgattaataaatatgaaacagtttggccacaagagttgcttaccttcccattttatcagaataggaatgcttaatttgaacagatttaaaaattagatgaaaatttcaaaagcatttataaatagtttgatataaaatgtaatgtttgaagagtagagatctagagttttatcagcatctgtcttaaatccagggtatcacgacttcggctgtgccaaatgcatcttacattctggtttcgcattttatttgcatttcttgtgaagcggaaatcagcgattaaaacggctcacattttgtccagttgtctgctgatttatgaggctgtccttcgggcaacatgagtgtgtgtccggtgtgtccgcgagtttctgggaccgctgatgataacccgctcctcttatttatcatgttgatatgtttatttcccagctggcacagtgacacggccgcagggcaattgcagcgtgaaaatcagcaatcgttcaatttatcaacatttgcgagattataacagccagcgcgggagaaagagatacttttttttttttttttttgtatcttttgcgctcgaactcgagttcgtgcccgtttggagcggcctgaaatcgcagctgcagcacacgatcctcgatcccgatgacaaatggccacatgcaagactcctccatgcccgctgcctccaccttcagccagatgatgaggaggtggagcaaatttaggaggaggaactggcggcttgtctcggcggcatcacgcatcaagttgcgatttgcgccataaatctaaattagctggctggtggtaggaatc

SEQ ID NO: 14846 - DNA, 863 bp, DROSOPHILA
cctctttcttttctgcgcaccacgtttccgattcgacgtcaaaatgaatgcgaaccttccgatttccaagaaacgcaagttcgtttccgatggcatcttcaaggctgaattgaacgagttcctgactcgcgaactcgccgaggatggctactccggcgtggaggtccgtgtgaccccctctcgcactgagatcatcatcatggccaccaagacccagcaggtgctgggcgagaagggccgtcgcattcgggagctgaccgccatggtgcagaagcgtttcaacttcgagaccggacgcattgagttgtacgccgagaaggtggccgctcgtggcctgtgcgccattgcccaggctgagtcgctgaggtacaagctcaccggaggactggccgtccgtcgtgcttgctatggtgtgctccgctacatcatggagtcgggagccaagggctgcgaggtcgtcgtgtccggcaaactgcgtggtcagcgtgccaagtcgatgaaattcgtcgatggcctgatgatccattcgggagatccgtgcaacgactatgtcgagaccgccacccgtcatgtgctcctccgccagggagtgcttggtatcaaggtcaaggtcatgttgccctacgaccccaagaacaagatcggccccaagaagccgctgcccgacaatgtgtccgttgtggagcccaaggaggagaagatctacgagacgcccgagaccgagtacaagatccccccgcccagcaagccactggacgatctgtccgaggcgaaagttttgtaaacctagttttactgttcatccaatgagcgactagctgaaagagttgccctcaaatacaacaaaacaacagaaacaaaac

SEQ ID NO: 14847 - protein, 246 aa, DROSOPHILA
MNANLPISKKRKFVSDGIFKAELNEFLTRELAEDGYSGVEVRVTPSRTEIIIMATKTQQVLGEKGRRIRELTAMVQKRFNFETGRIELYAEKVAARGLCAIAQAESLRYKLTGGLAVRRACYGVLRYIMESGAKGCEVVVSGKLRGQRAKSMKFVDGLMIHSGDPCNDYVETATRHVLLRQGVLGIKVKVMLPYDPKNKIGPKKPLPDNVSVVEPKEEKIYETPETEYKIPPPSKPLDDLSEAKVL

SEQ ID NO: 14848 - DNA, 2975 bp, DROSOPHILA
attgtaaggcaactaaaagatgtgtctacatcgtgctttcgttttcaattcaatctgcttgaataattcatcatgaggacatgacatcgcatcgaattgcacagacagacatccaatcgaatcaactttaattgaatgaaaacaaatcatgccaatcatattgactctaatccaattaaattaaacgaaaatatttcaaaatacatctaagacgatttggatcaatttaaatgtggccaaaccacatgtgttatcctttttggaaaacgaatccgtattgataccatttcgttcggcacaaaaggctacttcaattaaaaaaaaaaaaaaataagcacacacagtctgttctttaggaaggcaataatgggatgataatgtatcattaacaatatctatagttgccatcaaattgcgatatatgtagagccagaagctccagtgtagttgagtgccacgttattcgctgtccgttaagccatataagtcatcgctttaattttaattgccccctggctaagcttacagcgcttactacgcctctgttgaccgaggacctacgggcaccggcgattttcatgtctgctccttgaactacttgcctcgtgcatcctggccagccacgtttttatgtgcttttaagtgtgcaattaaaggtcaattgccgccacggctggactggacagaccaaaccaaacggctcacgctgaagtagcccataaatgagacgatgtgtgtggagctataagcgtgtaattcgttctttccgcttttcgtttttaaacattacctcgattgccttcgatgtgcatttaatgtgtttacaaaactagaacgttgctgtcctgcgggcacagaaatcgacaacaaaaaaaaaaaaaagaaatcgttgtcaaatgagtgaataaaataaaactatgtagctggctgtgaaatttgtatattaactattcacacaattcaagcgattggtaataactcgaaaatttccagtatccacatggcccagtcgaatgcacacaatttggtcgagtacaaggccggccgcatggtccttctaggcaagatggtcgaacccgatgaccgcaaaggactgctctttgtgcgccgatccgccgatgataatcagctccatatccactggatggatcggcgttccgggtccgttgagctggatattgtagcaacgccgggcgtcctcgagttccgtcgcattgatcagtgcaaaaccggtcgggtttatgtcctaaagtatacacgatcgacgcagcgttactttttctggatgcaggagctgcaggcggatggggatgcgttattttgtcagcgggtcaatgaattgattgccagtggtgaacgccaaagggatgagattgcggcggccgagggcgatatggatacggatgcggatcatacaacagcacgacgcggtttcggtggcagtgagaatcctcaaattctggaagagatgctggtcgaaacgcaagcaacttggctaccagctaaccggagtttgaatcattggcaaactggtgatgcgatggaagaaccgcccttgccatttgccgatcccgatgcaaatacagatacagatacagatacatatacatcagagtcgggtatacagacattcgatttggcagctgttttacgcctacatggcgccgaagcagtggacaaagttctaagttgcccatcgagacgtgaaaaactaatggcccaattgcccaaagatcatgaggcgatggatgagcagtcagacatactggagcatttgcattcggcgcaattctacgaatccttgtcctctttttccgtaggacttcattctggtgcactcagaaagagtctggagcctctattgcaaagtgatgacaatcgcgaggccttgaatgccgctcaagttggggatgttgagcgttttcttcgtgaacttgaacgaaacgatggggattatggtgggccaaccgattgaaccgtgaggttcttataaatatatttaaatatagttaattaaatatggcgcataatactgatgagtggatctatagggtaagagggcgtacaaaatgcaataactgcttgattcctgggccgtcgcttcgtctttcgagttacgaagataaatgagatgccataagttagacgacaacttgcacaactccagacaaagaccaagcggataaaagtgtgcttgtgcccaggaaaaaagtagcaaaaataagagtaaaaaaaaaagataaaaaaacagaaaaatgaataggggaacactaaaaattgatataaaatacacagaaaaagaagcaaggcagcgatgaaaacaaaagaaggaaatttctcaaataagaaaatagttgtaaactatggggagtacttaggatcgggttagtgtgactgtggggtgttccagtgtttcacttctttgccagtttaagagtcctcggtcctgcgacagcagttttctttgcctcatttgtatggcgcctgtcctgtcctatgcctgtcctgccaacaatcctcttctctccttcggtccatgactgccaaaaactttttccacgttgttttaatgaaactaagtgagcggcaaaatggtggacagcgggacagtgtaaggaattgtgctatgggttttcgggccagataaagcattcgaaaatgctgggctggtaacagttttatccgtttttttttttttttttgtttgccgttgaagaaaagaaaacttaagaaaagcaaaatgttcagaaagttgttgcattgtgtcagagtttggacaatggtgcacgatggcggtggaaaaattgaaccaaaaaaaaaaaaaagaaaaggaagagaaaatagttactgagaaaaagcaaatttttctgcacaacattctgcattagtcattacagagtgtgaccagcgtgtttaacgttagtaaggctgcactttgtttcttgcatacctaactgcatgttaaaggcatttaa

SEQ ID NO: 14849 - DNA, 975 bp, DROSOPHILA
atggcccagtcgaatgcacacaatttggtcgagtacaaggccggccgcatggtccttctaggcaagatggtcgaacccgatgaccgcaaaggactgctctttgtgcgccgatccgccgatgataatcagctccatatccactggatggatcggcgttccgggtccgttgagctggatattgtagcaacgccgggcgtcctcgagttccgtcgcattgatcagtgcaaaaccggtcgggtttatgtcctaaagtatacacgatcgacgcagcgttactttttctggatgcaggagctgcaggcggatggggatgcgttattttgtcagcgggtcaatgaattgattgccagtggtgaacgccaaagggatgagattgcggcggccgagggcgatatggatacggatgcggatcatacaacagcacgacgcggtttcggtggcagtgagaatcctcaaattctggaagagatgctggtcgaaacgcaagcaacttggctaccagctaaccggagtttgaatcattggcaaactggtgatgcgatggaagaaccgcccttgccatttgccgatcccgatgcaaatacagatacagatacagatacatatacatcagagtcgggtatacagacattcgatttggcagctgttttacgcctacatggcgccgaagcagtggacaaagttctaagttgcccatcgagacgtgaaaaactaatggcccaattgcccaaagatcatgaggcgatggatgagcagtcagacatactggagcatttgcattcggcgcaattctacgaatccttgtcctctttttccgtaggacttcattctggtgcactcagaaagagtctggagcctctattgcaaagtgatgacaatcgcgaggccttgaatgccgctcaagttggggatgttgagcgttttcttcgtgaacttgaacgaaacgatggggattatggtgggccaaccgattga

SEQ ID NO: 14850 - protein, 324 aa, DROSOPHILA
MAQSNAHNLVEYKAGRMVLLGKMVEPDDRKGLLFVRRSADDNQLHIHWMDRRSGSVELDIVATPGVLEFRRIDQCKTGRVYVLKYTRSTQRYFFWMQELQADGDALFCQRVNELIASGERQRDEIAAAEGDMDTDADHTTARRGFGGSENPQILEEMLVETQATWLPANRSLNHWQTGDAMEEPPLPFADPDANTDTDTDTYTSESGIQTFDLAAVLRLHGAEAVDKVLSCPSRREKLMAQLPKDHEAMDEQSDILEHLHSAQFYESLSSFSVGLHSGALRKSLEPLLQSDDNREALNAAQVGDVERFLRELERNDGDYGGPTD

SEQ ID NO: 14851 - DNA, 1845 bp, DROSOPHILA
gctcatgtgccgcagagaatcgccggctgtgccattgtagcggcccagtgactttagctcataggattcaatctcgccgccgagttcgaagttgtcgtagtgggcgtggctagtggtgccatcaatcttgcccagcttaatgtacagttcgtggcgtcgttgccgcgtcataaggtgcactttctccaggccgatgaaaaactcacctctcacgcgtccgaaaccatccttgtagtccttccaaccgcgatcgaagttctcggcgccatcgtatcgtttctgtatggtcaaccagccgttggaactgcacggcgcctcgaatgctggcaattcacggatcttcagcttatagatgccacctttgccgtcgatgggacacgtgtcctggcggctgcactgcgtcaccagttcgttgctcatttgcttgatctttgccgcgctcaattgtatttgtatgtccttgcttttgatctccgcctgggcattcagacactcacttcgaaggactttcatgtttttgatcaaaacgttgagcctggcactttggtccttgatctgaccggcttgcagcaggagcagctcgttcttgtggccaatgcgcgtctgcaggtccttgatggtttccgacatggcgttgacctggttcttcagctcatcgctggagttcaccttggcgaatcgatcgaggatgggtctccaaacccaaatgcggtgagcactgcacggattgtccgcattctgatcgaaggacctctgcggatcgttagccaaggaagtggatatcgagagcgaaagaatcaggatgaggtatgcggttttcattatcctgaacatgcgaactgtgccagttgctgcgccgaaataaactgattttttatgcgctaatgaatatttataagcacttgatgtgcccatcaaatttttaataacgtgttgctttagagtcttcggcattttaagtcgcgagtttaagtgtccacataaattcgcacagaggatgaaatgggtttgaactttgcacagcgataaatgggcattctttttaaataaattcgattttataatatataatgtgaatgcaaaaatcgtatttacaaatcattatattctcgcagtgcctcacttttatgatgcttaactttttaaatcgggtcacaattttacaacttcttcgtttttcaaaataactgtatttgggtgttctaattaaaaccggttgaaagttacatttaaatggaaatgaaatttttaattgcaaaggatttgaattaaaaaaaaaaaaaaagtccattaaaaaatacaactcaagctgtcgtgaactagtggtcccaatgcgatgcattggttatgcatagagcggaaattaatttaaagtaaagacataaagtcggcttaaagaaatatttttgaacaaaaaatccaccttgattggttcgagagctcgcttaggcaggaggctgtactggctaagtttattttgtgcaacaaccacttggcagtggtatcgattaattcggatgcacatttatcgagccgctattagcactggcttgcaggggtctaaaacgaatagttcttttcgataggcaagatatttaaaaattataaatcaattcatatacttttcaagaaaatgctatctattgcgcatcaagcaatgcgaattgctctctcatacgcataaaatggtcaattaggtgaaataaaccgattccccaaaacatcgaatcgtaaaccatcggctactattgcaaccgatgccccgattgtggctgtctaccaccaccgttccgcccgatacaccgatacatcgatatcatcgcgagtggctaacccagctctgaa

SEQ ID NO: 14852 - DNA, 845 bp, DROSOPHILA
gcacagttcgcatgttcaggataatgaaaaccgcatacctcatcctgattctttcgctctcgatatccacttccttggctaacgatccgcagaggtccttcgatcagaatgcggacaatccgtgcagtgctcaccgcatttgggtttggagacccatcctcgatcgattcgccaaggtgaactccagcgatgagctgaagaaccaggtcaacgccatgtcggaaaccatcaaggacctgcagacgcgcattggccacaagaacgagctgctcctgctgcaagccggtcagatcaaggaccaaagtgccaggctcaacgttttgatcaaaaacatgaaagtccttcgaagtgagtgtctgaatgcccaggcggagatcaaaagcaaggacatacaaatacaattgagcgcggcaaagatcaagcaaatgagcaacgaactggtgacgcagtgcagccgccaggacacgtgtcccatcgacggcaaaggtggcatctataagctgaagatccgtgaattgccagcattcgaggcgccgtgcagttccaacggctggttgaccatacagaaacgatacgatggcgccgagaacttcgatcgcggttggaaggactacaaggatggtttcggacgcgtgagaggtgagtttttcatcggcctggagaaagtgcaccttatgacgcggcaacgacgccacgaactgtacattaagctgggcaagattgatggcaccactagccacgcccactacgacaacttcgaactcggcggcgagattgaatcctatgagctaaagtcactgggccgctacaatggcacagccggcgattctctgcggcacatgagc

SEQ ID NO: 14853 - protein, 274 aa, DROSOPHILA
MKTAYLILILSLSISTSLANDPQRSFDQNADNPCSAHRIWVWRPILDRFAKVNSSDELKNQVNAMSETIKDLQTRIGHKNELLLLQAGQIKDQSARLNVLIKNMKVLRSECLNAQAEIKSKDIQIQLSAAKIKQMSNELVTQCSRQDTCPIDGKGGIYKLKIRELPAFEAPCSSNGWLTIQKRYDGAENFDRGWKDYKDGFGRVRGEFFIGLEKVHLMTRQRRHELYIKLGKIDGTTSHAHYDNFELGGEIESYELKSLGRYNGTAGDSLRHMS

SEQ ID NO: 14854 - DNA, 2360 bp, DROSOPHILA
tacaaatgcaaaataaccaaatgtgacaaaatgcattcgcctgacaatttatcgtgttcgttgtgttcgacgacgcactgcttccttggcgactgggcgagttgccaccagtaatcctcccgctccatggatctcctggagccaaacaaactagtttacgcattttgcgtgtgccaaacgtacattgatgtggcgatgtggatttatatttatgggcctagccgggcgtggccttgatctagaatttcagttgtgcgtcgtttttccgatgttttcattttcgttttcattttcattttcgcttgcgtacaacgcggcgtatgtgtgatgtgcgtaagttgtgatctcgggcgatctcgggtgagttaaggtgatgttttcgtgttcgccgcttgcaccgcacttgcacttgcgtaatcacagatcacagatcggggtgctaagtaccggtttaaatgccggcccagaccagttagcttgttttttttttttttttttagatatttaactatatgcatctgaactgaagcgcctgtggaaacgcgtgcgattatttgtactcagtttttctgtatttatctttctgcacttgtaatttattgagaaatttaattgaattcgcatgctcgccaaccggtcgcataatttttgtccacacgattacacattgtgcaattactcgatcccatacgtttttcccacttttcgcacttatcacctggttttcgcaaacagttggtggaaaagccatactgtgaaaacaattcatcaagtgacttaatgatagcacactgagaaaaacgtttaagttgtattaaatgaaccttgtaagtttgtatttactacatatacgtttgaaatttttattattttcctgcagtgcacaccattggctatataaaaagcatttgatcagatttttgttcatattccaagaatcaaaatgcgtttgacaatcttatgtattttttgcctggcaactgtgatcctggctatcgacatggactcggattcactacaggaacagtacgaaagggagcagtacaatattcgcaaaagtttgttgattatattgtataaaactacttaaccataatcaaactaagaaatgtaataaattgcagaaatttgccttcaaagttcggaatacggaaagtgcaaaggtcgtcggaaactttggttctacaaccccaagaaatccaagtgtcaagtttttatctactcgaattgtggtggcaatggcaaccttttctataccaaggaaagttgcgtggaattttgtggcaaatacgactggaagaaggtgcgaaagacaggacttcgacgttcagctgattatagaagaaaagatgggaattaattgaatatatatacttgaatttaacaattaaatatacattgtttaaaggaaattactagttcacaaatgtgttcgatttcaattacctgtgtagatcagaacagattttcattagctgtaaagagtataaatacccaatgaaatacattttcaagtgcattttgaaatgaaactgcttacccagtttttgtgccttttggcggttttgctctcaacagttgagagtgctgaaaaacgaaagggtaagttgaagtattttattattttattcacaaaaggcaattagtatttcattaatgagtatctttccaaagctttttgttatcttccctacgaatttggtaaatgcggaggtcatcgcattatgtgggctttttcgaataaggaacaagagtgcgttccattcgttttctccaattgtggcggcaatgaaaatcgcttttataccaaggaaaactgcgagaaagcttgcgcaacaattcaatcccgatttgttctcgctaattaatataaaccgatttttttttttaccaaaactcaaggcaaatgtcctactttacccaacgtttgcattgtgtccaaaaaaattcaatgcaaatttcaacgctcacctttctctcttattggccattttactcgtacactttaaaattatttttgatttatacatggtataaaataattaaaaaaaattgttttttataaaaaagtttttagtgaactgcagtattttttattgcctagaaacaaataccagctgtcgcaccgaaaacttacaaacttcacacctaaaacgctttcgttttgaccacgttggcgtctggcggtttttttggtacaacttgtagccggcgctcatgaaaaactggagggcagaacaagcagtggaaagcttctcaccagctccggcgcacttccactgccatgtattgttaatccgccctggtaaaaaccaaaaaaaaaaaaaaaaaacaaaacgcaaaacgagaagcacataatt

SEQ ID NO: 14855 - DNA, 294 bp, DROSOPHILA
atggactcggattcactacaggaacagtacgaaagggagcagtacaatattcgcaaaaaaatttgccttcaaagttcggaatacggaaagtgcaaaggtcgtcggaaactttggttctacaaccccaagaaatccaagtgtcaagtttttatctactcgaattgtggtggcaatggcaaccttttctataccaaggaaagttgcgtggaattttgtggcaaatacgactggaagaaggtgcgaaagacaggacttcgacgttcagctgattatagaagaaaagatgggaattaa

SEQ ID NO: 14856 - protein, 97 aa, DROSOPHILA
MDSDSLQEQYEREQYNIRKKICLQSSEYGKCKGRRKLWFYNPKKSKCQVFIYSNCGGNGNLFYTKESCVEFCGKYDWKKVRKTGLRRSADYRRKDGN

SEQ ID NO: 14857 - DNA, 11153 bp, DROSOPHILA; identical to SEQ ID NO: 14839

SEQ ID NO: 14858 - DNA, 1487 bp, DROSOPHILA
gaggatagatcgctattttttaggagtaaatttaaattcgaacgagttcaacgattttttcgtgaacagaacaaaacaaatcgatcaaaatgttcaaaaaccacttggaaatgattgggcgcaatgagagccccagcaagaaggcgaaattctggcagtcctacatcaggtccctgaagggctccgaggatatccgtgcccacgaggcgccccgtgcctctcgtccctacagctcctacctggactcgccctcctacaggagcatctatgacgagcccgccaccgccaatgagcgcgtccagtcctctggctacagatatctgccagtgagccgcgacacctacggctactcgccccgtgccatctacgatcatcactacagccgaacaaagaaggcctggaatgatcatctgaagcgcatgcaggagatcgagcgcaggtacccatctcgctatggtctctacttgagggacaagccactcacgcccaactcgctggtgcccctggagtacgagccagaggacaagctgctggctgagctcaacaaggctataagagtttgaaacgctgagcgttagtgaaaataaatacttttgtttgcttagctcgtactcgtcgctcggcctcgccgttccgccctgccaggacgacccgtgccggcagcgagccgtacgtgccaccgccgagctactggaaccgcgagggcagcgtgccacgcggaggaccctcggtcttcgatcgtgccaccagcttggccccgttcacgcggcccagcttccgtgccagctccctggagccgctggacgaactctttgaacgtaagttgcccgcgatcgccgaggctgattcggcgccagctgatgcgcccagtcggccactcggtatctttgagcgcgccggttcgccaagtcccactcccgtgaaagccggtcgctggggaccccgtcccaccgaagtcgcctacgatgctgagggactccccatctttcacccacgcaaccgcttcagggatctgctgagccccagccccaacttgccgatctcctcgattgtgcgcgatcccttctggtgggacgtggatgacctggtgcccttccgcgccacctcggtgccccgtgcctcgagccccgtggcccgggattcgtacttgtcgccggtgaagaaccgctacttgtggtccaagcacccagctagacccttgacacctcaccgctcaattttgtaaacgaacgaaacaacgaactacacaccaactaaataacatcctgaagaactaaaacaacgaatgcatcacacaaggggcccccaaaacaatgacaacctgctttggagtagatcagtagcaaaaggctttgcaagtcttaatatccgtgaaaaacgtttgaattttttcaaaactgcaagaactcccctcggaacgagaaaacaaccatcactttcgtctggggttctcaaaatatttgccaagaagtgcgtaattcccgtag

SEQ ID NO: 14859 - protein, 157 aa, DROSOPHILA
MFKNHLEMIGRNESPSKKAKFWQSYIRSLKGSEDIRAHEAPRASRPYSSYLDSPSYRSIYDEPATANERVQSSGYRYLPVSRDTYGYSPRAIYDHHYSRTKKAWNDHLKRMQEIERRYPSRYGLYLRDKPLTPNSLVPLEYEPEDKLLAELNKAIRV

SEQ ID NO: 14860 - DNA, 4961 bp, DROSOPHILA
cacaatgcgcgtagcctacgcacacccacgcggtagttttatccaggttatcagagcatttagtgctacactaataaaatcgataacggcgcttttgctttttaatttataacgcccaattgaccaacaattaagtgtctactatttaccgactgacgcaactcggcgtcatgcggatacacgtagttctaacgccgccggcaaacgacgaatgttaacaaaaaaaacccggcgaaagtgtggccgtgctgccaactgtccgctgataacgtgtgcgcttgcgccagcccccaaatgcagcagatgccacccacccacacttgtggcacgcacttgcaacagaccccattcacacgaacagtgcaaaagccccagcagcattgtgttttatactcaattagcaagagcaaatgcatcgcaacggaaacggaaacgcgtgggcagaacatccgcagcccaaaagcaaatcagagaccattcagacttgtgcctcttctctttatacatacaacttcaataaacgatacaataagaaacgatagtaagaaacatgctttctataaccccaaaggtggaatttcttttaacagtttgaaatttgaaactttataattcatatcgattcaaaaatatgacctccaattgaaaatgtaattgaatttggtattctcgatccctttagccattgaaaatatgacaccctacgaatttcgggatccttaacgataactttcaagccaaactaaaatatctggcattgttcgcctcacaaacaagccacttaaaaattcttttttaggtaggaactaaaattatttcgatgaaaacacgttacttgcttactcacaaaaccgtaaatttgggaaatagttggaaaaatgccaaaatataaatttataactaaaactaatataattttgattgctgtgtctaagcttacatttcgtcattaacctaagcaacaacaagcttaaaagcgaagtgtaaaagaaagtcggaatgttttaaaagcacttcaagtaatagtttattcaaatgcattcggaaattggtccccgagtacgaggagtattcccacatacaccgactgcgggtgtacgggtgcgattataaattaacattgggcagagcgtgcagttccatttgatttggtttagttcactgttagtcaacaagaatattggctatctgagttagttttaatgcatgtagtcgtatggatattatagttttagatcagtctcttagacggccttgtagacgcgcacgcacttaacgttgccgatggtgagggtctgtgggggaggcattggatcagttaggtgggtgtgatgatatacggcaaggtatagtaagcgcttacggtgatcagctcgttgtcggtgaactcgcggacgatggtggtgggcttgtcgcccttctgctcctgcgtcagcttgttgccatccagggtgatgatgctcttgacgttgcgaccgtccagggtctcctcgtcgaactcaacgcccagcttgaagctgatggcagaggtcttgaaggtggaggtggtagtcagggtgtaggtatcgccctccaaggtcacctccactgtggggctcaggctgttgcccatcttgcgcgtcaccagaccgacgcctgcaagtggaaagggaaaagaaattaatgaagttccatctcacgagaatgtaaggaaatcaaagatcgcaccgaaagatgaatgatggggcagactgcacataattgaattagcccaacaaagttggggaccccaaagcgctcacaatgcaaatcatatcatatttaattaaaaataataaagccgagccatgaagttccctgcagattccgttccgctgtaacgtcaaaagtcgtgctcaaggttaacgaacaatgcgggccgtcgtctcctccctcatcctcatctccgctcttatcaattggcaagcccctccatgcatttaaatatagatctggcaaagcaccaccttatctcggtgcagcattccatatatacatatgttgtttgagggcagaactgtgaatataaatgccattcaagcagtgtaaatatatattttactggcttaagtggtcaagatccattttgctgacgttccaaatcgtaaacctttgaagtgctgataattaccatcgaaagataagcaaagcaattccatcattaaatgataacttaacgattgtgaacaatcaatcgtgtttaagtactaaaatttgtcacttaattttatgggacttgtaattactgaaatactatatgcatgcacgtagctgtatgagtaattttgcatttatatttttatttgaaagaagtttcgccaaatgaaacgttgaatcaaaaacaaagtgtgaatcactggtaccttacgaatgtgccagcaaatagggcacatgtattatttccaatctagtacattgtcagacatcaaaccaacaagtggtccaatcaattatgttcaattatgtatggaccaccaccaacttgttcttttgtccagtgccctcaagtcaagtgtcaactggcgtggcgcgataagtcgccaggttcccactcatgggaacccagcaactgtaccagagatcgatttatatgcatcgtatatgacaggagaaccttgaatagattagactggcctgcaattgcgaaccgtggtctatgataggggtggctgcccaaagtgcaaaatccgtaatcgcgcctaattatcgtgccttttgcgacattgtatatactacaaatgtgtgtacataaataggcatatagtttatcgcatttatatatgtacgacaactgataagtgctgcgaggccccaacggcaggttgattttagatttgtttgggcttgaaaattgagaagtacgtggctttcggaccaagtctaccattaaaccgaagccgcaaagtgtgtaggcgaaaagttctgacgaactggtggtctggtaaataaatctggacgcccgtctctggttaccaaatgccactagtccctatggcgcgtctagacaggaagcgatggtattgatcagttttagtggcaccatatagtataatcacgattgcaatagaaattgcactttgatcggtaagagagtcgaatgtgtcctatatgtagtttatatctggtgtttcattgttgtctaaattgacagccgggcaaagatcatcgcagctataaagcttgtagtctagtgcaaagttcactgcgagactttctcccaaaatctagtacacaaatagataaaacctgtcgcaaaagctaatggcactatgatgatttcggtcccatggaaagctgacggaggtgactcaaaaaaggggagcaaagttcaggccccacacttaattagtttttgggtttatgactaccgcagataaccatttacggattttatactgcttgtcctccgattcgcaactgtaaagttgagaaagagggtgaggtgaataactggagcacgtttttattgctgcagatgtgcatctctttctctggtcctattctctattgattttatctgacacacacatacgcacatcagcagattcaatgaggtgtcaatttatgcatgtagctaaactattttaacagtcgaattcattcataatcttcagttgatataacattttccggaagacatttacttttttccctctcgtttggccaatgaaactttttgcacactagtgcgaaaaatgccggccggtcgattttcggtggcgtgttttcggcttcttttctctccctccactcccgctctcgctctctcgagcactttggttttctatttttgatgcactgcgaattagttttggcaacttacccagctccttcatgtactcatcgaagttctcggacttgtccagcttgtacttcttgccaacgaaagacatttttggaatatttggtctgtgttctgcacaagatgttcactgttgaaattttctgagcgaatgaaaagctctgcggcgtgccggctgttatatactttcgcgttgcggctacggcattgccagatgcaagttaatggcctctcgctctcatttgattcgctctcgttctgcggcacggcttttgcacgtttcctttttgtttgtctcacaaattaaaaatttaatgatgtggcatcggctgagcatcggattaccagatgcaaagccaagtacagccgccaaggtatcgaaatgtcggcgccaagccgttggcgctcttacaaaaagcagcttttttaggcgctctccaaaaaaaatattaacggttctatgggggccaccactccccctcacaccgcatattggtaatggatcggacgtgttactgccacccaacgtctgaccagctcctcctgctcctcccagcacccaagcaccttcaccttggcgcgatcaattggctgcagccttaattggttcaaaagcaccggcctaataacgaacgccacattgtcatgctgacaatggaactgcaatgtatctcgcattatacagtcaaaacttgcctattttggcgcgaactttaaacttttctccgaatttcagattacgcattgggaaacccaatgtgtgcaagtaaggaaggggaatttatttgaaacccagactatctcactttgtagtacaaaattattattaatataatatcaagatttaaaattttaacatacatacacacggtatattttatttaaaaggatatccgttatccaggtttctgagtctcgactgttcgccccccatatattccgaattagtagacttttttctgtgggtcagtggcaccattaaaagaatctcccgagcttctacattttaccaatgtgtataaataattttcgacacaattcgtttatattattgttatgaataactcttgataagtcgccggtgaattgtaatctaatcgaggacttccttccacccatggtcaggcaatgcaatattgag

SEQ ID NO: 14861 - DNA, 687 bp, DROSOPHILA
aatttcaacagtgaacatcttgtgcagaacacagaccaaatattccaaaaatgtctttcgttggcaagaagtacaagctggacaagtccgagaacttcgatgagtacatgaaggagctgggcgtcggtctggtgacgcgcaagatgggcaacagcctgagccccacagtggaggtgaccttggagggcgatacctacaccctgactaccacctccaccttcaagacctctgccatcagcttcaagctgggcgttgagttcgacgaggagaccctggacggtcgcaacgtcaagagcatcatcaccctggatggcaacaagctgacgcaggagcagaagggcgacaagcccaccaccatcgtccgcgagttcaccgacaacgagctgatcaccaccctcaccatcggcaacgttaagtgcgtgcgcgtctacaaggccgtctaagagactgatctaaaactataatatccatacgactacatgcattaaaactaactcagatagccaatattcttgttgactaacagtgaactaaaccaaatcaaatggaactgcacgctctgcccaatgttaatttataatcgcacccgtacacccgcagtcggtgtatgtgggaatactcctcgtactcggggaccaatttccgaatgcatttgaataaactattacttgaagtgcttttaaaaca

SEQ ID NO: 14862 - protein, 130 aa, DROSOPHILA
MSFVGKKYKLDKSENFDEYMKELGVGLVTRKMGNSLSPTVEVTLEGDTYTLTTTSTFKTSAISFKLGVEFDEETLDGRNVKSIITLDGNKLTQEQKGDKPTTIVREFTDNELITTLTIGNVKCVRVYKAV

SEQ ID NO: 14863 - DNA, 4370 bp, DROSOPHILA
ccgcaagtttcgccattttacaaatgttagttacttattttgaatcacaatcactttcgtgttagttctgtgcgcgatcaaaagaaaaactcaaatcgattaaaacaaaatcaaagtctttgttttagcttgatttattacaaaattataattaaacgaaggcgctacagtgtagcgaaaatctaaattatgcatgatggtgcaatataataatcttttcaatttattacaaatacgataataaattaagcttaaatgggttttgtgtacatttcccgaaagaggaaatatgcgttcaagtcgttaagtactgtagaaaatcataacagcggtggacatacctttattttgggtttagaatgttaaactcgcataaagtaaacgtgcgcactctagactacaaaatacaaaaagtatatgtatgtatacatatcctacaatatatatgtatatttatatataatatatcgtaatttttaggttctctttcgtgtataagatcagtaattagaggattgtgggatccagatccaatccattttttgttacttccttttctcatttgacagcatcacggcatgcttttcaaatgttttcatctaaattcaagatcactttataacctagccaatttcaagacatcttacattaaattgggtgtgaaatggattcgaacgcagttcaatagcaaaattaggaacgaaaataaaacgagtttgatgaattgcgtcgcttgtgtgtgggtgtgaggttgtgtgtttcataaactggataacaaatgcgtttgataagcgccaaccggctgtgtctgtggttctgttttgtctaactctgtgaactaataatgtaaacaacaatgtaatgaaattatacaaaaaataataattcaagaggttctataggcttggcggaaaaaatgcagttaatacacaagattcgctgcaattcacataatacgctacaagattcgctgcggttggttacaatttcacttatgttattagtgcgcgtgctggtgtgatgcggctcccgctgtgccgaacgcgctcatcagatcgccctcgtaaagggcaatcaatagcattatccccactccgctgagcatgccgagaatctgcagcagaaactggcccagtgatttgtgcgaggccgagatctctggcatctgacaaatagaacaaaatcataaataagtaattgtataagggtacaccttctgttgaccactcaccatatcgactagggcaatgtagatgaacagacccgcagccacggcaaacatccactgggccacatcctgcgattgtccaaaggcaatgccaaagatcatgccgatgaaactcaggactccagtcaacaggttgtagtagacggccgactttaccgacatgcccgcttttattaagatggcaaagtcacccagctcgtgtggcaattcgtggcagaagacagccagcgatgtggagaagccgccggcaatgttttccgcaaaggctgcaccaatggccatgccatccgtaaaattgtgcagaccgtcacccatgataatcatccaggccacggcgctcaacgtttccggcggcgaatggacgtgtccatggcgatgactgtgaccgtgatgcgaggactcgtgctcccgcaggatcacagtcacatgatcgttccggctgtccttatcctttgccttgtttactgcgtacacggcgtttccgtcaagatccgtgacaattgtgttgctatcctggccctcatgattctgctggtggctattgtgcttgtggttgtgattatggtgattcatttccacgcagttcgtgtgcagcggtgatattagggactcggcagcggcggccatgtcattggatccatcatgatcgcccacaccgttacgtagctccgctactgaaggtgcatctccgccagcgcccgccgctacatcgaagggaaggtgcatccactcactctgcttgttgttcatggtgatctcgtcgtagcaatatggataggagctgtacttttgcttgcagatcttgtcgccggccacggagttgtttaccgacgagtccggatcccgcatcacctttgcccgcgatggtttctttgtctccttcttctctacgctcttgcgccactcagagatcatagtcagcgcatgctccatcacgtaaaagaatatgatgccacctaggcaacccagtcctttcatgatcatcccccgctcatcctggcctgcaagagactataagtttaatgttagtcatggcttcggactaacccatcacaataatcagctttactcacatgaggcagcaagtgaagtagggcatcgccagtcatcgtaccaacggccagcgctaccagatattgaatgatgtacttgtaatacctggaacccataaacggtatgatggccacgcctaccaagccgagaatgccgcaggcaaacacagatataaaagcatagatccatactgcaaataatacaaaacagattagttagggacaatggatgggcctcaaaattaagtctgaaatcgcaccatagaatatatccttgtccttctctgcttccagcagttcttcagtggtatcaatgtcggacaagatagcaggttctatgcatccgccgctctgggctttcagctcatataggagaatcggacacagatgtagcaagtccttatcgctcagcgtaaagttcttggcctctttgccgagtgggtgtgtgttgttgttgggcagggatgggcatatgacgttggaggtggtgccattctggataagcgtgcagttgtttagctgcagactgtgatcttcttcttcgtgatgatgagcatggtgatgatcgtggggctggacgtgatgcacaaggcgactaccaggaacgcactttaaagtaaataaaaaatcgggagttaatcagcaataaatatgaaatagtcatcactatactcacagttccctcacttgccccactggccaacgagtggaggctgagctgctggagtaggccatcgaatccgctgctgttcatcagctcatcctgggccatcagcttctcgagatagtactgggtgatctgcgggacgcgtgattcggatgtggggccatgctcatggccagcatggcgcttttctcttctcgatggcgggctgatgctgtagttgaaggtgtcgtcgtcgccagaagcggatcgctgctgtcgccgatcggtggtttcactggatggacttaggttcgtgtagacgcgggcattcaactggtcctggctgttgtgggtcgtgacccgcgccggtcccagcagactctcgatgtgatcctgacagtgcagacggtgtgcacagagtaggcacaccacgcatacagccattatgtgacgcgccattttataggcccgacttgctttcgttccactcttccactcctaggactaatgctactgactctgactctcgtttcggtttactgcccagcactgttggctataatcattatatatccgccgagatcagtcagtcgtcaattcactcgcttatttcgttcgatctgaaattgaatgggaatgtcagcaggagattagccaaaaacgaaaacaagtacacatcaagccaacacacacaattctatttgattaagaatcatttatgggtttgccgctccactgtcagccccttattaccatcccacactcattaagccagaaccgatttacaaaggccatttgcccattgcataaccaaaatagccagcgaaccaaagcggaagttcaagatcgttcgttggtggatcgacacctccaaatatgggacaacgaacaactggttttaggtgcttcaagatcgccataaatgggcgatttcgctgcattcgttctttcggtagagcaatggataatagatcactttaattagatatgcatttttttatatttttttttttagaaactaaccacagttgagtgtgtcgaaccgttcgaaaattaaatagtctactgtattttcttcagttttttatcactttgaaaccccatttaatgcacattgcgttaacattcctacttcttatcagagcatttgcttttcaaatcacaatctcatatttaactggcttcttctatagactcttttcaatgtcagaatcaaaatgttcgattcaatagcgctacactacactgcacgaaaatcgaatgagaagttacataacgatagcacattgatatttactaactgcggctaatcggccaacttgttttttgctcctagtcgggagccaaattgttggatgccatgcggcttcttcgatgagcaaaatgcgagtggcacgcggcaaaaaggaaattcgccaggcggtactggaatttttcctaaaac

SEQ ID NO: 14864 - DNA, 2055 bp, DROSOPHILA
atggctgtatgcgtggtgtgcctactctgtgcacaccgtctgcactgtcaggatcacatcgagagtctgctgggaccggcgcgggtcacgacccacaacagccaggaccagttgaatgcccgcgtctacacgaacctaagtccatccagtgaaaccaccgatcggcgacagcagcgatccgcttctggcgacgacgacaccttcaactacagcatcagcccgccatcgagaagagaaaagcgccatgctggccatgagcatggccccacatccgaatcacgcgtcccgcagatcacccagtactatctcgagaagctgatggcccaggatgagctgatgaacagcagcggattcgatggcctactccagcagctcagcctccactcgttggccagtggggcaagtgagggaacttgcgttcctggtagtcgccttgtgcatcacgtccagccccacgatcatcaccatgctcatcatcacgaagaagaagatcacagtctgcagctaaacaactgcacgcttatccagaatggcaccacctccaacgtcatatgcccatccctgcccaacaacaacacacacccactcggcaaagaggccaagaactttacgctgagcgataaggacttgctacatctgtgtccgattctcctatatgagctgaaagcccagagcggcggatgcatagaacctgctatcttgtccgacattgataccactgaagaactgctggaagcagagaaggacaaggatatattctatgtatggatctatgcttttatatctgtgtttgcctgcggcattctcggcttggtaggcgtggccatcataccgtttatgggttccaggtattacaagtacatcattcaatatctggtagcgctggccgttggccaggatgagcgggggatgatcatgaaaggactgggttgcctaggtggcatcatattcttttacgtgatggagcatgcgctgactatgatctctgagtggcgcaagagcgtagagaagaaggagacaaagaaaccatcgcgggcaaaggtgatgcgggatccggactcgtcggtaaacaactccgtggccggcgacaagatctgcaagcaaaagtacagctcctatccatattgctacgacgagatcaccatgaacaacaagcagagtgagtggatgcaccttcccttcgatgtagcggcgggcgctggcggagatgcaccttcagtagcggagctacgtaacggtgtgggcgatcatgatggatccaatgacatggccgccgctgccgagtccctaatatcaccgctgcacacgaactgcgtggaaatgaatcaccataatcacaaccacaagcacaatagccaccagcagaatcatgagggccaggatagcaacacaattgtcacggatcttgacggaaacgccgtgtacgcagtaaacaaggcaaaggataaggacagccggaacgatcatgtgactgtgatcctgcgggagcacgagtcctcgcatcacggtcacagtcatcgccatggacacgtccattcgccgccggaaacgttgagcgccgtggcctggatgattatcatgggtgacggtctgcacaattttacggatggcatggccattggtgcagcctttgcggaaaacattgccggcggcttctccacatcgctggctgtcttctgccacgaattgccacacgagctgggtgactttgccatcttaataaaagcgggcatgtcggtaaagtcggccgtctactacaacctgttgactggagtcctgagtttcatcggcatgatctttggcattgcctttggacaatcgcaggatgtggcccagtggatgtttgccgtggctgcgggtctgttcatctacattgccctagtcgatatgatgccagagatctcggcctcgcacaaatcactgggccagtttctgctgcagattctcggcatgctcagcggagtggggataatgctattgattgccctttacgagggcgatctgatgagcgcgttcggcacagcgggagccgcatcacaccagcacgcgcactaa

SEQ ID NO: 14865 - protein, 684 aa, DROSOPHILA
MAVCVVCLLCAHRLHCQDHIESLLGPARVTTHNSQDQLNARVYTNLSPSSETTDRRQQRSASGDDDTFNYSISPPSRREKRHAGHEHGPTSESRVPQITQYYLEKLMAQDELMNSSGFDGLLQQLSLHSLASGASEGTCVPGSRLVHHVQPHDHHHAHHHEEEDHSLQLNNCTLIQNGTTSNVICPSLPNNNTHPLGKEAKNFTLSDKDLLHLCPILLYELKAQSGGCIEPAILSDIDTTEELLEAEKDKDIFYVWIYAFISVFACGILGLVGVAIIPFMGSRYYKYIIQYLVALAVGQDERGMIMKGLGCLGGIIFFYVMEHALTMISEWRKSVEKKETKKPSRAKVMRDPDSSVNNSVAGDKICKQKYSSYPYCYDEITMNNKQSEWMHLPFDVAAGAGGDAPSVAELRNGVGDHDGSNDMAAAAESLISPLHTNCVEMNHHNHNHKHNSHQQNHEGQDSNTIVTDLDGNAVYAVNKAKDKDSRNDHVTVILREHESSHHGHSHRHGHVHSPPETLSAVAWMIIMGDGLHNFTDGMAIGAAFAENIAGGFSTSLAVFCHELPHELGDFAILIKAGMSVKSAVYYNLLTGVLSFIGMIFGIAFGQSQDVAQWMFAVAAGLFIYIALVDMMPEISASHKSLGQFLLQILGMLSGVGIMLLIALYEGDLMSAFGTAGAASHQHAH

SEQ ID NO: 14866 - DNA, 3523 bp, DROSOPHILA
cttgacaatttttgctgcgcaatttaattttttgctgtttacaaagtgcgcggtaaacaaaaaaactgaaatcgccaaacatattatttcgccttgttcatttattttaataatttaagaacttttaagcatacacacgttcctgagtggttacataacacacacccaccttggccctccgcaaacgaccatcaaagtgcatttaccctgcatttgtttctccacccaataaatatagaattaaatgcatcatatgttctggatacactgctcaaaatttgtttatttttttacactcaacaatatttgaatgttagggcacaagaaacaatttagcaataattataattcgaataacatttttgatttacaaaagatatactcataatggatatttattttggtgcattagaacctgatcggttgacccacttccctcccaccaggcaacgcatttgtttatttctgaatagcgaaaagctttcagtttgttttggtttaatggattttatataaacaaatgttacgtacatacatatatacatagccttctggcgttgataaggtgctaactatcgctctagttagtcatttggcaggtattcgttctgaaagttcgtcttcaaacgacgcaatagatcgtagtcaccatcttagataagatagaacggcctcaacaatgttgtttcaagaacctgccacaatataccactttatttacaattcgttggtagcaaatcaatctttagatttctcgatggttcttttttaatggctttaaaaagaaactgggtttccgtgaatattctagatacaattttgttgtactagaactcagaacgagagatcccacgtctcattttgtaaatatagcaaatgttctaaacttgctgatacagtctcttttcaacatagttattctaaatatttactattgacctttgcctcacaaatctctttctctgagaagttatgaatggggtaaccttccgttttattcctattctacagtctccttgggcagtagtgttttcagtcgcttgtcaggattaacattccttatagtcttgctcttaacactctttggcttcttcttgggtgacgtttcgatcacgggaagctcaaagtcatcgggaaagctactgtccaccgtttccgagagctccaactgcaccggtttctctgtgtgaacccgctgcacgtgctccttcattttgtcggagcgatgactgctgaatccacacagctggcacttgtagcggttcggaccattctccgtgtgcttgagggcgtgacgcttgaggtttttgctctggctgaacttgcagccacagacctcgcagataaaatcgcgaccctgtttgtgagtttcaatgtgcaatttgaggttctccttgcgattggctcgatgcttgcagcctgaaactgtgcacgcaaagaattctccggtgtgaagcagtttgtgcgacttgagggccttcatgtgcgtggtgctatagccgcagacgtcgcagagcatttgcttctcgggattgtggaccaggatgtgattgctcaggccctgcttccacttgaagcccttgccgcaatgtggacatatgtgcggcgtttccgtggaatgcttaggctgatggacgagcagggcagctcgtgtgttgaagcggatgccgcactgtaagcaaaagaagggcttacgcagatcaccagagtgccgtcgtaggtgagtgtcgtattcccgccagtccagaaagccgacttcgcacagcgagcaaatcaaatgggagggctcacagctgcccatgtgctcgatcattttctgtacctgatagcacttgaagtcgcagccaatgcagtagttcactttgctgctggactttacagctcgcgggttcttaagctttaaggaaaaggcgaatataagttacggcagtggctcaatgacatattatccaccttgaagtaactttgtcgattctcaaacacagcctccgctttcttttctggatctggatttggttgcgcctctccaggtgctgggatctccgttgcttccttcgcctcgcccaagggctgcaactggtagagattcagtagttctgtcacagccaaaatttgcgctagctccctaaaatgcagttcgtgctccttggacacggacaccaaatcctcgtagaagaagtccacaattgtgtgcaggcattgggtgcagctgaaattacggatggtgatcttcagcggattgtgaatggagaactgctgttgcttctggttagagtttataaactggctctgagcagccagtacgcagaaatggacgcttaagctgagggaatcatccgaatccagttcgaggagcaggtcacagaattgtccggttcttcgctgattgtttagatagttcgataccttggagtgtagcggctggtgcagagtgggtatggattgcattgtctgtgagtgcagcatttctgcagcttagataatgctactagcactcgatataaacaaaataatcaaatgttttgctttaggacggctaaacagctgttcaacagtgtgaccaatatgcgctacggtgtattaaaatactgactagtatttttcgaccgttactttaaaaatgggaatttaaaagacagttcttaaatatttgtttaaaaaacttaattaattatttaattattatgtagtcagcacatacacacatttacacatttttagttattttaagattagatatttttaaaacttattgttttagattcttagaaacctttagaacattataaaaattggttttaaaaaatgctttttaaaactttcaactttcaaaacttcaaaactttaaacctataaaaaagccaatgaactttacagaatatcaaacaccgtcatgggtgttgaattgaattgtttatttatgttttgacactcaaacatcagcgacttgcagggaaattggaagagttaaacaaataatagggcccgcttaataagctcttctcagttctgttcgaacatttgagcgtcagttgagaggagacgttggtttcggaatgtcggccacacgaacagatcggtcgcttttgcattaatttattagtcggtgcggagttaaatcaaatcataacgcatccattgtttagcttcctataggaaatacgcttgcttaacctccggcaaatttgtttgtgttctgaattaccaaaggccaacgaacattacactgccaattaaagtcgagtgcaaataaataggctgagaatttgcccacccactattgtttgaaatcttatcggcttcgaatcgcggtcaaatgttctttatacgcagtcattgcaattgtgctgaaacctaatccttcggttagcataacggctaattactgggaatcccaaagtaaatagaaatttagcttaatttacacatatctttctcgctaagctcccccgtgccaggttccaattttcctttataactggcgcccccataaacagcacatagcatagataagatctacctg

SEQ ID NO: 14867 - DNA, 1467 bp, DROSOPHILA
aaacatttgattattttgtttatatcgagtgctagtagcattatctaagctgcagaaatgctgcactcacagacaatgcaatccatacccactctgcaccagccgctacactccaaggtatcgaactatctaaacaatcagcgaagaaccggacaattctgtgacctgctcctcgaactggattcggatgattccctcagcttaagcgtccatttctgcgtactggctgctcagagccagtttataaactctaaccagaagcaacagcagttctccattcacaatccgctgaagatcaccatccgtaatttcagctgcacccaatgcctgcacacaattgtggacttcttctacgaggatttggtgtccgtgtccaaggagcacgaactgcattttagggagctagcgcaaattttggctgtgacagaactactgaatctctaccagttgcagcccttgggcgaggcgaaggaagcaacggagatcccagcacctggagaggcgcaaccaaatccagatccagaaaagaaagcggaggctgtgtttgagaatcgacaaagttacttcaagcttaagaacccgcgagctgtaaagtccagcagcaaagtgaactactgcattggctgcgacttcaagtgctatcaggtacagaaaatgatcgagcacatgggcagctgtgagccctcccatttgatttgctcgctgtgcgaagtcggctttctggactggcgggaatacgacactcacctacgacggcactctggtgatctgcgtaagcccttcttttgcttacagtgcggcatccgcttcaacacacgagctgccctgctcgtccatcagcctaagcattccacggaaacgccgcacatatgtccacattgcggcaagggcttcaagtggaagcagggcctgagcaatcacatcctggtccacaatcccgagaagcaaatgctctgcgacgtctgcggctatagcaccacgcacatgaaggccctcaagtcgcacaaactgcttcacaccggagaattctttgcgtgcacagtttcaggctgcaagcatcgagccaatcgcaaggagaacctcaaattgcacattgaaactcacaaacagggtcgcgattttatctgcgaggtctgtggctgcaagttcagccagagcaaaaacctcaagcgtcacgccctcaagcacacggagaatggtccgaaccgctacaagtgccagctgtgtggattcagcagtcatcgctccgacaaaatgaaggagcacgtgcagcgggttcacacagagaaaccggtgcagttggagctctcggaaacggtggacagtagctttcccgatgactttgagcttcccgtgatcgaaacgtcacccaagaagaagccaaagagtgttaagagcaagactataaggaatgttaatcctgacaagcgactgaaaacactactgcccaaggagactgtagaatag

SEQ ID NO: 14868 - protein, 463 aa, DROSOPHILA
MQSIPTLHQPLHSKVSNYLNNQRRTGQFCDLLLELDSDDSLSLSVHFCVLAAQSQFINSNQKQQQFSIHNPLKITIRNFSCTQCLHTIVDFFYEDLVSVSKEHELHFRELAQILAVTELLNLYQLQPLGEAKEATEIPAPGEAQPNPDPEKKAEAVFENRQSYFKLKNPRAVKSSSKVNYCIGCDFKCYQVQKMIEHMGSCEPSHLICSLCEVGFLDWREYDTHLRRHSGDLRKPFFCLQCGIRFNTRAALLVHQPKHSTETPHICPHCGKGFKWKQGLSNHILVHNPEKQMLCDVCGYSTTHMKALKSHKLLHTGEFFACTVSGCKHRANRKENLKLHIETHKQGRDFICEVCGCKFSQSKNLKRHALKHTENGPNRYKCQLCGFSSHRSDKMKEHVQRVHTEKPVQLELSETVDSSFPDDFELPVIETSPKKKPKSVKSKTIRNVNPDKRLKTLLPKETVE

SEQ ID NO: 14869 - DNA, 4738 bp, DROSOPHILA
gcatcattaccatcgatgaaagggatacggctgacatgggactctttgatctacgcagcaagatatccataataccgcaggaacctgtgctcttctctggctccatgcggtacaatctggatccctttgaggagtataacgatgcaaagctgtgggatgcactggaggaggtgaaactgaaacctttgatttccgaacttccaaacggactgcagagcaagatatccgagggtggcagtaatttcagtgtgggccaacggcagctagtgtgcctggccagggctattctccgagagaatcgcgttctggttatggatgaggcaacggccaatgtggatccgcaaacagatgcgctgatccaagcaacaataaggagcaaattccgggactgtacagtgcttacgatagcccatcgtttaaacacgataatggattcggatcgtgttctggtcatggatgctggtcatcttgtagagtttggatctccgtacgaacttctcacctccagcgaatcgaagatcttccatggaatggtaatggaaactggacaaaacacattcgacagccttcttaaagttgccgaaaaggtaagttgctactatactttcgtttattttgttgttaatatatgtatatcataacactttcaggctcatttggaatcaatgaaaccgaaatcggagtagattaagcatctggttattggttactaaactgggagccaacaaggtctcatttcctggctgtaagcgtcttcaaagttgtacctaatccagtcagctgcatttaagctagttttctacttaaagtattatgccttcgaaccgtacatacttgtataactcaatccttatagatatactataatgtaatgaatcaacccaacgaacggttaaatatacagtctcaaaaatgtagaagtgaaagttttataaagttctaaatatatagaccataaatttgttttacattataatttcttagcactttgattagacaattagacagcagttgtggtaatcggggggtagctggattcaaattcatccgcttcttgtctccagtctgaacatctgttcatgttaagtctacgaaagaagatggtcactatggattcgcaagccaagatcaggatgacagtcaattgggccagaagtgcatgaactacggatggatgtgccattggccaataggcgttatgcggaacaaacacaacgaagaacaaaacgacggcgttgcaaatgagcatcaaactggagaatatcgtgcggatctgctgacgtccaaagctgctcagtgccaccacgctggccataatcactattgagggaattagcaaatggatgagcactagcagcggcactagtccgctgctggaatccggaaggaataatcgggcagagttggctaagtaggtgaagccacctacccagtggccagttccaaatagggatgcatagaagtaaagtaggatggatacagcgaagcgatagcacatctgtagatgctttgaggaagttagtatcttaacatcttcatctgcttccttgaacttctcgtgcacttcgagtcccatttgatactcgataatcaagccctgggcgaagagggatacatatgaatcactcaatagtacatgaagcgtaagcaagttgaagcgaatcaactctaggcgagattggggagtggtcctcgaactgcagggcaccgatgcgaacgcatagataagatacgcccagttggcagcaaataggtataagggaaccggcttgcccatctccttgaggaagattccgatggcggcaacaaacagtattcctccgttgattacccacaccttccacttgtgattctcgttgaggacgcagggacgcacaattaccaccagcatgctgatcgcctgcagaacgacacgatagttggtggtcattaggatctgcattcccttctgggaccaaaggaatccgcccagtagaaggacgagagccaaccaggccaggaactttggcgaaggatgcaaccagccacgtcgattgtagaagccaacacagaggatataggccaagctcaaaggacagttgcagtaaatcgacgcaatcattaccgcagctggtcctacaatccatcttaggtgtttcaatggctcgaagatccagccaccattctggggtaatgcggccaaggtcatacaccagacgccaaagggtaccaccaaacagatgaccgtcatgaacggagcccattgcaaaaagaccatttcgccgagcaaaagtcccagcgaagccaggaagatcgtgcaccaagtgaggtagcccctgcgcatataatggggggccattacattttgagataacttcaccagttggtagaattgccagcccagtagagccagcacagtggtcaccacgagtggaatgtgatagtagttatggtagaacttcagggactttagtgccactttgattgccagcgtactcgtctccagcgccttacttcgccagcccatatcaaggaggtgatccatctggttttgatagtaggcaatctgctgcagatccagatccttatcctttggcagccacttgtggaaaactccccgttcgtgaagtcttataatggccttggcttgggtcagaagttgcagagcattcaggtgtacggactttctcgcatattcccgggacaccttcatgtagccctggggcagaatggccagattgttgacaggtggcggtaggccaatgagggctgacataagaggagccaactggatctggtccagcttgtggagctgcatgcctacgccattgttgagcacaaagtcagaggttatattttcggtcacgtgtttcactccggcaccccagagaaggaagggcgcctcccgttcttcatccgaaccgccaccatgggagcctgaaatcccagaattgtcccattccttggagtcaacaaaatgtgagcgaaaggacacttaccgaaataagtaagaccgtgtgctgatgtataaaggtatgccgttttcgagtcattaaaggtggcctcaatcaattcatatgcatctcgaatgttccgctgggtattgtgcagcttcatttgaaaaccaatatccaagggactggcaccaccgacttcggccaggttaacgagcatcaccaatttatttgcgtaccataacttttccaaacaagctcgtttcgtcagacgtcgtcgaagatccgatagatgggagaaacggagaaacgcacccttgtcgaaagccaaagtgcgattgaaaatcgtatcgaaattagaggtaggcaatatggatggcatcggattgaatccagcgaatagggctacttcagcagatcgggtcagagttggaacactagttttagatatgccgacgagtccctggcgcaggattatatcccgtatgtagacagccccactgcagttgtccgaaaataacgtgtccgcgcggagtccttcgagaaggaaaaccaccagacgatcggcagctggtggtacacccatatccagtaatgtcttctgcggttccagctgcgacagtggtccggactgataaaagatgcgcattatgcaaatcagcagcaggaggtgcaccagcaccaccttagatttccacagctccatcaggacttgtactttacccactagtcgatatgtgaggcgacgatacaatacgaacgacacattgacgacaactgaaaagaagcaccacagaaacgtttggagaagggccaacttcatttctgaactattcagaactggaatgatcgattcatcatcgatgagctgccttaaaaatataaactccatagcaacccttgcattcgttgaacataaatttcgaacctgaaaggaaattctatatattgcataatgttggattcaactagaagttttgtgctgttccagctactgttgctcttcgcggttgtattgatctatcttagatccacatacccgggcagcttggagccgcaggaagtggaacacctgaaagagcctccgccggcagatcgtttagttgtactcgtaagggacggattatctgctcagtcttttctggccaatcgttgcaccaacgtgccactgttgcgggaactctttctgcaccagggactggtggggattagtcgtccggagacaattacctaccactcgatatcgccatatatttccttgttttccggattcaatgaggatgcagccagcgtggcacgaggctggctaggaaccccagcatccattgactctatattcgatcggtgtaaacgcagttttgcgtggacaacgacagagctaatctcacgctttcccaaaatcgaaagacccagggaattgtcttttgagacatatggagaaggagttacgaagtcgtgctccgaaatggaagatttcgtatgtcggtctgttcaaagatttctgggcggtggatcccgcctcttgctaaataccacaggagtcatatttttcattcacatgaccggtgtggagccatcctgtgaaagcctgcaacggattcaagaaaacgtgtggaacgtctacaaaagttttgagaaaacttttcccgatcaaagaacagcttacctattcacttctaatcttggcgatccccaaacgaaaagtaagattaaaccattctatttaagtactaactaagtgtcctgttctcaggcgagtacagtctggcagttgaatccccgttttttctttggggatctggagt

SEQ ID NO: 14870 - DNA, 2676 bp, DROSOPHILA
caaacgtttctgtggtgcttcttttcagttgtcgtcaatgtgtcgttcgtattgtatcgtcgcctcacatatcgactagtgggtaaagtacaagtcctgatggagctgtggaaatctaaggtggtgctggtgcacctcctgctgctgatttgcataatgcgcatcttttatcagtccggaccactgtcgcagctggaaccgcagaagacattactggatatgggtgtaccaccagctgccgatcgtctggtggttttccttctcgaaggactccgcgcggacacgttattttcggacaactgcagtggggctgtctacatacgggatataatcctgcgccagggactcgtcggcatatctaaaactagtgttccaactctgacccgatctgctgaagtagccctattcgctggattcaatccgatgccatccatattgcctacctctaatttcgatacgattttcaatcgcactttggctttcgacaagggtgcgtttctccgtttctcccatctatcggatcttcgacgacgtctgacgaaacgagcttgtttggaaaagttatggtacgcaaataaattggtgatgctcgttaacctggccgaagtcggtggtgccagtcccttggatattggttttcaaatgaagctgcacaatacccagcggaacattcgagatgcatatgaattgattgaggccacctttaatgactcgaaaacggcatacctttatacatcagcacacggtcttacttatttcggctcccatggtggcggttcggatgaagaacgggaggcgcccttccttctctggggtgccggagtgaaacacgtgaccgaaaatataacctctgactttgtgctcaacaatggcgtaggcatgcagctccacaagctggaccagatccagttggctcctcttatgtcagccctcattggcctaccgccacctgtcaacaatctggccattctgccccagggctacatgaaggtgtcccgggaatatgcgagaaagtccgtacacctgaatgctctgcaacttctgacccaagccaaggccattataagacttcacgaacggggagttttccacaagtggctgccaaaggataaggatctggatctgcagcagattgcctactatcaaaaccagatggatcacctccttgatatgggctggcgaagtaaggcgctggagacgagtacgctggcaatcaaagtggcactaaagtccctgaagttctaccataactactatcacattccactcgtggtgaccactgtgctggctctactgggctggcaattctaccaactggtgaagttatctcaaaatgtaatggccccccattatatgcgcaggggctacctcacttggtgcacgatcttcctggcttcgctgggacttttgctcggcgaaatggtctttttgcaatgggctccgttcatgacggtcatctgtttggtggtaccctttggcgtctggtgtatgaccttggccgcattaccccagaatggtggctggatcttcgagccattgaaacacctaagatggattgtaggaccagctgcggtaatgattgcgtcgatttactgcaactgtcctttgagcttggcctatatcctctgtgttggcttctacaatcgacgtggctggttgcatccttcgccaaagttcctggcctggttggctctcgtccttctactgggcggattcctttggtcccagaagggaatgcagatcctaatgaccaccaactatcgtgtcgttctgcaggcgatcagcatgctggtggtaattgtgcgtccctgcgtcctcaacgagaatcacaagtggaaggtgtgggtaatcaacggaggaatactgtttgttgccgccatcggaatcttcctcaaggagatgggcaagccggttcccttatacctatttgctgccaactgggcgtatcttatctatgcgttcgcatcggtgccctgcagttcgaggaccactccccaatctcgcctagagttgattcgcttcaacttgcttacgcttcatgtactattgagtgattcatatgtatccctcttcgcccagggcttgattatcgagtatcaaatgggactcgaagtgcacgagaagttcaaggaagcagatgaagatgttaagatactaacttcctcaaagcatctacagatgtgctatcgcttcgctgtatccatcctactttacttctatgcatccctatttggaactggccactgggtaggtggcttcacctacttagccaactctgcccgattattccttccggattccagcagcggactagtgccgctgctagtgctcatccatttgctaattccctcaatagtgattatggccagcgtggtggcactgagcagctttggacgtcagcagatccgcacgatattctccagtttgatgctcatttgcaacgccgtcgttttgttcttcgttgtgtttgttccgcataacgcctattggccaatggcacatccatccgtagttcatgcacttctggcccaattgactgtcatcctgatcttggcttgcgaatccatagtgaccatcttctttcgtagacttaacatgaacagatgttcagactggagacaagaagcggatgaatttgaatccagctaccccccgattaccacaactgctgtctaa

SEQ ID NO: 14871 - protein, 858 aa, DROSOPHILA
MELWKSKVVLVHLLLLICIMRIFYQSGPLSQLEPQKTLLDMGVPPAADRLVVFLLEGLRADTLFSDNCSGAVYIRDIILRQGLVGISKTSVPTLTRSAEVALFAGFNPMPSILPTSNFDTIFNRTLAFDKGAFLRFSHLSDLRRRLTKRACLEKLWYANKLVMLVNLAEVGGASPLDIGFQMKLHNTQRNIRDAYELIEATFNDSKTAYLYTSAHGLTYFGSHGGGSDEEREAPFLLWGAGVKHVTENITSDFVLNNGVGMQLHKLDQIQLAPLMSALIGLPPPVNNLAILPQGYMKVSREYARKSVHLNALQLLTQAKAIIRLHERGVFHKWLPKDKDLDLQQIAYYQNQMDHLLDMGWRSKALETSTLAIKVALKSLKFYHNYYHIPLVVTTVLALLGWQFYQLVKLSQNVMAPHYMRRGYLTWCTIFLASLGLLLGEMVFLQWAPFMTVICLVVPFGVWCMTLAALPQNGGWIFEPLKHLRWIVGPAAVMIASIYCNCPLSLAYILCVGFYNRRGWLHPSPKFLAWLALVLLLGGFLWSQKGMQILMTTNYRVVLQAISMLVVIVRPCVLNENHKWKVWVINGGILFVAAIGIFLKEMGKPVPLYLFAANWAYLIYAFASVPCSSRTTPQSRLELIRFNLLTLHVLLSDSYVSLFAQGLIIEYQMGLEVHEKFKEADEDVKILTSSKHLQMCYRFAVSILLYFYASLFGTGHWVGGFTYLANSARLFLPDSSSGLVPLLVLIHLLIPSIVIMASVVALSSFGRQQIRTIFSSLMLICNAVVLFFVVFVPHNAYWPMAHPSVVHALLAQLTVILILACESIVTIFFRRLNMNRCSDWRQEADEFESSYPPITTTAV

SEQ ID NO: 14872 - DNA, 7889 bp, DROSOPHILA
agtgcacagatgacaggggtataccacctcgcgaatggcctcgatctgggtgattctcttgtgcagctgcaccacttcgttgtttgactcactcagggactttcgcagcgtagctatctcctcctgggccgtcgtatgcgcttcctttagatctgtgacacattcgtccaggtaagtgcgacagcacatcaaatactgtatggcatactgagacatcacaaagtacttggcaatgccactgtccagaatgtgagtttccagcactgtgcccagtggagcctcagaaaggtgggtcaacgccttgtccaccagctcgaagttttgctccctgagaatccgctctgtttcataggatcctgccggaaataccgctatgaactaagtgttaactacttttaacataattttccatacccataagtctccaatccagtggaccatcgcgatactgtctcagtttaaagcccgtttcacggaccatctgcggatatttgcccttgaatcccatttctctgaatctgaatcacccaggactgcaaaaaaaatcgaaagtttgtttacttcttcctcgccttctttgttttgcttccgttctttgccaaactttatctgccacttttcttaccacccttgtgtgtttcttagtttttggttacacgttgccaaagcaactacaactaggttgtcaggacgacaggttgaaagtagggttgttgagcctctgaaaatgcatattacaagcatgatatcgtaaaaaatgctcattcctattattaggttttaaaactaactgccattaagagattacagtttttaatattgttagtattgattagaattacttttgttattgttcattctgttatgttattttattatcttttaacacaaataattcaaaagaaccgcgaaagacacgataaatggcaggatccttttagataaaacatttaggagctatcgagcatctccgttgaagcatctgtcaaaaggctcaactcagttgcgattggactctccaaccgtgaggttgtattaaacggaaactcctagcaaaatgtgttaagtttagttaaaaaccttcaattataagcaataagtagcacaaaaagctagagaaaacagcaacaaaatgtggcattggagtttgttgtgtgttttcctacttgttccgttggcgaattccacgggtaagctgcgaaaacttgtgcgtcagtccgagaaaaatcctgtgaaaattccgataccctgatgctgtatcccaagtatttgacagatgtcaggaagctgcgcccacaagagagcaagagagcggcgtctgcgcagcaatttgttttgggaaattttccatttgtttgggaatttaatttggcatttttctctgtttttcccctgaattaccaccactttcctagctccaataagttttgaggcaaatccggacaccaaacgtctctatgatgatttgttgagcaactacaatcgattgattaggcccgttgtgaacaacacggagaccctgacggtttggttaggtctgaaattgtctcagctgattgaggtcaatctgaagaatcaggtgatgaccaccaatctgtgggtgaagcaggtagttatcactgccatatactgttattatctattattaatggattttattaaagcgctggttcgactacaagttgcgatgggatccagaggaatacggcggagttgaacagctgtatgtgccatctgagcacatttgggtaccggacattgtgttgtacaacaactgggatggcaactatgaagttagcttcgatgttctcaataatgtgttcatagttaactgaaatatatattattaggtaactctgatgacgaaagccactctgaagtatacgggagaagtcttttgggagccacctgctatatacaagtcatcctgtgagatgaatgtcgaatactttccgtacgacgaacaaatttgcttcatgaaattcggttcatggacctacaatggtgcccaagtggatctgaagcatttggatcaggttaggtatctaaataatttaacttctacaataaataacccaatcttttttcagattcctggcagtaacctagtgcaagttggcatcgatctcacggaattttatttgtctgtggaatgggacatacttgaagtgccggctaccaaaaatgaggagtattaccccgatacactggaacccttttcaggtacgatgttatttgttttgcatcattgcatttcagttgagtatcttctctttttagatatcacatttaagttgaccatgcggcgtaagaccttgttctataccgttaatttgattgtgccatgtgtggctttaacattcctcacggtgttggtcttttatttgcccagcgattcgggcgaaaaggtaacaaagatggatcctccaaattcaatgatcaaaaatctgagagtgataccttcttttttgtggcacgtagcatgtttttgttaattttaacacgtagaattagatttcctatagcttagaaaactgaaaaatagcttttgtacatatgctttctttatttttattaaatttatatttttaaaataattttgtgaagtaatttcaaatgcaaattcacttaagtgtactccctataacttaaaacactcaaaaacattgactctacaatgaacctataccttagatgagctatctttttcatatgcacaaatcgaactcctttcaattactttaactatcactccccaatctttcaagtcttgctaagtcagctatcctaaagctgagctcttgcattccctagccagatactacaaattctaaattggcttttaaaaacaaatattttaaacgaacactatccaaattctttccgagaagagctcaacttgaacttcctgctctttccaatcttaaactctctctattttacgctccaattttgtaactaatgtgtatatcataatgatatttagctttttctatctatccatcaaataatcagctccgcattcgcagcagcaactatcagaatttttgaaagcagcacacagatatttacgtctcagaaaatatatatgaatatatcatacatatgtatatcgtgtacaccacattttttgctgaatatcatgtgtgctgtcctgagttgagaaatctcataacgtaaattttcatcgaatgcatacaaatgcgcaatcgatatcgacattgaacccaatccgaatcgagtcgtattcaaaatgtcaaaaagccactcgcaaaattttccatatcgcgtatcttgtaattaagcagcgcactcacacacccgctcactgaaacacacacacacacacacacctaggacacctgcattcagcacaggcacacctacacctacatacacattcactttataaacacacactaacaaacacgtactggactcgtgcagtttgttgttgaattcattttatcgttgccctagagtttgttcgttcagtcgtattgctcaagtaaagatacaatacatacatgcttcccatcgagattgatataatatataaacccgatatgaatcaaaaagaagattattcagttttttaaatagcatgtaatacacctgaaatttttaaggtttttaagcaaagtaagattgccgtggaataatatatttcgtagtagatacttactgctttctgggttccatatagatattcatttcgtactgttaaatttaatagaaaagattttaaagcaatgtaactttaaaaatttaaaattccaaaatttgaacaacacaggaatttaatacaaagtgattcaatataacattttttgtatcaaaaacttaaccacttaaaaacttcgaagaaaaagatacacagtgaatcttttgattgacacagatacactcgtactcagaaagttcacatgtaaacgtagtaaaatgcgctttgttcctttgatttgttggtgttgattgttttcgtgtaaacttcgaatgattgattgatgtgggtaggtgcaggatgtcccatccccatagattgtgcgttcgcgagtgtgttagttgtgggtctttagcttagtcacaggatacgcgatgcagtcctgaagtacgtagccatttcgttgtttaagaccaattgtttgttaaagtattcgtatgtttattttaaggccttggagtgttaatattacaatatatattatctccctggccaatcatatttttcgtaccagtaattggctttattaattaaacaaattattatgattgtgttttcatttggttgttgttatgtgttcaatgtcgttgttggttgattgttggtttgattgtttgactgtttgaccgtttgatggctcgtgtatctgtcggatcgagtgggtagcgatagccgagagatatcgacaggtggaaattgtgtaaacatttcgttgacaggttacgttatgtatttcgatactcgtgtcgttgaccgtgtttttcctgctcttggccgaaattatccccccaacctcgttggccgtgcccctgctgggcaagtaccttctctttaccatgatactcgtctcgctatccgtttggacgacggtctgcgtgctgaacatccatttcaggtgagttccgatgcgggcgaataatgcatgggaaaagttacaaatccatgatcataccccgttaatcgtacctcatagttcatacatcataccttcgtacttcgtacattgtaccttgtattttacacctcatattgcaaacctcgtacttcctactttgtaccatgtacctaatttttgtaagattcacattattgtggcgaccttttattttgctttcactggtatatttgcaatgtgtacatatctgcggtacagatctccatctacgcacaatatgtcgccgctggtgcggaaactcttcctgcacttcatgcccaagctgatgatgatgcggcggacgcagtacactctgcccgactacgatgactccactccgagcaatgggtacaccaacgagatcgatgtgcggtaagtggcaaccaactcgcgaaattgaaagtaaacacttgactttggcctgcctgtttgtgttgtggcatgggctggttttcccctgcagtgacagcatcagcgattttcccagcgagtttaaggacagccaggatggcgcttacgataatggcatgcagaactctgtgggtgagtgcgtgaaatctaaccataaaacacacaaatattttgcatgtctgccggcatcaaattgaaatcaaatatatcacacaagcacagaaatctgaaaaatatctggccaaataatgcaataaaatggggtggcaaaaaccgcttattccgtcgaaattttagcatggtcgtggtcaatggaattccaaagggggtttgaaacacagtggtgaaacgcattttttcaatttatgtgatgacgaaattttatttttcacagtaaataaaattctatacatacatatattaaactttaacatattctaaaggcctttaaaatatatgttactataatgattcatttatgtcaaggcaacctttttatgggtttttatacgtcccctgtaaatattttacttcacatttaggatgagcataatttagttgcttcgttaagccagagtccttttgcctttcggcgttaatttgcgtcctgacagcgaccaaaatatttgtccactcatgcgaacccataaatgcctacacacatagatatttgcagatgcacacacacacatagccgggggttgcgattttcttgctactcacatttatttattattccaatattttatttcaattttttgccatttcatggcggaaacttgacagattccgacaatgtgataccgcgcaacttaacacccgaagtgctgcaggcgttgcgtgcggtcagatttattgcgcagcatatcaaggatgccgacaaggataacgaggtgggtacacagggtccacaacttggccgccatatccgcgacgtgcttatttttgttgcccatttttattgacgcgtgtcctccttaaagatactcgtactagatactgtttggtgtatggtggatgatggctggagtccttggcgtttgttattgtttacatggccatatttttggcgtctggagcgggggggtctttcgcctgccgcttttattattgtttattgcccttaagttcgaattgaatgcattgaacgttgggccaagtcccaaatgtgcagcaaacaattgtaaaatattaaatcataactttagatttttattgcgattcaagtttattggaaaccagccgcagggccatattttatttggccgctcccccctcccctctttcctttttttcagccgacgaaaatgtataaaaccaattttgttcagccgcaaaaacgatacgaaacgaatgatattaaaaatctactttttattgtttcatcgccgcagattgtggaggactggaagttcgtatcgatggtgctggaccgcttctttctctggctcttcacgctgtcctgtgtgttcgggaccttggccataatatgtcagtcgccatcgctatatgacacccggtcgcccattgaccgccagctgagcgagattcctttgcgcaaaaacaatttcatgctgccgccggacattgtccgtcaggtcctaacctaattggggtcccgaggtcttcccgtctgagttaacaatgcttccgaggctcggaactgtgttttttatgatgcgcaatcaaatcagttgtttgctgggaatgcggcaacgatttatgtctaagtgtttatcatcctgcaatgctgtaaaaccgaattagctataaaacatggaaactaaataaaaaaaattctgttttaactcataacttcattcttaagccgtaccccagtgtttttgaattaatataatgtgtaatatatataccaattggcagacgctatcagaccaaaaccacaatgacatctgttctgtgcctgttaattttcaattaagagatgacttttcacgaaagtttttgtgtggaaataaaacgttttgttggcgagccaagaagccaaaacaatatggcaaaaacttcgtttatgctgtgtcaaacagacattgcgcatacgccgcgttggctgcctaaataatttgcagtatcatttatttgtctccgcactctgcgttgtcttttgtcgttgtcttcttcatgttcgctttacttgtctggttgtcgcattaaattagaaagttgaaatctcttggcctcgcattcatcagcatgtgcaggtcctgctggcaaaggcaaaggactttcactttcggcactgtcaacagacataatttgctgagcactttgactggcaggaggtgggttaaaattctataaggtggcgggttgatgatgaaaagagtcagtagagaatataaagaaatttcggcgattgcagtgtagaatcaaaatcaccctgtgttaaatattatttggctttttaatttaagattctgcgtataagtaagttttcctgtaaaaaatatgacaagaaaatatttttttttacatgtaattatatatttccattacgttgaaccctttttcaacatagctgtgatccagatattattaagatttgcttaaggactgcctggctccgcccaacccccttacttaatggcgtttttctgagtttctttgctgtactttattttatttttggcattcgcttttttttttgtgtgttggcagttttaaattagaaaagtttctgccagatttttgttttacatttttcatattttctacgggccgtgccccgctgtgcatgtttgtcgctgtccttattgttgttgctgcgtcacatgcgtagctccacagctccgcctccat

SEQ ID NO: 14873 - DNA, 1902 bp, DROSOPHILA
cagttgcgattggactctccaaccgtgaggttgtattaaacggaaactcctagcaaaatgtgttaagtttagttaaaaaccttcaattataagcaataagtagcacaaaaagctagagaaaacagcaacaaaatgtggcattggagtttgttgtgtgttttcctacttgttccgttggcgaattccacggctccaataagttttgaggcaaatccggacaccaaacgtctctatgatgatttgttgagcaactacaatcgattgattaggcccgttgtgaacaacacggagaccctgacggtttggttaggtctgaaattgtctcagctgattgaggtcaatctgaagaatcaggtgatgaccaccaatctgtgggtgaagcagcgctggttcgactacaagttgcgatgggatccagaggaatacggcggagttgaacagctgtatgtgccatctgagcacatttgggtaccggacattgtgttgtacaacaactgggatggcaactatgaagtaactctgatgacgaaagccactctgaagtatacgggagaagtcttttgggagccacctgctatatacaagtcatcctgtgagatgaatgtcgaatactttccgtacgacgaacaaatttgcttcatgaaattcggttcatggacctacaatggtgcccaagtggatctgaagcatttggatcagattcctggcagtaacctagtgcaagttggcatcgatctcacggaattttatttgtctgtggaatgggacatacttgaagtgccggctaccaaaaatgaggagtattaccccgatacactggaacccttttcagatatcacatttaagttgaccatgcggcgtaagaccttgttctataccgttaatttgattgtgccatgtgtggctttaacattcctcacggtgttggtcttttatttgcccagcgattcgggcgaaaaggttacgttatgtatttcgatactcgtgtcgttgaccgtgtttttcctgctcttggccgaaattatccccccaacctcgttggccgtgcccctgctgggcaagtaccttctctttaccatgatactcgtctcgctatccgtttggacgacggtctgcgtgctgaacatccatttcagatctccatctacgcacaatatgtcgccgctggtgcggaaactcttcctgcacttcatgcccaagctgatgatgatgcggcggacgcagtacactctgcccgactacgatgactccactccgagcaatgggtacaccaacgagatcgatgtgcgtgacagcatcagcgattttcccagcgagtttaaggacagccaggatggcgcttacgataatggcatgcagaactctgtggattccgacaatgtgataccgcgcaacttaacacccgaagtgctgcaggcgttgcgtgcggtcagatttattgcgcagcatatcaaggatgccgacaaggataacgagattgtggaggactggaagttcgtatcgatggtgctggaccgcttctttctctggctcttcacgctgtcctgtgtgttcgggaccttggccataatatgtcagtcgccatcgctatatgacacccggtcgcccattgaccgccagctgagcgagattcctttgcgcaaaaacaatttcatgctgccgccggacattgtccgtcaggtcctaacctaattggggtcccgaggtcttcccgtctgagttaacaatgcttccgaggctcggaactgtgttttttatgatgcgcaatcaaatcagttgtttgctgggaatgcggcaacgatttatgtctaagtgtttatcatcctgcaatgctgtaaaaccgaattagctataaaacatggaaactaaataaaaaaaattctgttttaactcataacttca

SEQ ID NO: 14874 - protein, 519 aa, DROSOPHILA
MWHWSLLCVFLLVPLANSTAPISFEANPDTKRLYDDLLSNYNRLIRPVVNNTETLTVWLGLKLSQLIEVNLKNQVMTTNLWVKQRWFDYKLRWDPEEYGGVEQLYVPSEHIWVPDIVLYNNWDGNYEVTLMTKATLKYTGEVFWEPPAIYKSSCEMNVEYFPYDEQICFMKFGSWTYNGAQVDLKHLDQIPGSNLVQVGIDLTEFYLSVEWDILEVPATKNEEYYPDTLEPFSDITFKLTMRRKTLFYTVNLIVPCVALTFLTVLVFYLPSDSGEKVTLCISILVSLTVFFLLLAEIIPPTSLAVPLLGKYLLFTMILVSLSVWTTVCVLNIHFRSPSTHNMSPLVRKLFLHFMPKLMMMRRTQYTLPDYDDSTPSNGYTNEIDVRDSISDFPSEFKDSQDGAYDNGMQNSVDSDNVIPRNLTPEVLQALRAVRFIAQHIKDADKDNEIVEDWKFVSMVLDRFFLWLFTLSCVFGTLAIICQSPSLYDTRSPIDRQLSEIPLRKNNFMLPPDIVRQVLT

SEQ ID NO: 14875 - DNA, 6783 bp, DROSOPHILA
tgatcttcaaggtggctctggtcattattggggcttcactaagccgacacaaggtgcgaaagacgtgtactggtctctgcgagacgttggcagtgctgcgttcacccgaggagcatatcgtggaggaggagttcatcatcaacaatatgatgcgactgaatctgcgcgtagaggacttccagatcgagcacacacgccaaaaggctcgccgtgccaaacagaaggcacagcaggaggcggagtccagcggttccggcaacggacatcggcgcaacatgccaacgctgtgaggaaccgcaactactactactacttcaacaaattgttactaaacacacaaacaacacacaccatgcatagttgcataagatttgtacgtttaaagtcgcataggaggcaggtcgtgcacaaagtggaagcgagttgatgcgagtgaccccaaaactggttcagtcagttggtcagtcaattacggagacatcattccatgcaatcagtttgctaattttaagaccattcttttgttgagcccattccgggctggacttgtatcggtatttgttttcgtattattcatttagtggcaattattacgagtgtgcaatttgtttatgcttttcaaaagtatttattacatatttattattatcgcgtaacatttaaaaccgtagcgttagctttgagttgaggaccccgaacatatcgtatgattatcatgatgattaccaccctgaggcagctgacacaaggactggaggattatatagtttgaaactttgactactttatccgtattaactctgagacgagaatgttgatatttacctacgataatgcgttacgaacgacttctgttgtgcccccgagcctgaaaagtttggagatcagttttgtgactggtctaaggcaaaaataatataaaacttgaatactaataaaacaaaatataccgaaacatttgttttttgttgttgtataagtaaaagcattccagagagttaatttagaattttaaatgttttatttattaacattaatcaaacagcgcataaacgctcacgtgcatagaccaactttttcgagaccaatttcttattagtcgaagcagtggtgctgaaaatataattataattttgataatatcagttaccgttcattgagattatatcgaaaataaatagcttggattcttaatactagcaattaaagagtagcctacagctaaaagtccgtaatcagaattaggcggtgtctatgggtaaactatacgaatactctaattaatctcttgaatatctgaatccgtctgccactggaagtacacaggtgttgtggaagtggattaggttatttcgacttgggtcataaaaacgggctagcttagtggcaaaacgtaatctatgttcgattcgcagaactattaaaataaaaaacgaacacggaatttaaaagtgaaatatactttcatggtttcagtaaaagacactgcataatacaatatgcaaatcgaatacactcgcattttaaaataaaataaaaaaaaaacggacgtgcatgatggaaagattacattttgccactaggatcctaatttaaataaatcgaaaattaatactagccgagcagatactgatcttcgaattccacgtcgccatcatcgtccaaaagatgtggcggcagcggcatatacggtcctgagtcctgaccagtagggttttcaccatcattggtctgctccgtgccctcctcctgctccttctcgtcctggattatctgctcgattagtgatatcatctcggcatcccccaggcctggatggtgtttacgaatgtgctgttgcagctcgcggaggctgtgcaactcacccaccgcatcagcaccgtccgcactgctctgcttgcatagtttgcaacggatgtaggccgcgtggggcaggtgctggaatcgatggaactgtagcacccactgtcgattcgtctccagttcctcatcacagtcctggcagcggtagacgtcttcacccacctttgtcatgtgcaaaagttccaacttggtcaagccatggtggtcgttgatgtgctcccgccattcctttttattgtgagttttgaaattgtcaccgcattgcggacacgttagatggtaaatggtgctcaatagcgtatcctggtcgggttcatcgtcatcgaattcccggtgcggacgattgtcacaccggttagtgtcgcggttcaaatgcttgaagaacatttgttttcgcacaaactcaccgccgcaagtcaagcacttgaaggatctatggggcaggtggcggaacttatgcgactgtagctgcccgatggcgcccttggtgtgcgtcacggtcacccgtttgtagcactccaggcacaggtagtgatggttgtcgatctgccgaaagttgaggccctcacggctgttaaagttgtgctgctccacaatatgtttgcgccagaaagcatgagagtcaaagttttgattgcacttgggacaaaaatacgtgatgaagtccaggtccacggcattgtggtacgagatactgtcctccagcgtgttgagaccagcgggtcgggctggcaatccaccaggctgtggttttaaggaacgactacttgcactggctgcagcagaagaggaacatgcaggtggtgagggcggtgctggtgccagtgctggagccggtggaggagagggcaatttggggttctccctactgttatccttataacggccgaggacttgtttcggttttgtaatcatcgtcggtgtctccctatcaaaaatgctatgacgggctctcaaatgcgcagctatattcggcttatgattgtagcaggtgccgcagatcaggcacttgaggtacagtctgtagggcagatgtcggaagtgatgatcctgcaagcccttcagcttcgaattgcatacaatgtccttgcactgggtgcattggtagcgatacttatccaactgacgcatgtttagatattggcgcttgtcaaaattgtgcacctcattgatgtgacggcgccactcgaactgagtcttgtactcaaatccgcaggatgggcacaagaagatgtaattttgttctacggtgggcacggatggatctgcagagctcatcactggctgtcgacgccttctcaccactgtcttcctgcaccgcttttcgctaatatgaacacggacggccgcctgggtggcgaagagtgtgccacagtggacgcacttgtagcgttgatgatttccttgagttgttggctgtggcggcggtggtggtgatggtggtggcggtgcaattggatattcatcctcttctgcctgcatctgttcaccaaagtcgttatcctcctccatgccgccttgatccacgtcgtccagatagattatctcgtacgtttcattggctaccgtcactatctgtttgcgtggctgcttggcgggtgtgagaattggagctgggcatcctcccgaaagctttcgtggccaaccaacccgatgatgggtggccagatgctttacgagacccttcctgtccgtgtaggacttgtggcacttgcggcacctggcgtaggccttgaatggaagatgcgtgatcctgtgttgctgggcattctggattccatacgcattggttatgatcttgtcacactcagtgcacttaagctgccgttcgtttatcatctcaaaattaagcttgctcagatcgttcatgctgtgcgccatgaccacgtgggtgcgccagtgcttcttctcgatgaattctttgccgcactgcggacagaggtagtcgatgtgaggctcgaaaatgtcgtcgctgctgatgcgaccgccgcgtctgggtgcgtcttcaaagtagggcgagtcctcgtccaaaggggcgccatttccctcgccgtttccattgtccccgtcgcattcatcctctatggccgagggagcgtcaccatcctcctcctctgcgtcctccgacataagcgtatccatatgatgctgctgcagcagatgtctgattatttcctgatgatccgtgtaacccttgtagcagagtttacagcgcagccactcaggctgcgacaaatggctgaatttgtgggcgcgaagtgatttaatggtattgggagtcacaatctgagataataaaaaataattgattcagcaaagtttggtttataaatcgaaactcacctttttgcactcgaggcactgcatttgcatgtccacgcttcggaaattaagtccccttcggctgacgtagtcgtggacgaactcgatgtgctggctccattgggcgtgggtgtcgcagtcggtgccgcagtctggacacatgtagtgtatgtaatcctcgcacagttcggctgctcctcgagtaccagcctttttcttggaaacctcttcagacacggtctgctcctgggtgccagactcatcggcatccggttcgagcagctcattccgaacctctatgcgatcagattcctccccaaggtcatcattctctcggaagctcttctcccgcagcagctgctcggtgcgagactctcgaacccgtgtcttccgccccgccgcattgtaaccctcccgcatcatggccacgacttcatcgcaatggaccatgcgaagatgaaccataagatcttgcctttaaaagacattactattaaggaagggctgaataggatactcattaccgtacctgtatttgtactcccgtttgcagatgtagcacttggtgcacctgaagggcaggtgcgtgaacttatgcttaagcaggttttcccggctgtgcatggcaatccgcttgttgcactccctgcaccgctgatagagcttgtccagcggcgtaaagttcaagccacgtagagtgttgtatttgtgaatgtggttcatgtgccgcttccagtggtcctgttgccggaattcaccaccgcaggcggggcagatgtagactacgcccaactcatagttaattggcactccgttctcgtccgttgcattgatctgcgaggtggtgggtcgtacagacagtccggaacccaatctgggtcgacccccagctcccgggaatgagtgtcgctgcattggcggacgcacttgttggctcatgggtccagcaggagccaacgatggacgctgtggctccgctatatctacaataggttccatattaaaatcaaagagcgcatcatcgtcgggatctggttgctttggctccttggagttcttttcgtaatcatcctcctcctccctctcatcctcttcggcatccagcaggtcatcgatggcatcgcctgaatcaaggatcgccgtatcgcctaggaagtcatcattgccattcccgtactgctcgctgtcctccagttccgccaccccgctctccgcctcaccctcctcgaagtcggacgagaacatcgacgtccacagatccatgccctccatcttttggctgggaagaggcttttctgcgacagctcgcgtcgtcagtggctcttcaatgtgtgagtgcgtatgcgtgagaactagttttcgtatcctatatgccacaattggcaataacgacgacggctgtctggtttttcacttggtagagctcttctgaggtgttgcgcacaccaggttccatcttcacagtcggtgcagcagcacacacctcactgggtccttttgcatctgcgtttagcccactggggcagcggaaaaatggccaaaactaaaacttattgtagtctgcaaaaatcagagccattttgtttgcggcgtcgcagagctacgggccgcaaataaactggaacggcgttgcacggtgttgccagaccaagaaagtgaacatcgataacccacagcatgtcaatcgatagcttatcgacgatttaagcttatgggcgcgaaaaattaaatgtttcttgaaaactagtttttaacttcagcttaggacctcggtcaaaaggttattaactccaaacaatttccgtccagcccgaccacttttctaaataaggacaaaaaggcatgttatgtacgaaaggtttttattgaacaaatattcgcgcttgaattttgtatttttacacttaattagcacgtgcacattagaaagtgctgtcgtaccgtttaaattacatatttaatgtaatgtaatacaatgtttataatgtatgtatgtatgtgttttcgtgagtgttcgtgtgaatgcagttggtataaatataaatatatgtggcgtgtagtagcaactaaaataaaatccatgtgtgatcaaaggactccaacaggccgccaccgctcgcatccttgcttctcgcttgcttcacacgtaagcacacaccgggttgatgaatatcatatatataatatatctgcagttgcagagggcaggcgatcgggcgtcgttttgtggggctacacgcgttacatggatttacaccaactaaggaatttaaattacagatttgcaatggggtggtggtggtgttggtagtgataggtttgggtgcaacgccgccttctaaaattggttgattaattctcatctgggaagcgtatcgtactattgcatctgcagatcgttgagcaattgctattctctcgcttaattattcgttggccatcatgtcctactttcgtgcctttcgattttctgacctggatacgggagtgtagggttttatgcgtatattagatgggtagtatgattttttttgcttgttttgttggttttttttttttcttatagtgtctcgtcccgccatcggctcctcaattgct

SEQ ID NO: 14876 - DNA, 3760 bp, DROSOPHILA
ctgcgacgccgcaaacaaaatggctctgatttttgcagactacaataagttttagttttggccatttttccgctgccccagtgggctaaacgcagatgcaaaaggacccagtgaggtgtgtgctgctgcaccgactgtgaagatggaacctggtgtgcgcaacacctcagaagagctctaccaagtgaaaaaccagacagccgtcgtcgttattgccaattgtggcatataggatacgaaaactagttctcacgcatacgcactcacacattgaagagccactgacgacgcgagctgtcgcagaaaagcctcttcccagccaaaagatggagggcatggatctgtggacgtcgatgttctcgtccgacttcgaggagggtgaggcggagagcggggtggcggaactggaggacagcgagcagtacgggaatggcaatgatgacttcctaggcgatacggcgatccttgattcaggcgatgccatcgatgacctgctggatgccgaagaggatgagagggaggaggaggatgattacgaaaagaactccaaggagccaaagcaaccagatcccgacgatgatgcgctctttgattttaatatggaacctattgtagatatagcggagccacagcgtccatcgttggctcctgctggacccatgagccaacaagtgcgtccgccaatgcagcgacactcattcccgggagctgggggtcgacccagattgggttccggactgtctgtacgacccaccacctcgcagatcaatgcaacggacgagaacggagtgccaattaactatgagttgggcgtagtctacatctgccccgcctgcggtggtgaattccggcaacaggaccactggaagcggcacatgaaccacattcacaaatacaacactctacgtggcttgaactttacgccgctggacaagctctatcagcggtgcagggagtgcaacaagcggattgccatgcacagccgggaaaacctgcttaagcataagttcacgcacctgcccttcaggtgcaccaagtgctacatctgcaaacgggagtacaaatacaggcaagatcttatggttcatcttcgcatggtccattgcgatgaagtcgtggccatgatgcgggagggttacaatgcggcggggcggaagacacgggttcgagagtctcgcaccgagcagctgctgcgggagaagagcttccgagagaatgatgaccttggggaggaatctgatcgcatagaggttcggaatgagctgctcgaaccggatgccgatgagtctggcacccaggagcagaccgtgtctgaagaggtttccaagaaaaaggctggtactcgaggagcagccgaactgtgcgaggattacatacactacatgtgtccagactgcggcaccgactgcgacacccacgcccaatggagccagcacatcgagttcgtccacgactacgtcagccgaaggggacttaatttccgaagcgtggacatgcaaatgcagtgcctcgagtgcaaaaagattgtgactcccaataccattaaatcacttcgcgcccacaaattcagccatttgtcgcagcctgagtggctgcgctgtaaactctgctacaagggttacacggatcatcaggaaataatcagacatctgctgcagcagcatcatatggatacgcttatgtcggaggacgcagaggaggaggatggtgacgctccctcggccatagaggatgaatgcgacggggacaatggaaacggcgagggaaatggcgcccctttggacgaggactcgccctactttgaagacgcacccagacgcggcggtcgcatcagcagcgacgacattttcgagcctcacatcgactacctctgtccgcagtgcggcaaagaattcatcgagaagaagcactggcgcacccacgtggtcatggcgcacagcatgaacgatctgagcaagcttaattttgagatgataaacgaacggcagcttaagtgcactgagtgtgacaagatcataaccaatgcgtatggaatccagaatgcccagcaacacaggatcacgcatcttccattcaaggcctacgccaggtgccgcaagtgccacaagtcctacacggacaggaagggtctcgtaaagcatctggccacccatcatcgggttggttggccacgaaagctttcgggaggatgcccagctccaattctcacacccgccaagcagccacgcaaacagatagtgacggtagccaatgaaacgtacgagataatctatctggacgacgtggatcaaggcggcatggaggaggataacgactttggtgaacagatgcaggcagaagaggatgaatatccaattgcaccgccaccaccatcaccaccaccgccgccacagccaacaactcaaggaaatcatcaacgctacaagtgcgtccactgtggcacactcttcgccacccaggcggccgtccgtgttcatattagcgaaaagcggtgcaggaagacagtggtgagaaggcgtcgacagccagtgatgagctctgcagatccatccgtgcccaccgtagaacaaaattacatcttcttgtgcccatcctgcggatttgagtacaagactcagttcgagtggcgccgtcacatcaatgaggtgcacaattttgacaagcgccaatatctaaacatgcgtcagttggataagtatcgctaccaatgcacccagtgcaaggacattgtatgcaattcgaagctgaagggcttgcaggatcatcacttccgacatctgccctacagactgtacctcaagtgcctgatctgcggcacctgctacaatcataagccgaatatagctgcgcatttgagagcccgtcatagcatttttgatagggagacaccgacgatgattacaaaaccgaaacaagtcctcggccgttataaggataacagtagggagaaccccaaattgccctctcctccaccggctccagcactggcaccagcaccgccctcaccacctgcatgttcctcttctgctgcagccagtgcaagtagtcgttccttaaaaccacagcctggtggattgccagcccgacccgctggtctcaacacgctggaggacagtatctcgtaccacaatgccgtggacctggacttcatcacgtatttttgtcccaagtgcaatcaaaactttgactctcatgctttctggcgcaaacatattgtggagcagcacaactttaacagccgtgagggcctcaactttcggcagatcgacaaccatcactacctgtgcctggagtgctacaaacgggtgaccgtgacgcacaccaagggcgccatcgggcagctacagtcgcataagttccgccacctgccccatagatccttcaagtgcttgacttgcggcggtgagtttgtgcgaaaacaaatgttcttcaagcatttgaaccgcgacactaaccggtgtgacaatcgtccgcaccgggaattcgatgacgatgaacccgaccaggatacgctattgagcaccatttaccatctaacgtgtccgcaatgcggtgacaatttcaaaactcacaataaaaaggaatggcgggagcacatcaacgaccaccatggcttgaccaagttggaacttttgcacatgacaaagcaccactgcttcgactaataagaaattggtctcgaaaaagttggtctatgcacgtgagcgtttatgcgctgtttgattaatgttaataaataaaacatttaaaattctaaatt

SEQ ID NO: 14877 - protein, 1112 aa, DROSOPHILA
MEGMDLWTSMFSSDFEEGEAESGVAELEDSEQYGNGNDDFLGDTAILDSGDAIDDLLDAEEDEREEEDDYEKNSKEPKQPDPDDDALFDFNMEPIVDIAEPQRPSLAPAGPMSQQVRPPMQRHSFPGAGGRPRLGSGLSVRPTTSQINATDENGVPINYELGVVYICPACGGEFRQQDHWKRHMNHIHKYNTLRGLNFTPLDKLYQRCRECNKRIAMHSRENLLKHKFTHLPFRCTKCYICKREYKYRQDLMVHLRMVHCDEVVAMMREGYNAAGRKTRVRESRTEQLLREKSFRENDDLGEESDRIEVRNELLEPDADESGTQEQTVSEEVSKKKAGTRGAAELCEDYIHYMCPDCGTDCDTHAQWSQHIEFVHDYVSRRGLNFRSVDMQMQCLECKKIVTPNTIKSLRAHKFSHLSQPEWLRCKLCYKGYTDHQEIIRHLLQQHHMDTLMSEDAEEEDGDAPSAIEDECDGDNGNGEGNGAPLDEDSPYFEDAPRRGGRISSDDIFEPHIDYLCPQCGKEFIEKKHWRTHVVMAHSMNDLSKLNFEMINERQLKCTECDKIITNAYGIQNAQQHRITHLPFKAYARCRKCHKSYTDRKGLVKHLATHHRVGWPRKLSGGCPAPILTPAKQPRKQIVTVANETYEIIYLDDVDQGGMEEDNDFGEQMQAEEDEYPIAPPPPSPPPPPQPTTQGNHQRYKCVHCGTLFATQAAVRVHISEKRCRKTVVRRRRQPVMSSADPSVPTVEQNYIFLCPSCGFEYKTQFEWRRHINEVHNFDKRQYLNMRQLDKYRYQCTQCKDIVCNSKLKGLQDHHFRHLPYRLYLKCLICGTCYNHKPNIAAHLRARHSIFDRETPTMITKPKQVLGRYKDNSRENPKLPSPPPAPALAPAPPSPPACSSSAAASASSRSLKPQPGGLPARPAGLNTLEDSISYHNAVDLDFITYFCPKCNQNFDSHAFWRKHIVEQHNFNSREGLNFRQIDNHHYLCLECYKRVTVTHTKGAIGQLQSHKFRHLPHRSFKCLTCGGEFVRKQMFFKHLNRDTNRCDNRPHREFDDDEPDQDTLLSTIYHLTCPQCGDNFKTHNKKEWREHINDHHGLTKLELLHMTKHHCFD

SEQ ID NO: 14878 - DNA, 3756 bp, DROSOPHILA
ctaagatcctcactttcagtaacctattcgttcacttcacttcattttgaaaaatatgttttcataggtatgttggcagcctcttcatagcaatcccctgcgggttagattctcgtaaatgtcactttcaagacttctgagttcattcttggttctggccagttgagttccgacgcgaaccagtctctcggccaacaattgatgccgcagggttagccttcttcttaggttatcaaggaaattgtagtccttttcgctaatttggtcctcattcatctcgtcgtccagttggatgagacggtgaagcgttttgttcagtttcaaatggatgcattcacgttcgactttcaactgatcctcgtcggttttcttttgctccaatacctcgatttgggcaggagaaactattttcctcagatcattgatgttcagtgtaagaacgctagatgccattacttttgcaatttagttttatttccttcagtggtatttttaaaaacttctgtctgttaagaaaagtttgtaattttgtatgtgtgggctttttttttgtggaattatctacagcgactagctactcttacgatttctagaaaactgaatgctgaaaatgttttctccaagcatactgcctatggaaatgggatcactttgattttcataccatcattatcatacaaaagtaagatttaaaaaactgaatttggccgcccggtgactaatggcactggaaatcgatcggcagtgaattaaatttcgcacctttaattgcaattcaatacttttgatgaaaagttgccagttgccattgtaatggatatcttacgaatactttgtcttcgagttacagcctacaaatttgaccacaattgatgtcaagttaggggtttttagtttcaacgatttcggtttaagtttgctgcagtttatgtttactcagggttaagtcaaaaactaaagttgtagtttttatttaaaagctcaagagactaatcctagctcatttcttttgatcatctttgtccttgccctcctgtaaaactaacgcctcgattttcttgagattctcatcgattttctgtctcaaaagtttctcctctttgctcaacttctcggaattgggttcctgtttgtccgatggtttttcctttccctccgcttggctatctccttgagttctcctgcccatgggcaatcgagtgatcatgtgacgaggaatccgtatctctgctcctatccgattatcgtttttgtactgacccacagcgcgaataaatggttttagcggacatcccttggcttgggcttcatccatcagctgacgggcgtaatcgaagaagaaggcatcctcgcggagttcctccaattgggcctccctgttgtagttggtacctggacgggtctcctcctcgatgcgtttcttaacctgttcgtcgagatcctggcggagtttccttatcctttgaatatgctcctcccgttgctgccgcttaaactgaacattagtttgatggttttgaagccgctgttcctctgccagcctgcgatcctcctctgctttttgtctgctctttttggccagcccctcctcctctctttgcacagctaaacgggcgttcttggcctgttccttcgactttctccatttggcctgctcggcactgtgaacttttcgcatctcttccagctggcgcttatggcgctcctcatcctcccgtgcactgtagtgcaggcgaggagccagttccttggccagtttttcgtttcgccggatacgttgatccactcgctccttggctctgtctcgtttcaactgctccaaatctcccttggccttgttgtggatatcacaccgcacctgctccatctcctccagcatctggagtcgcttctggcgctgatcggacatgaccaaggaggccaatgcctcatccttttttttgcgctgcttggccgcctgcagctccttctccttggcctgctgatccttcatcatgcgctcattgcgttcccgctccttaagcgcctcctccaattccttggctttggtggcctagtggattggtggtacagttatatatattaatttcaataaaaatatgtacaaaactcacctggcgttccctttccctctctgcaattaggtgcaataactcctttttatgctcacttagctgttgacattgctccttgtgacgctgttgtgcctcctcaaaaccccgaagcacttgctcctgaaagatcttcctgtccagctccttctgttgctggttgaccctggcgaactccgcctgcacttctctttggacattgacacttcgcataacttcgctctgaagacgcgcgcactgcaattcccggggaccaggacgcagttgctccaggagtttttgggcagcctcgatgcgtttcttcctgtttttctgatgctccaggcgagcagccttgctttcctcctccgccaggcgcttggcctccagttgctcggcctgcaattgcttcagttcccgggcgcactcctcctcccgcgtgatgcagagatttcgaccagcaaatttccggaggagttcctcgcctccgattcgaagtttctcatccgcctcttcgcgaagctgctgctgatgcagttgctcctgtttggcggcctgcgtggcatgggcacggatgcgctggaatcgcttatttgagataaccactggtggtttttcacgcaaaatgggttcacgtcgctcttgtggaagccagcaatactgcatggtttaagttttatccattgactgaattatttggttgggtattattctgtcgatgagttgttgggtttccatggatcttcgtattgtttggtagttaaaggaaaagccttgtggtagccatggatccccagcgatgacctgggtacaaaattataataagccacagcaactctctttatcagttttgaattgaatgttatggcatcaattcaaataagttacctatgaatgtcttaaaaactgtaaacaaattcataagaaagtaatcaaaaagtcttaccatgatcagataaaaattgtatttaaccgtaaaaccgccaaatgaatttggtaatgcttgattttatcgcttaattccgcctaaatcatccaaactcatcacaccacaagtgtcgtaaccaaaaatgccaaaaccaaaattgccgagtgttaccaacattttgagtagttcattttaattaattagttttgcgagccgtgttcgcagtgcgcactgttgtccaacacagcgacaagttactgtcaacgcaaatggcaaagattttggtttgatggcttaattatgtccaaaagttatgttgaggccatttggcagagtcggcggcgcaagtgacaggttttgtgataaaagttgttgatgtgcttttggcaattacatttggccaaaatttttgtgggcgctttggccatccaagccgaaccgatccaatccgttgtggttagttttctggttttggggctccctctcgaattgtcatactgaaagccaagccccaaaagggcaaatccatttgggcacgcttcatttggctcgtatcattgcattgaaatcgtagattttgttcaagagggtttaaataaatttgattaacacctgactgcgaatccgtacaatcacgccggcacaatgctccgtttacaagccttaggaatattcatttcaattttgaattgggtcagtgctccgcttttgtcgctcgttgttggggtctcttttttt

SEQ ID NO: 14879 - DNA, 1695 bp, DROSOPHILA
atgcagtattgctggcttccacaagagcgacgtgaacccattttgcgtgaaaaaccaccagtggttatctcaaataagcgattccagcgcatccgtgcccatgccacgcaggccgccaaacaggagcaactgcatcagcagcagcttcgcgaagaggcggatgagaaacttcgaatcggaggcgaggaactcctccggaaatttgctggtcgaaatctctgcatcacgcgggaggaggagtgcgcccgggaactgaagcaattgcaggccgagcaactggaggccaagcgcctggcggaggaggaaagcaaggctgctcgcctggagcatcagaaaaacaggaagaaacgcatcgaggctgcccaaaaactcctggagcaactgcgtcctggtccccgggaattgcagtgcgcgcgtcttcagagcgaagttatgcgaagtgtcaatgtccaaagagaagtgcaggcggagttcgccagggtcaaccagcaacagaaggagctggacaggaagatctttcaggagcaagtgcttcggggttttgaggaggcacaacagcgtcacaaggagcaatgtcaacagctaagtgagcataaaaaggagttattgcacctaattgcagagagggaaagggaacgccaggccaccaaagccaaggaattggaggaggcgcttaaggagcgggaacgcaatgagcgcatgatgaaggatcagcaggccaaggagaaggagctgcaggcggccaagcagcgcaaaaaaaaggatgaggcattggcctccttggtcatgtccgatcagcgccagaagcgactccagatgctggaggagatggagcaggtgcggtgtgatatccacaacaaggccaagggagatttggagcagttgaaacgagacagagccaaggagcgagtggatcaacgtatccggcgaaacgaaaaactggccaaggaactggctcctcgcctgcactacagtgcacgggaggatgaggagcgccataagcgccagctggaagagatgcgaaaagttcacagtgccgagcaggccaaatggagaaagtcgaaggaacaggccaagaacgcccgtttagctgtgcaaagagaggaggaggggctggccaaaaagagcagacaaaaagcagaggaggatcgcaggctggcagaggaacagcggcttcaaaaccatcaaactaatgttcagtttaagcggcagcaacgggaggagcatattcaaaggataaggaaactccgccaggatctcgacgaacaggttaagaaacgcatcgaggaggagacccgtccaggtaccaactacaacagggaggcccaattggaggaactccgcgaggatgccttcttcttcgattacgcccgtcagctgatggatgaagcccaagccaagggatgtccgctaaaaccatttattcgcgctgtgggtcagtacaaaaacgataatcggataggagcagagatacggattcctcgtcacatgatcactcgattgcccatgggcaggagaactcaaggagatagccaagcggagggaaaggaaaaaccatcggacaaacaggaacccaattccgagaagttgagcaaagaggagaaacttttgagacagaaaatcgatgagaatctcaagaaaatcgaggcgttagttttacaggagggcaaggacaaagatgatcaaaagaaatga

SEQ ID NO: 14880 - protein, 564 aa, DROSOPHILA
MQYCWLPQERREPILREKPPVVISNKRFQRIRAHATQAAKQEQLHQQQLREEADEKLRIGGEELLRKFAGRNLCITREEECARELKQLQAEQLEAKRLAEEESKAARLEHQKNRKKRIEAAQKLLEQLRPGPRELQCARLQSEVMRSVNVQREVQAEFARVNQQQKELDRKIFQEQVLRGFEEAQQRHKEQCQQLSEHKKELLHLIAERERERQATKAKELEEALKERERNERMMKDQQAKEKELQAAKQRKKKDEALASLVMSDQRQKRLQMLEEMEQVRCDIHNKAKGDLEQLKRDRAKERVDQRIRRNEKLAKELAPRLHYSAREDEERHKRQLEEMRKVHSAEQAKWRKSKEQAKNARLAVQREEEGLAKKSRQKAEEDRRLAEEQRLQNHQTNVQFKRQQREEHIQRIRKLRQDLDEQVKKRIEEETRPGTNYNREAQLEELREDAFFFDYARQLMDEAQAKGCPLKPFIRAVGQYKNDNRIGAEIRIPRHMITRLPMGRRTQGDSQAEGKEKPSDKQEPNSEKLSKEEKLLRQKIDENLKKIEALVLQEGKDKDDQKK

SEQ ID NO: 14881 - DNA, 3507 bp, DROSOPHILA
gtgaaaccagcgatggagctctcctgggcctacccgaaagccaaacggagcttgatgtgcgtttggttgaaaagaaaagctaaatactatgtaaactaaccttccattatcctgcagaatctcacagaatacaacacagcccacaatcggcgcatctcaatgctgggcatcgatgatgataccaatatgcgaaagcaaaacgccttgaaacagggacggcgcactcgaaatgtcacatttaacgatgaggagattgtcatcaatcctgaggatgtggatcctaatgtgggacgcttcaggaacttggtacaaaccactgtggtgcccgccaagagggctcgctgcgacgtcaatcatatgggcatccattcgggcaacagcagtttgtccagtgccaatgccgcacatgtacaccaaatgttccagcagagcctagttgacatgaagcagcagcatagggaaatgcctccgcccaatgcggtgctccactcgcctactaattccctatatcaaggtctaccggccgaaatgcatggcaagggtgacctagagcccatctccccgctgagcattggttccaagttgggcctattgctcccgaatcctgcgcctgaagtgctgccagtctatgacgaagctgtggagacctcgacattggctcaaaagttggccgtcgctaatgcaaacggtaatagttctcgcgactatttgtttaaaaacttactgattgtttataacaccattttagttcgtcgctttggtgaggatccgcatgactcgagtggcgaaggcgattcgctgtgcccacagaaaaagaaatacgccaaggaagcatggccaggtcgcaagcccatgttggggcagctgtaattgcgtattaacaaaataattaagattccacctacgattttctcaagcatatgattgacaacacactctggagtaatatttgtttattagacttttaacgtaaaacaaaacatttaatatctttatctgatcacatcttgcagctgtgtggatacctggggaagggtatcacatcacgaatgtttttaacgcccgtgacaagctgcaagtaacgctcaaagcccattccaaatcctccagttggaactcctccatactttcgcaagtcaacgtaccattccagatccttcggcagatgcggatgggattttaatatagcaggatcgctttcacgcaggctcccgccgcataattctccaacagctggcatcagtaggtctagggcatgaactcgattgggatttgaacgcgagactttcatgtaaaaaggtttctgctgagctggccaatccacaacgaatacgggagcaccacaatgggccactaaaaaaagttcttggtccttggagaatccttcgttcaggctaataggagtcttaagactgtccttgttttcctgcagtacttgcagggcttcatcgtagctcattatcttccacggtacttgcagccaagggagatcggagttagagtttgaattccgttgacagaaacttaggtcctcgccactcgtttccagcaaacggtttgtcacagatttcagcatctgttcaatgaactgcgctaacttctccatctcctccaaatgggcaagttccgcttcaaacatatagaactctgctaaatgcaacggagacttggagttctccgctcggaaggctggtgagagagtgtatgtcttgcctaaaccgtatgtcatggcctccaggtgcagttgaccagagacgctgaggaatactttgctatcaaagtagctttgttccatgggaatatttggtcggttcatctgcttgagcaggtcttgggagtccggttgtacccgaaacacttctcctgctccctcgcaatcgttggttgtgagcagaggagtgttgatctgcacgaaatcctgatcatccatgtagtcgtgtatagctttttgtgctttgtgtctgaccctcatctgggcggcaacgaaatctacgcgtgatcgaagatgtagatgctcacgtacatattccggtggatgtttctgtttgggactgaagggataaccctcctgcagccgtccttcagctggggaaagaaggcaaagctttaaaagatcgcttcatcttgttatcaaacatacttagttacccaacatttccacctgattcgcatgcaactcgaagctgccatttggagccacttgaattttaccgacagctgcaatgacgcttcccggagccaagtgctggttttccggagtccggggcacgaccacctggaacctactgctcgtggaaccatcattgatgtccagaaatgtgttgttcttcaaccggcgaacgtttttgatccatcccttttcaaacgtgcgaattgtaaatgaacagagagttgaatttggtattcatggagcccacctgtatggccaaagagtcgcctggcttattagtctttaatatttgagctatccgtccggatttgctgtaaaatcgtctcaagaataacatctttattcttattttgattctgttgcagtcagcgctgccagatcgttcgaattgctattgctgtgatatatttaaacggccgcatgacggtcacactaacaattcgtcactggcgcttgtaaagtaaaattccagttttattagttctttaatgaaatagcatttaaatatgtcatcattggacgcagacaccgtgctgctgagcattttgttcctcgtagtcatcgagaatgcgctagagatctatatatcgctgcgccaggtaagtttttccgttgtgccggcatgttctagccaggcgacatttggcgaggaattttatcaatgcgaatgataaatttagagtggcaaatgttaattggccgcctcatgtcttgcccccattaaatgatttaccctgccgtcgccaccaggtgaaagtgtaccaaactgcactgaaggtaccggccgaactgaagtcacacatgggcgaggatacgttccataaggcgcggaaatatggtctggaccaggagaaattcggcatcttcaaagctgttgttatggatgtggccctgctttgcatggagctgtacatcggactgatcgctgtgctctggcagctgtccgtccaggtggtggataaactgcaatgggactccaaaaacgagatcatcgtcagctgcgtttttgtgctcatatcgaatgtattgagcactttcaagggactgcccttcaagatctacaagatattcgtgctggaggagacgcatggctttaacaaacaaacagcgagattcttcgcctgggatcagctcaaaggcttcctagtcacccaggtcctcatgattcccatcacagcggctattatcttcatcgtgcaacgcggcggcgacaactttttcatatggctgtggatcttcacaggcgttatctcgctggttctactcactttgtatccgattttcattgctcccctgttcgacaagtatactccgctggagaagggtgctctgaggca

SEQ ID NO: 14882 - DNA, 1383 bp, DROSOPHILA
atgttattcttgagacgattttacagcaaatccggacggatagctcaaatattaaagactaataagccaggcgactctttggccatacagggatggatcaaaaacgttcgccggttgaagaacaacacatttctggacatcaatgatggttccacgagcagtaggttccaggtggtcgtgccccggactccggaaaaccagcacttggctccgggaagcgtcattgcagctgtcggtaaaattcaagtggctccaaatggcagcttcgagttgcatgcgaatcaggtggaaatgttggctgaaggacggctgcaggagggttatcccttcagtcccaaacagaaacatccaccggaatatgtacgtgagcatctacatcttcgatcacgcgtagatttcgttgccgcccagatgagggtcagacacaaagcacaaaaagctatacacgactacatggatgatcaggatttcgtgcagatcaacactcctctgctcacaaccaacgattgcgagggagcaggagaagtgtttcgggtacaaccggactcccaagacctgctcaagcagatgaaccgaccaaatattcccatggaacaaagctactttgatagcaaagtattcctcagcgtctctggtcaactgcacctggaggccatgacatacggtttaggcaagacatacactctctcaccagccttccgagcggagaactccaagtctccgttgcatttagcagagttctatatgtttgaagcggaacttgcccatttggaggagatggagaagttagcgcagttcattgaacagatgctgaaatctgtgacaaaccgtttgctggaaacgagtggcgaggacctaagtttctgtcaacggaattcaaactctaactccgatctcccttggctgcaagtaccgtggaagataatgagctacgatgaagccctgcaagtactgcaggaaaacaaggacagtcttaagactcctattagcctgaacgaaggattctccaaggaccaagaactttttttagtggcccattgtggtgctcccgtattcgttgtggattggccagctcagcagaaacctttttacatgaaagtctcgcgttcaaatcccaatcgagttcatgccctagacctactgatgccagctgttggagaattatgcggcgggagcctgcgtgaaagcgatcctgctatattaaaatcccatccgcatctgccgaaggatctggaatggtacgttgacttgcgaaagtatggaggagttccaactggaggatttggaatgggctttgagcgttacttgcagcttgtcacgggcgttaaaaacattcgtgatgtgatacccttccccaggtatccacacagctgcaagatgtga

SEQ ID NO: 14883 - protein, 460 aa, DROSOPHILA
MLFLRRFYSKSGRIAQILKTNKPGDSLAIQGWIKNVRRLKNNTFLDINDGSTSSRFQVVVPRTPENQHLAPGSVIAAVGKIQVAPNGSFELHANQVEMLAEGRLQEGYPFSPKQKHPPEYVREHLHLRSRVDFVAAQMRVRHKAQKAIHDYMDDQDFVQINTPLLTTNDCEGAGEVFRVQPDSQDLLKQMNRPNIPMEQSYFDSKVFLSVSGQLHLEAMTYGLGKTYTLSPAFRAENSKSPLHLAEFYMFEAELAHLEEMEKLAQFIEQMLKSVTNRLLETSGEDLSFCQRNSNSNSDLPWLQVPWKIMSYDEALQVLQENKDSLKTPISLNEGFSKDQELFLVAHCGAPVFVVDWPAQQKPFYMKVSRSNPNRVHALDLLMPAVGELCGGSLRESDPAILKSHPHLPKDLEWYVDLRKYGGVPTGGFGMGFERYLQLVTGVKNIRDVIPFPRYPHSCKM

SEQ ID NO: 14884 - DNA, 1317 bp, DROSOPHILA
ttctttatcctcagcgcatgtcacgcgtggagcgctccgcctggattctgatggatctgattcatccgccgctgaccaagggctatatggtgcggcccggtggcgatatgccgccccagatcgtggacatggtctccgagctgggcatcttcggtgtggtgatcggagatgcggagcacattgtgcacaactaccaggcgggacacatgctgcgcacaaagctctcaaccgccaacgaaggaggcgtggcagccggtctgggcgccctggacagtccatatctgatcgatagcgatgacgaggatgagcagaagtaggatcctttaacgagataaaggcttcgaacgccggcattccacctgttgcctcagtcttgtataaatgattatttttgtaaagcgtattgtaaattttttgcactattttttccccgtcccaatgtcaataaataaaatgttaaactagaaattctggtcaatatgcaaactggatttggggctaaagctttgctacagttcatgtaaactcttagtatctaagaactatcaccgtggagtagaatgggagtagacttggagttgggccaatgctgtgcacatcccagctagcgttcactaccgcaccgtcttgcggtaggtggcgtccatcaggcggtcaaccatgctgtcaatgggatggatgataagcggtatgctggccagacccaccagggtgggcaccgtctttagcacgggcataggcgctttgctcagcagtgttttggtggcccaggtgatcctaaaacgatataaatgagcattgcttattatgtgaacataaactcataaaaatgggtatgatcttggagagaacgatgacttcatcgtgtatctacaaatatacaataaacctgtttttgcaacattgcacatgccattctactacgtatatgcactctatagtataatttttactatgcttatataagataagtattatgcaactaatggaaaaagggaatctttaagacgcctcattccctacttccaactatgtaaatacaaccattaagtctacgtttttgggcaattttctggcaagggttgaacgcaccgattgatgaccaggccgggaatggcgacggaggccagcatctgccagcagaagacgtcgccgcccttgacggccacttctctggaggaagcgccctccatttggaggcgcagtgccttgtcaaaagtgtccgtgcagacgtatccgatggccatgccgtaggatgcggccaccagagacttgggcaccagcgggcggaaggactcgccaatctcgttgctgtag

SEQ ID NO: 14885 - DNA, 300 bp, DROSOPHILA
atgtcacgcgtggagcgctccgcctggattctgatggatctgattcatccgccgctgaccaagggctatatggtgcggcccggtggcgatatgccgccccagatcgtggacatggtctccgagctgggcatcttcggtgtggtgatcggagatgcggagcacattgtgcacaactaccaggcgggacacatgctgcgcacaaagctctcaaccgccaacgaaggaggcgtggcagccggtctgggcgccctggacagtccatatctgatcgatagcgatgacgaggatgagcagaagtag

SEQ ID NO: 14886 - protein, 99 aa, DROSOPHILA
MSRVERSAWILMDLIHPPLTKGYMVRPGGDMPPQIVDMVSELGIFGVVIGDAEHIVHNYQAGHMLRTKLSTANEGGVAAGLGALDSPYLIDSDDEDEQK

SEQ ID NO: 14887 - DNA, 4670 bp, DROSOPHILA
gcaaaaatcagagccattttgtttgcggcgtcgcagagctacgggccgcaaataaactggaacggcgttgcacggtgttgccagaccaagaaagtgaacatcgataacccacagcatgtcaatcgatagcttatcgacgatttaagcttatgggcgcgaaaaattaaatgtttcttgaaaactagtttttaacttcagcttaggacctcggtcaaaaggttattaactccaaacaatttccgtccagcccgaccacttttctaaataaggacaaaaaggcatgttatgtacgaaaggtttttattgaacaaatattcgcgcttgaattttgtatttttacacttaattagcacgtgcacattagaaagtgctgtcgtaccgtttaaattacatatttaatgtaatgtaatacaatgtttataatgtatgtatgtatgtgttttcgtgagtgttcgtgtgaatgcagttggtataaatataaatatatgtggcgtgtagtagcaactaaaataaaatccatgtgtgatcaaaggactccaacaggccgccaccgctcgcatccttgcttctcgcttgcttcacacgtaagcacacaccgggttgatgaatatcatatatataatatatctgcagttgcagagggcaggcgatcgggcgtcgttttgtggggctacacgcgttacatggatttacaccaactaaggaatttaaattacagatttgcaatggggtggtggtggtgttggtagtgataggtttgggtgcaacgccgccttctaaaattggttgattaattctcatctgggaagcgtatcgtactattgcatctgcagatcgttgagcaattgctattctctcgcttaattattcgttggccatcatgtcctactttcgtgcctttcgattttctgacctggatacgggagtgtagggttttatgcgtatattagatgggtagtatgattttttttgcttgttttgttggttttttttttttcttatagtgtctcgtcccgccatcggctcctcaattgcttgtgctgggatctgagcaattccggctgtcattaccacaggcccgacgagtagccgcctgggggaatgcggttcttgttgatcaccggagtgccgccattggacgactcctggcgctgggaatactcgttggctacgaccttgtagccctcgcctgtgacggggttgccctctgtgaaaacaaaggaatatcattagaaaatttgactacttagaatgcaaactaggtgtataaaatcaaattggtttctaagaatccgaaattaaagcgcaactaataaaagtacttggggattggctatgttcgtttggagtttggagtatggaatttcagacggaagcgacaaccagaaccaaacgcccacctcggatctttagcttcttgggcttgaggccgccaacaccatctccgttgaggccgaggcccgtgatcggattgcgtgaatcgagtttggagcacgcctgctgctcctccttaatctcgtttggacagagcccaaggggctcctttacattgctcacgcctgccatcttgttcagcgagtatggctgttcgggattatttccagagtctcgccgagtttgacagccctcgttcacctgatcggactttgtgactgtgctgttatctgccggcacgtctccaacttcgctatctcggcacgagttatcaatggatagggcgtcgtcagccggtggaattggcgtttcggttcgagccggttctgggggacacaaggatacgcgtggggatgtttctttggtgtctggtcttgctgttggaagaaggagcggggaggcaggcgaatcggggatgaggatgagtccttaaaggacactggacactacaagtactcactgctcatattgcggaagactgacgcgatacgattcaacagacacaattggttattgttcgtggattggtcggttggttggttggttggtttgacacgattttgagatttaacgtttatagtgcgtgcgtgtgcagtaaaaaatatatatatatatagatatttataaatgcacaacttatttcgttgaatacaattttgttttcaagcgctttggttttgatcggtgtagcaactgcgtgatctaagttcgtactgaatggaaacccagtcgttggatggctccccaatctgacagctgagttcttcgatcgagttcaaatccagcgactactactacttgccagcccaagttagggctaagcgcttctcacctgatctcgagccactgttcatcttgaggttctcggtggaggacgacaccgaagacgaggccgaggacaccgatccgctcttgccgttgtagtggccattggtggtcagcagcttctgggcggcaacggcctctgtgttctgaccaaagggaatgctgctcttcatgtggttcttgccgggggtgatcgggcgggtgggctccccaaacagccgagagtgggagtcgacggtcttctggccgcgacgtggtgcatcacctggtcatcacggttgcggggagttgtaacaaatccaaagaaatcaaataaattgagggaaaaccaaagaaaataaaacattcaaattagtggaattgtgttggagtagaattttaaaattagtttctcaacggtgttttaaaaacttgtacgtaatttcgacagtggttgggtgagtacactgagaaaaatcataaaatgcgtagttcattaaaaggaataatgtattcccctttacttttcttttagtcaaatttgctttaataattaaaatttttaaagcaaacttgatttcgtattttctttcgttgtgtgtgtattgtatggcaaaggttaggcaaaaattgaatgagaggagcagccttgagttcttttcggcttttatctgctcgagctcgaaatgtcatcggcggcaggtggaaaaaggaagcaggccaaccggttgggaataatgcaacttctcgagttggagtgggtcagtatttctgtgggaagtgggtgagctgtgttctgggtttagtcgagacgagtgtgagtgtcagtgcaactgcgttgaatttgcgttgaaacataaattagcacaaaactgacgacaacacaaagcaaagtgaacacaattttgggttaacttcggggtgaggggacaactgtgcaattgttgacatgaattaggaaagggcagacatagttcaagtaccaatgaaatagaatctgtgagctccttgtcgtactgcaaagatacgtagaaaagaaaagatatagagcgggggtaggaaaaaaaagaagaacgagaacgggaagaaaacgatacacatttaataagcatttaatagaccagaatccacggcaatatctaaaaacatatcacatcatgggcacaatttccaattaaatgatagaacaagcaactaagattgatttaattttcattttttttcgattgctagggatcacacatcatcacatatacatatggggggttcgataatggatggtactcaagcttaccgttgtttttcactccattatctttctcggcagcgaatatgttggacgccatgcgattcttcacgttcctgggggtctgcggcatctccgatccaaagatgtcgctcgatccgccgcccgggggcctcagcaccctgcaaaaaacaaaaacagaaagggggagactcgttaattacaagctcattcttttacggtcggtaattgatatggcacagtgcataattcacaaatttccacacgctcaacgatgaggaaagcacatcgagcctaagcgcggggaaatgcatttaatgtctgtgtctaatcatcatcactgcggctgaaaatggcaaaaggagctggggatggagttgcaattggaattgccggaggaggcggaggagctggctgcactcatcgagtttaagacggagctggctgggtgagcactcaatgggcattagaagtcacgccaagatgcatctcccatcctccggccgcatcgcaattaagtggaaaccctggcataaagaattgcaaccgagacaaaaggctggccaaaaatgttatgctttgtggcattcaccagccactcagtgcccgctgctcactgctcactactcagtcaagtcaagtcagtcagtccgtcgccgtccacgcaacgctgcccaaaaccaaaaccaccagctacagtgccggacggtggtgtaaggcacaaatggtgccacaactctgcgggcaatcgttgtttattaaaattggcccaggcaacgcagcaggactaaatgaaaataattgttataataacagtattaaagtatcagggggtggggaatataataatatcacactttcccacgaggtttaagattgcgtttaagtagtttacaagaatttcaattataattatagaagccagaattgttgacaagtgcagttctattttccttcctttttttttttataaaccatacttgtttcattacaaactgcatagttcctcaatttcttcgccatcaagtgtaatatttccgcagtttttcttccccgccataacagagacatttgatcttttaatttggccaaaatcatggctgtcttgcacacgtgaaccgcactgtcagccatcgaaggctaggctatccgagtgtatctgagg

SEQ ID NO: 14888 - DNA, 603 bp, DROSOPHILA
gcagggtgctgaggcccccgggcggcggatcgagcgacatctttggatcggagatgccgcagacccccaggaacgtgaagaatcgcatggcgtccaacatattcgctgccgagaaagataatggagtgaaaaacaacggtgatgcaccacgtcgcggccagaagaccgtcgactcccactctcggctgtttggggagcccacccgcccgatcacccccggcaagaaccacatgaagagcagcattccctttggtcagaacacagaggccgttgccgcccagaagctgctgaccaccaatggccactacaacggcaagagcggatcggtgtcctcggcctcgtcttcggtgtcgtcctccaccgagaacctcaagatgaacagtggctcgagatcagagggcaaccccgtcacaggcgagggctacaaggtcgtagccaacgagtattcccagcgccaggagtcgtccaatggcggcactccggtgatcaacaagaaccgcattcccccaggcggctactcgtcgggcctgtggtaatgacagccggaattgctcagatcccagcacaagcaattgaggagccgatggcgggacgagacactat

SEQ ID NO: 14889 - protein, 160 aa, DROSOPHILA
MPQTPRNVKNRMASNIFAAEKDNGVKNNGDAPRRGQKTVDSHSRLFGEPTRPITPGKNHMKSSIPFGQNTEAVAAQKLLTTNGHYNGKSGSVSSASSSVSSSTENLKMNSGSRSEGNPVTGEGYKVVANEYSQRQESSNGGTPVINKNRIPPGGYSSGLW

SEQ ID NO: 14890 - DNA, 5042 bp, DROSOPHILA
atgtttataaatgagtaaattacctaaaaactaagattgttttttttacttagatgggatgtgacaccctaacacccgattctttagcacagacactttccctgctctctggatgtttgggctgcgtcagaacacgggtaattggtatcaaccgaggcacaattaatttgattgaagctgccacaccgcatgccgctccaacgaacaacgaatccatcctacaaattgccggccgtcgtggcaggcaacaagccgaaacactgcggcaacatcggcacaatagcaacagcaactgtgcagcaagcgtgcaattaactcttgtgcgccaagatcaaagcgattaatgcggccccaagttcccagacgaagggacggaggccagggcatttggagcagcgaagggcaaggaacggaaaccaagacagagacgagatgaggcgggcgtggatgggggaaaggtattccaagcctggtctggcttggtctgtatcgtcattttcattctcgtctttctgggcaaaaaaaatattattatacgagggtcccattcctggatgaagtcgcctaaacatctaataggcctttaagccagacgttcaagagcatagccatagtaagcatagccagtgttgttatcctggccacgaaaacaaatatgtaggtaatatctgaatgcattttccataaaatcccagaaaatatatatattttacagcatttttgcgatgtagatatctgtaaagatatttttactatttcacttttgaaaatattgcatacttttaagagcattgctactgcttagtacctcctgtatccaccagattcgctgtagatgttacagaaagtctggtaacaaactggttaaagacccgtcttggcccagatttatcgatagcgagggcgaaagcagctccccgatattgtaagcccgatttgtttggtcaaagcacagccaaagccaagttgcagacctgcagaccggttttggccaagaaagaagaacgaagaaagatcgagtcggtcgaccaaagagaaagcatgatcggttggttgttgttgacgtgtgcaccactctaagaagtgtttcaatttaaacggccaaaactatataatggcagcaagtgttgttaaaacccccaagtgccccagacgaggatctgtcaaagatgtggcccaaaacgcacctagaacagcacccacatctagcaaagaggccaattggtaagcgcagcgagatcaaaacaaaagagaattttagtgaaattcctcaaattcctccaaaaaccccaaaaacaggaactggtggcttctcctggctaccgtcttcctggtgaccttcgccacccgcttctataaggtcaccgagccggatcacatatggtaactgaaccacttttgaaagtgactcgccggactaatagttacttatcttttttccagttgggatgagacgcactttggcaagatgggcagttggtacattaacagaaccttttttttcgatgtccatccaccgctaggaaaggtgggatactgataatacaatactcaagcaaattaggctgaccaatttaaaatgtttccaaataaatagatgctcattggcctctctggctacttgacgggctacaatggaacgtttccgtttgagaagccaggtgacaagtacaacgagacgcggtaccagggcatgcgatatgtacgtgattacaatacctgtgaactgcgtcctgttaattgatctcacccacagttctgcaccacactgggagctctgatcatgcccatgggattcgatactgtctacgatttgacccgttcccatgaagctgccttgcttgcggctgcctatcttattttcggttagtgtaaagacgtgtgctaagttaaccctcttatttgcctgctattttctacgttcagatgtggggctcttgaccctgaaccagtacatcctgctggaccccattctgttattcttcatgatggcctccgtctggggcatggtcaaggtatcgaagtccacggcctccggaggatcgtacggtctacgctggtggctctggctcttcctcaccggcaccatgttgtcctgcacgattagcgttaagttcgtgggtctgtttgtggtgctgctggtcggtctgcatacagccactgaactgtggctcatcctcggcgatttggggcagcccattttggagactgttaagcagttggcctgccgggccatcaccctgattgtctggcccgttctcctctacatcctgttcttctacattcacctgagtgtccttaaccgcagcggcaacggagatgggttctatagttcggcctttcagtccaggctgatcggcaactccctatataatgccagcatgcccagagatgtcgcctacggatcgctagtgacaatcaagaaccacaagacgggcggaggctacctgcactcgcatcatcacctgtatcccaagggatctggcgctaggcagcagcaggttaccacttacacccacaaggacgagaacaacaagtggctaatcaggccgcacaacaagccgggtccaccaaagggcaaggtacagatcctccggcacggggacctcgtccgcctgactcacatggcgaccaggagaaatctgcattcccacaacgaacctgcacccatgaccaagaagcatttgcaggtcacaggctatggcgaggtgagcaccaacatattttacattttaattggctgggaaagctcatgtggtatacttcgacgaacttcagttgggactaggcgatgccaacgacgtctggcgcgtgttgattgtgggcggcaaggtcaacgaaacggtacacacggtcacttcccgtctcaagttcatccacctgctgcagaactgcgccctgacctccagtgggaagcagctaccgaaatgggggttcgaacagcaggaggtgtcatgcaatcccaacgtgcgcgacaagaactcgcagtggaacgtcgaggacaacgagcacaagttgagtaagtaaatactactaaaatacttcggctaatattcaattactgtcaatttatttccgtacagtgcccagtgtaagctttagcgtgtatgcgcccggcttctttgcccgcttcctcgaatcccacgccgtaatgctgcagggaaacgcaggactcaagcccaaagaaggcgaggtcaccagcagaccctggcagtggccaatcaactacagggtgagcatagcagaaacaaacaatattcggtcagaagaagtaacactttcctttcctatctagggccagttcttctccggcagcagttaccgcatctacttgctgggaaacccgttgatttggtggagtaatctggttttcctggcccttttcgtcacggttttcctgtgcaacgcagttgttcagcaaagaagagctggcttcgcccgatcggcggcccaaaatcaagcccaagttcccgattcggaaacagtggcccaggacgaggagagtgagcactccaccacggacatctgcagttgttgtactccggcgaaggagatagtcccaaaggcagttcccagtgggtccccggaggcacccaacccggcgcagtccttaagggcggccgcctggctttttctgggctggatgctccactatttgcccttctgggcgatgggacgggtgctctacttccaccactattttccggccttgatcttcaactccttgctgacgggtaagcagatagaagctgtgtcaaacttcatctttgtttaaaagcaaattaatagtgcctaataattcctttaccgtttgtcattttaaactgtttttaaataatttcacacaggcgttatgtacaactacattttgagggttctgcccaaatggattcaccacgttatcctcggactggttctctcgatcctggtgtatagttttgccgccttctcgccacttgcttacggaatgagtggtcctctagccaacgagccgaactctacaatgtacaatctcaagtggctttctacctgggagttctagttaatataaccttaagcattttgtggttcaataagtgttttaataatcctttaaagctccagaacataactcatatgcatctttgtgaaaatgaaaaccccaaataggcaactatttattatttatgagtaggtataatgattaatttatagaatacgcttaactctacgtactgtttacaaacaaaaacaaaaaaaaaaccattggtaaaagtagcaaaattctcgataagcctaagtattaaaggatctggggatccgtgtcccacggtcctgcgctacccatcaatcgaatattcccaggtcatcgaagcgacgcagggcgtagcgcaaggtgtccgtggtgcggggattggaggagaacatcagctggaccttcttcttggcgaagtcctggtccgacagcgcctctatgctgatgtcgtacgagtcctccttcttcatggtcaccatcggcagaaaggcgtaggacgagaagaagccgtacagttctctggcccggatctcctgttgaatatccgcgtagctgggcacaaacgccgagtgcatccgctccaggctgtcccttagggaagcgtagtacgtctggataaggaactcgcgccggtggatcaacacgtccagctggacgctgctgtttaggaagaagtttatgtcgcagcctgggctgccgaagaagctgttttggaaatccacctggaattgcatagagcccacagttagtgtccagaattacaaatgatggagtctagacactcacgaatatggcatcgatgggcttcgtgggctgctcgtcgtcgtatttatacatgaagttgtttacccacaggtcgccatgattaagcacagtgatctctccgggcagcggccgcccggtggtcacgaggttctccttgatgttgtcgcagtggcggtgcagcttctctgccagcagctcgtagccgggccacttggagacgacgttggccaaagtccggcactggagggtcatgaagttgatg

SEQ ID NO: 14891 - DNA, 2412 bp, DROSOPHILA
aagaacgaagaaagatcgagtcggtcgaccaaagagaaagcatgatcggttggttgttgttgacgtgtgcaccactctaagaagtgtttcaatttaaacggccaaaactatataatggcagcaagtgttgttaaaacccccaagtgccccagacgaggatctgtcaaagatgtggcccaaaacgcacctagaacagcacccacatctagcaaagaggccaattggaactggtggcttctcctggctaccgtcttcctggtgaccttcgccacccgcttctataaggtcaccgagccggatcacatatgttgggatgagacgcactttggcaagatgggcagttggtacattaacagaaccttttttttcgatgtccatccaccgctaggaaagatgctcattggcctctctggctacttgacgggctacaatggaacgtttccgtttgagaagccaggtgacaagtacaacgagacgcggtaccagggcatgcgatatttctgcaccacactgggagctctgatcatgcccatgggattcgatactgtctacgatttgacccgttcccatgaagctgccttgcttgcggctgcctatcttattttcgatgtggggctcttgaccctgaaccagtacatcctgctggaccccattctgttattcttcatgatggcctccgtctggggcatggtcaaggtatcgaagtccacggcctccggaggatcgtacggtctacgctggtggctctggctcttcctcaccggcaccatgttgtcctgcacgattagcgttaagttcgtgggtctgtttgtggtgctgctggtcggtctgcatacagccactgaactgtggctcatcctcggcgatttggggcagcccattttggagactgttaagcagttggcctgccgggccatcaccctgattgtctggcccgttctcctctacatcctgttcttctacattcacctgagtgtccttaaccgcagcggcaacggagatgggttctatagttcggcctttcagtccaggctgatcggcaactccctatataatgccagcatgcccagagatgtcgcctacggatcgctagtgacaatcaagaaccacaagacgggcggaggctacctgcactcgcatcatcacctgtatcccaagggatctggcgctaggcagcagcaggttaccacttacacccacaaggacgagaacaacaagtggctaatcaggccgcacaacaagccgggtccaccaaagggcaaggtacagatcctccggcacggggacctcgtccgcctgactcacatggcgaccaggagaaatctgcattcccacaacgaacctgcacccatgaccaagaagcatttgcaggtcacaggctatggcgagttgggactaggcgatgccaacgacgtctggcgcgtgttgattgtgggcggcaaggtcaacgaaacggtacacacggtcacttcccgtctcaagttcatccacctgctgcagaactgcgccctgacctccagtgggaagcagctaccgaaatgggggttcgaacagcaggaggtgtcatgcaatcccaacgtgcgcgacaagaactcgcagtggaacgtcgaggacaacgagcacaagttgatgcccagtgtaagctttagcgtgtatgcgcccggcttctttgcccgcttcctcgaatcccacgccgtaatgctgcagggaaacgcaggactcaagcccaaagaaggcgaggtcaccagcagaccctggcagtggccaatcaactacaggggccagttcttctccggcagcagttaccgcatctacttgctgggaaacccgttgatttggtggagtaatctggttttcctggcccttttcgtcacggttttcctgtgcaacgcagttgttcagcaaagaagagctggcttcgcccgatcggcggcccaaaatcaagcccaagttcccgattcggaaacagtggcccaggacgaggagagtgagcactccaccacggacatctgcagttgttgtactccggcgaaggagatagtcccaaaggcagttcccagtgggtccccggaggcacccaacccggcgcagtccttaagggcggccgcctggctttttctgggctggatgctccactatttgcccttctgggcgatgggacgggtgctctacttccaccactattttccggccttgatcttcaactccttgctgacgggcgttatgtacaactacattttgagggttctgcccaaatggattcaccacgttatcctcggactggttctctcgatcctggtgtatagttttgccgccttctcgccacttgcttacggaatgagtggtcctctagccaacgagccgaactctacaatgtacaatctcaagtggctttctacctgggagttctag

SEQ ID NO: 14892 - protein, 765 aa, DROSOPHILA
MAASVVKTPKCPRRGSVKDVAQNAPRTAPTSSKEANWNWWLLLATVFLVTFATRFYKVTEPDHICWDETHFGKMGSWYINRTFFFDVHPPLGKMLIGLSGYLTGYNGTFPFEKPGDKYNETRYQGMRYFCTTLGALIMPMGFDTVYDLTRSHEAALLAAAYLIFDVGLLTLNQYILLDPILLFFMMASVWGMVKVSKSTASGGSYGLRWWLWLFLTGTMLSCTISVKFVGLFVVLLVGLHTATELWLILGDLGQPILETVKQLACRAITLIVWPVLLYILFFYIHLSVLNRSGNGDGFYSSAFQSRLIGNSLYNASMPRDVAYGSLVTIKNHKTGGGYLHSHHHLYPKGSGARQQQVTTYTHKDENNKWLIRPHNKPGPPKGKVQILRHGDLVRLTHMATRRNLHSHNEPAPMTKKHLQVTGYGELGLGDANDVWRVLIVGGKVNETVHTVTSRLKFIHLLQNCALTSSGKQLPKWGFEQQEVSCNPNVRDKNSQWNVEDNEHKLMPSVSFSVYAPGFFARFLESHAVMLQGNAGLKPKEGEVTSRPWQWPINYRGQFFSGSSYRIYLLGNPLIWWSNLVFLALFVTVFLCNAVVQQRRAGFARSAAQNQAQVPDSETVAQDEESEHSTTDICSCCTPAKEIVPKAVPSGSPEAPNPAQSLRAAAWLFLGWMLHYLPFWAMGRVLYFHHYFPALIFNSLLTGVMYNYILRVLPKWIHHVILGLVLSILVYSFAAFSPLAYGMSGPLANEPNSTMYNLKWLSTWEF

SEQ ID NO: 14893 - DNA, 3076 bp, DROSOPHILA
gctcattaacgtgacccaaggcgagctttacactgggcataacgccccgaccggtgtaggagttttccacgccatccccgtacgggaagaatcccgctatgtagacgtccgatctcttggctgtcctgccacaggcggtgctccaaaggagcaggaacagcaggctggcgaatggaaaccaacttggccggaacatgttgaccgcgtgggctgtaaaacgattctaaatgtgaatagcgcatatcgaggacgtgaacttggagccaagttgtgggtggtgaatggcagtggttggtttcgggtgagccaaggctgccgaggcaaggctgcgcccagtgggtgtgtattattttctacgttctacctgtgtttgctggcactcgcatgcaattttacaggacaggtggagcaaggctaaggccagtccaggccagcaaaattgcttcaaattgctgcagcaatgctggcacgtttagtaattataaagcaatttaatgatctaaaggattcgtgcattatttagtatgctcgttaacgcgaaggagtatcttccaggtgttgcatcctcttaaatcttatgtgtacatgtttttaggaacctaccagcttgcttagtcccagaactggcttttatttcactaccgatgccatttgaaacacttattttacatcaaatctcagccaacgaagaacttttgcagtgcgagggtccgaaaaattatgtatccccctgacttgacatttgtctgacaggaggaattcgaggcaggaagtgcgcatgtccttaaaccgaaagctgtcactgctccgccttggcctaggctttccaacccccgtaattaccataaacccactgcgcttgtaaacatcctgcaacaggtggtcccatcagctggtactccggcaattgttgtgcccgttgccatggactactggggtcgaaaaacgaagtagataactgctcggaaaattaccaaattgaaaattgtgagtaaccataatggaggactatgcgcccagccgctataaaatgcttgagaaaatcggcgaaggcgtccatggctgcgtgtttaaggccatcgatctgcagcgcaacaaggaggtggccatcaagaaggtggcccttaagaacaagttcggaaacatagccctaaatactttgagggaaatcaagaccctgcagctttgcaagtctgaatatgtaggtataccatatatctattttccatttgttaattatgtaactaattgtagattctggacatcattgatatatatcctgacctaactggtctctccttggtgctggaataccagccggacactctgtacaaccgcctcaagagcgaggttaatcccctgagccgccagcaggtgcgtaagtttgcacaccaaatgttcaaggggattgcatatctgcatgaagcgggtctcatgcaccgggatattaaacccgccaatctgcttatcagcgatacagatatgcttaagattgccgatttcggactggcccgtctgtacttccctgaagacgagtcgcgcctttattcgcctcaggtctcaacccggtggtatcgagcgccagagattctatttggcagccagaagtatggaaccggagtggatatgtgggcggcaggttagccatgactctttgatgggtttacatatatccttatggctgacattattgctatccaggttgtgttgtggcggagatgctacgcggagtgcccctgtttgcgggaaccaccgacatcgagcaattagccatcatcattcgcactctgggcagcccacgtctgaatcagtggccagagctgacttctctgccggattacagcaagatacggtaggcattcttaccgtctatgattacttaatccgtaatattcttgacgtaggtttcccaactccgtgggcattcactgggacaacttgtttcccagctgcacacatgcggtggaaatcaatctggtctcgaatctggtggtctacaatcccaaaaaccgactcaaggccagcgaggtgggttctgcttcaagtttgacaccggttaggtattataattggtaaattctatatttctcaggccgtcgagcatgattattttcattaatctaggactatttacacggacattgctagcaactaagagttttcggattctttgaatctgcaaggtagaatgtgtgtgattagttgtggaagtgaaggaatatgtttatcaggacacctacttgcacttaaggcaggtaaagaacaccgtctggccttcgtccgccgatcgaagctgcagggtggcataggacatcttgtcgtggttgcacttgggacacttcctctccacaacggggccatccgcgtccgattccgactcccttttcgtcctgttgaacaccttgctgggatcgtaggtgttgaagtgtatggtaaactcggacttctcgccgctgtaaactatttttaagtgttaaataaattaaacaaagttgtaatttctggatttaccatctggctgaaactccttcttgcagttgtagcaaatcacattgcccttgacttgaagctcgggcagaatggagccgcaggaggggcaaaagcccggacaattggaaaaaatatccatgccagtatatatcacccaaaatcaaaatcaaaatacaaaaaccgcacgtgctatttcggatttcagtatgagcgtaactgaaccgtttgaaatataccacacggtattaaaaatatacttgattcatatactaaatacgtaagggtggaaaactagaataagtctggttgaaagccttgatgaaacgggtagagccgtttacccgtttcgattaccggttcttaatcaaaatcaattattcaaaataaactttcaaaatagtatttgatattcatagccaatattacgtaatgaaaacagttagattttaatagccaatatcaagttatgaaaacagtaagatttttacttttatctttactttgtattaaagtttacaaaactattacatcaataaggcgatcttacggtctagttagctgaaatgcaagtcggatgtgtactgtg

SEQ ID NO: 14894 - DNA, 909 bp, DROSOPHILA
atggaggactatgcgcccagccgctataaaatgcttgagaaaatcggcgaaggcgtccatggctgcgtgtttaaggccatcgatctgcagcgcaacaaggaggtggccatcaagaaggtggcccttaagaacaagttcggaaacatagccctaaatactttgagggaaatcaagaccctgcagctttgcaagtctgaatatattctggacatcattgatatatatcctgacctaactggtctctccttggtgctggaataccagccggacactctgtacaaccgcctcaagagcgaggttaatcccctgagccgccagcaggtgcgtaagtttgcacaccaaatgttcaaggggattgcatatctgcatgaagcgggtctcatgcaccgggatattaaacccgccaatctgcttatcagcgatacagatatgcttaagattgccgatttcggactggcccgtctgtacttccctgaagacgagtcgcgcctttattcgcctcaggtctcaacccggtggtatcgagcgccagagattctatttggcagccagaagtatggaaccggagtggatatgtgggcggcaggttgtgttgtggcggagatgctacgcggagtgcccctgtttgcgggaaccaccgacatcgagcaattagccatcatcattcgcactctgggcagcccacgtctgaatcagtggccagagctgacttctctgccggattacagcaagatacggtttcccaactccgtgggcattcactgggacaacttgtttcccagctgcacacatgcggtggaaatcaatctggtctcgaatctggtggtctacaatcccaaaaaccgactcaaggccagcgaggtgggttctgcttcaagtttgacaccggttaggtattataattggtaa

SEQ ID NO: 14895 - protein, 302 aa, DROSOPHILA
MEDYAPSRYKMLEKIGEGVHGCVFKAIDLQRNKEVAIKKVALKNKFGNIALNTLREIKTLQLCKSEYILDIIDIYPDLTGLSLVLEYQPDTLYNRLKSEVNPLSRQQVRKFAHQMFKGIAYLHEAGLMHRDIKPANLLISDTDMLKIADFGLARLYFPEDESRLYSPQVSTRWYRAPEILFGSQKYGTGVDMWAAGCVVAEMLRGVPLFAGTTDIEQLAIIIRTLGSPRLNQWPELTSLPDYSKIRFPNSVGIHWDNLFPSCTHAVEINLVSNLVVYNPKNRLKASEVGSASSLTPVRYYNW

SEQ ID NO: 14896 - DNA, 3714 bp, DROSOPHILA
cttcatctcgcccgtcattttccagataacctggacccgcttgcgtgagtctcgcaaatcgacgcagtgccttgcccaaagctcgagcagcagttcgaccgcgtggaatgaccactcggacggctgaaaggagttccagctcaggcggcgctccaacgaatcctgcaagtgagacatggtaatttggactactattgacttctaatggcgtcgttgtacgtacgtctagtttagggggatggatttccgcgatcccctcctcgcacagttcctcggtacgcaggtagtccacatggcacttgtgggtgcgcagattggacgtgttgaaggatcgcatgacgcgcttgcagcccgtgcagaagtagagtccattgattatggcaccatcggtgcgcacgatttcccgatacaccttccacacggagccgcgctgcttgcgtcgtagtagccggtactcgccgcggagcaccttcgccgagatcacctggttggattcgaattttgatacgtcctgcatcgtgcgggcctcaatcatgtcgtccttacgctcgaaaagtataaacaaaatgtgcctagagatgggcagcagctcgatatcgatttttctagaaatggtcggtattggcttcatatatctatcgatagttctatgatatcgatttaaattatatctaaaatacaaataaaaaaacattttacgaattgagaaactaaatgtaacaaatacgatttaaaacaaatttataatattaaagtaaagtaagtaattaaagttttgctaaaaaaagtaaaatataatttcattgcatttatttttacttaagaaactaatttgtaagatcataacaatgcaaaatctagctttttacaatatatatatatatatttagattaatttgaagttgaagcaatattacattaaatattcactgttttagttgtatattttgctgaaaaagtaacaccacgctacttctacgtataacacttaatatttacactactgattgttatgcttaagcaaataaacaatatctttgtgaaatgcgtttagctccagcagtgcatccttcataacctgcagcttttctcgctcgatcgccagtttttcctcctctatttcaaggagtctgtccgaatggttgttcgatgctttccgttttgtctgacattttgaaattggcgatggggagagatccttcatgtggtcatcatcctcctcctcctcctcctcctcctcgtcttcttccgggatttccggaatactgggagagggagttcgcgttcttttcatggctttgctagcaaccatatcactttcgaatacgttcccatcgtccccggccataggctcgtcttttaatgaagacaattcctcaggctcataatcctcatcgctgaacaaagcttgagctgtaaaattagcgtatttttaagacataatgacataactagcatttattgcactacgactttacctggattttcggcggtaatatcttcgaagacatcaactgatttcgtgccaatcagaagtgcttgaagcttatgaaagtgctcccacttggatggcactccagtttcccgaactctctcagcttctattctgtaaataccaatataaaagttaatatactataaaaataaaaacttttggtatgcaaaatataagagcgcacctatactttcgcgacaaattgtccattttggttttaagctccgtgtggctgggcccaaactgactcatctccctagccatttgccggtagatgatcacattcttggactctccacgaaaatccttcaaatgctgtgcccacagttgcagcaacatcttctccgcatcctttttccaaacgtgtcgctccgttttcgtatagtagtcctcaaacttttcctccttgccaacattcttgggcaatggcgagatgccattggctcggatcgctggctcaacgaccattttctgtgcaacgtttatcttggcggttcgctgtggtcccgtcggtgatccttcatcgctcaacagggcttggagtgagctcttcatgcgcggtcctggcttacgacgttctggtgttatattctagaagagttagttggtttagaagcatggttactgagtgattaattagaattttagtatgttcgctagtggtccatgttggactatgtaactgaagtggactttcatacagaaattaggtcaaatttgatatcctatcacatgttttaacgaatctcgctttgtagtgccaaaacacattatgaaaaggtaaacaggtctattgccacccatgtgggataggtaaacaagatatttggtgtgtggctgtactcggtaaaaccgggtaagtaccccaacaacccatgtggggcgatggactcacttcctccggctgcaaatcctccgccaggaagacggtctcgtagaacttctcgtactccgattttggcgggaatgacagctgcgactgagttttcttttcggcggcagcaagactgcgattgcgactgtttagggcgattcgcttgctcttcgggccgatcagtgaattccttgtacttcggtgaacctccttggcgccggcggcatcgtcaatatttctggacggcattacgttgcggtcttttgtgtccagcgctagatagcgtgaattgttgtgtttttattttgataattggtggaaaaatatcttttgtaattcctgttcctgttgtcctagagatgcaacaagagtcgatagatgtgcagtaatatcgattgttgcagttagtgaagtttttgaacactgtttattggtttggcttatcgataatttaacattaatacgcagccctggttaaaatggcgggcaatttaaaagtttttattagttaagacttcaaatgttcgtaatttggatattgttaaagtaaacgttatcagtaaatcaaacgcgatttaagttaaatgtatcaaagtcctcttgtttggcttatagctcaataataaaactaagtgttccaacaaaaatatctctcttcaatacatattttcttgcatcaattattttatttactttaccaattcaaatgaagtgcatttcatttgctttagcatttatatttgttaggcactgcctcctaatacaataaagatcatttaattgaaatgaattgatgtaaggacaattaccacagatgtcattctatgtggatttcgcacgcacttttagctaatcaagatgggtcagcaggcatttgccgcagcaaatgtatctgcatctgcgaacagcatctgcatctgcatctgtatctggaaaaagcacaaggcacaacggacgacggcaatcagcgacaattgcccaaagattgcgactaatggttatagttggaccgacgcacgtcgtcgcatcagacagaaggtgcctgtgggagacttgcaaccggtttcgaatgattctcttgtcttccgactcttgccgttctcacatggagaaaaagtgaacaaatccggccaacaatagggttacaatatcagtctgtccatatattaatatgttacattctttaaaacaatacaattcatttgggaaaaaattcagacattgtttcacagattaatacattgaaaactgctccatttaatttgtaattctcagtgtagtctcctggctcctgcatttcggccggctgcaaaagtttgtggctcgtgctcggtgattgccagct

SEQ ID NO: 14897 - DNA, 1272 bp, DROSOPHILA
gaacaggaattacaaaagatatttttccaccaattatcaaaataaaaacacaacaattcacgctatctagcgctggacacaaaagaccgcaacgtaatgccgtccagaaatattgacgatgccgccggcgccaaggaggttcaccgaagtacaaggaattcactgatcggcccgaagagcaagcgaatcgccctaaacagtcgcaatcgcagtcttgctgccgccgaaaagaaaactcagtcgcagctgtcattcccgccaaaatcggagtacgagaagttctacgagaccgtcttcctggcggaggatttgcagccggaggaaaatataacaccagaacgtcgtaagccaggaccgcgcatgaagagctcactccaagccctgttgagcgatgaaggatcaccgacgggaccacagcgaaccgccaagataaacgttgcacagaaaatggtcgttgagccagcgatccgagccaatggcatctcgccattgcccaagaatgttggcaaggaggaaaagtttgaggactactatacgaaaacggagcgacacgtttggaaaaaggatgcggagaagatgttgctgcaactgtgggcacagcatttgaaggattttcgtggagagtccaagaatgtgatcatctaccggcaaatggctagggagatgagtcagtttgggcccagccacacggagcttaaaaccaaaatggacaatttgtcgcgaaagtatagaatagaagctgagagagttcgggaaactggagtgccatccaagtgggagcactttcataagcttcaagcacttctgattggcacgaaatcagttgatgtcttcgaagatattaccgccgaaaatccagctcaagctttgttcagcgatgaggattatgagcctgaggaattgtcttcattaaaagacgagcctatggccggggacgatgggaacgtattcgaaagtgatatggttgctagcaaagccatgaaaagaacgcgaactccctctcccagtattccggaaatcccggaagaagacgaggaggaggaggaggaggaggaggatgatgaccacatgaaggatctctccccatcgccaatttcaaaatgtcagacaaaacggaaagcatcgaacaaccattcggacagactccttgaaatagaggaggaaaaactggcgatcgagcgagaaaagctgcaggttatgaaggatgcactgctggagctaaacgcatttcacaaagatattgtttatttgcttaagcataacaatcagtag

SEQ ID NO: 14898 - protein, 391 aa, DROSOPHILA
MPSRNIDDAAGAKEVHRSTRNSLIGPKSKRIALNSRNRSLAAAEKKTQSQLSFPPKSEYEKFYETVFLAEDLQPEENITPERRKPGPRMKSSLQALLSDEGSPTGPQRTAKINVAQKMVVEPAIRANGISPLPKNVGKEEKFEDYYTKTERHVWKKDAEKMLLQLWAQHLKDFRGESKNVIIYRQMAREMSQFGPSHTELKTKMDNLSRKYRIEAERVRETGVPSKWEHFHKLQALLIGTKSVDVFEDITAENPAQALFSDEDYEPEELSSLKDEPMAGDDGNVFESDMVASKAMKRTRTPSPSIPEIPEEDEEEEEEEEDDDHMKDLSPSPISKCQTKRKASNNHSDRLLEIEEEKLAIEREKLQVMKDALLELNAFHKDIVYLLKHNNQ

SEQ ID NO: 14899 - DNA, 13916 bp, DROSOPHILA
tgggttaaaaacgaatccaaagaacttattgcacatgtgtgtgttcgcgtgagtgtataaataaataacgtaaaatgtatcgagatgttccatagcagaagaagatggttagcacagctccttccttcacttctatgtaactagggtattatttcgattaaggtttctcggcttggggctgtctggcttggattccagggtattccccatattcacagcttccgtatgctgcgatctgccgccgctgaattgagtttagttctgtgaaaataagagaaaaacgaacgttagatatatctagacaagtgcaatatcaatggttaacaattggaaaacaagcttcaaacagtattaggccgaatctgaacgaattaactgaacaatcctcagaaggaattgcattagtatggatcgcagtgcgatcaaaaccgaacgagagtgttaatttagtacacaacacagtggagcagaacgaggaatttcatgcgaatgcgttgccagcttaccccgattttccagctgccaaagggtcaactggaaaatgcgcgaaccacacaaaactgcagcagaacggatctagaaccctggagttttttctattttttgtttggtcaaatcgaaggaggattgtgtaggttcttttttaactatatatatgtatatatatggcgtcagaatgaactcgcacatcgcttggatagcacttaagaatggtatttaactggctttaaagatgctgtgctgtggctgagacctttctactcctcactggccatcctgtgtccgtgtgggtggtttggttgtatttcgtgtgagggatgcgatgagaaaaagagctcgaattagtgcccagaagttatattacacataatgaaacagcgtggccaagcgaggtgacagtgcgattgggtatgggaggatgctagcggaagccggaaaacgaagccgaattttccatttctgacgccaattcagtggagtgagtaaatcaaaaattgctcttggtaaatatcaaactgcatttggcggattcaagttgtttacaaaagaataagtattcagatagttggattggtcacaaaataaggatttagttaactaggtttatatctctctctgtgagtaccggaaatgacgttctgttttatttattttttgtttcattgggtgggtgtgcgtattcgtgtgttgtgttgtgtgtgtgtgtggaaagagaaaaataaaacgaaatcaataaattagtattgggtattggttaggagtttgtaattccctcaaatatcaaaatcgggcagagaaaaggatgaaaagctgacggagattcaggtacacttacagttccatggagagcaccgtgggattgggacatgcttgtggtgcccgtatgtggcactgcttgtgactaatcagctggcagtcgcgacactcgtagccctgctttccgggcctccgcgggatggacttcatacagatggagcactgcagaccgcttctggaatgtgaaaggattcgttaattatattcaaagcaactaatgcttactactttaaacttacccgctcaaatgcttggcgatgaaggtgtgatcgttgtagatgtgcagcttggtgcccttgcgacgccagcgcggtctctgggcgatggccaaaggcacaatgaagtggctaaagatcatgcacatgaagcagttccatcagaatccataaaatgcaaacactcgatcgaaactcaccgctttatgccattctcgatggtctccagcaccagggtggaggcctcgtgcacgtaggttttattgctagccgaggaaaagcctgagatggccgaggattctgaaattgaggagcgacgtgagtggtcggtgatggagtgaccaatgcccatgcgtggtcctgcgttttattaattttagtgtgtgtttgtttttgttttttttttatgtggcaagttgagagtggcacacaaaccaagcacccgttaggacccatcaaatcatattttgcacatatgaaaataaacaaaagaaaagaataggagaggagtatgagaaataatcacaaccaaaatcgaatcagagattataaaaagaaaaattcaaaagccaaattccaaaaataaacccaaatatttacaaaaaatattccaaaaatattcaaccgtgttaagtttttgttgaaataggtgtttcatgtgcgtgtatcggaaccatgaaatacatacagattcgtgttgtggatcacagttcagttagcagttgatgggtattgtgttaagggagagaagataaaacagacaacagatgtagatacaagtacagatacagattaccaaacagttaatttacaagctttgaatggtacaatatcttggggtacttaaactttaagggagaaaagcaatttacacttagtactaaagttattcatgaaataagatgtgatgtatgaaaaataatgattttgtgatttgaatcatggcttataactactacttataaggctgaagcctgaataataaagcgaaagtcccaattacatatgaaaatggacgctttttagagagccaaaaatatgaacaacttaagataggtattagacataaaagattttgcaatgcactaagcagttaatagttgttctatatgaagtgatattccttcgcagagttattagcagaatgcaggagttgtccaaaaaaattgtgcgttaagccgggctcaaatagttaaaacgtggacactggcggaggactgtgactgagatggtaattaccaagtgaattgcttttggacagagtggcacgatcgacagataatgaacgggaagaatcaccattgagggttccggtggctgttcgagggaatccggtggctgttgttgtattcgagttggtggctgatagtgacttatgactgttattattaggttgatcggccgagagggtgcgtgtcttggagcggctgagccgcttcttcagggtgccaaagaaattacgttttttgctgcgcccgcgatcatcgaccacgtcatggccctccaataatccggattgctgagccagctgctgggcaccaccgtttcgtggcagactgttatatccgcccgaaccggcgccattcgagttaccattgccattgaggctatagttgttgtggtaactactgccattgggcgatgaggcggcattgggctggccaaactgcaagtgattcaacggttattaatgcggaatcttctctagctttcaactctaactgcatgccatgccggtgaacttagtgaactcagtgtacttacctcagcggtgctttcctcgttgacggtgccattacctgaatcgatgagaggctcacccagctggctggacttctcctccttggccagctccagctcaagttcggtttgtgcctcattggcggcacgttcgaatgcctgagccactgcctgatccaattccgtcgccgtatcggtcacctcgatttggccatctctattcaactcgacctgattggttcgaggatttggttaaagaagcgcatttttgggggggttaggcagagcaaacagaacgagaaacattttgaaattagcttggcttaaatactaactagcctacatgacttgaacatcatcatgagggcgggattagagacgcagtaactcagataactcaaaggaacgattgaagtaatgatgaccaggtctgggtgtttaccttaaatgcattcgggctgcttgaattctgggcgggatcaagagacggaaatgaaatgaaataaaggtaaagaaaaacaaaaggaaattataaaaaccgtacaatgcggaaaaggagggcacgaaatgtatgaaacctctaacgaaaattgggtgtcacggatgttattttattctcggaatctttgcccgaagaaatgtgtttccacaacaagcgtgaacccattttagccatacacactcacccgctgcacactgtggatgatcaaagtgctcttgctgggttgtccgccacttccgctgctcgagagcgctccatcctgcagagctcttacggctgcatccgctagatctgctccatttcggatgtgttcgttaatggccggtgtgctgagacgcagtgcctccttgagacgctgtggacgtgcgcccgccgggatttcggcaccctcaatgaacacaaagtccacggtgatggctcccgaaacgggctgcgtctcataggggcgtggttgcagctgcaacagttgagtggatgcgggtccaacggccagctcatcgattccaaccaggccgagacccagaaacttgggcggatctgaggcaatcaccggatggtcatacacctcgaacaggatctcagctgattgaggggagagttcactacaatattgaagaaaaacattactatttctggccaatatgaaatcagtgagcacttacaagaggaagtgctcatcccagaagggtttgccgccgcgctgagtacccgtctgattcttctgggccggctcgtccatctcgatgaccacgtagggattctgggcatcccttattccatcgcccttgacgatcttcaccagcagccgacggccggaaaccatgtgttgcgaatccctcaatcccacgccacccatgtgctgctccatgttgtgctgtgtgaattgtaggaggacaacatgcgatgagtgagtgcagtgagagacagagaaaagatagaagtcagggaagaggtacttcattctgagaagagcgataaaaagacggaattaggggcttatgaaattcgcctttaattaggaactaatgcgtgacagacactagaaattgtaataatattgaaagtattggttgccctgaaaagagagagcgcaaaagatagttctttttactttcaaggatcagcagggatcatagggggtaacaaaacgaattctcaacggaaacacgagcgatgaaaggcgaattccataaacacaatgaaggacgggagcaatgagaagtgtctgtttgttttgcttggatgacaacactgtacagatagtctcaagtcgagttctgtgtgcgatgacaagtgtaccaggacacaggagtacaaagaacaataaacacaacactgccacaaatacgggagctggcatcttctcactgctcccgacgctcaccgccagcgagtcatagtgaacgggatagattacgggcaggtccaggggctccacttcggcccttggacaggtggagtaaatggagaagtccaccggatagatggtgtcgcgcaaagccgtcgtcaggatgtcgctgatcaccgtctgcaattgctgttcatcctgatccattgccttgatggcacccacgctgttcatcgcgatgcgaacctttggaaaaagagtgatgtttcggttagtatcgaatatggtcttggtattggtttataattgtgtcgaaacagtaacacaactcataaattaactctactttaagttcactttcatgttaatcaaacttttatgagttgtatgatttgtttaaattttctttttgctgttacaaaaagttacttacatccggatagccctcgactcgcatctcacccttgaggctgttgtagttcatgggaatggccatacgggcgcggaacctagacacggtgaccttgtagtgggaggtctccaccttgcccgacttttggcggaaggtcttcacctgcaacaccggcattgcatcgcagtcaaaggtgatgagctgtgttgatattcgattctcaagtgattaaagttccaattgacaagcaaattgatttaattaccatatcagcgggattgttttcatcgcaattacaaaatatattattcaatccgggggcaggactgtcgggtagcactcgaaccacttcaacggccactccatgctgcaaaagtgaaggaagaatatatgtacgtatgtatttaaccacttgtacgcaatcaaacagatgggctcctttccatcgctgaatgttttattcgcgaattacgtaattcagcagcgtgcgttttttggggctataattcagagacgggataatgactaacgactaaattccgaccttggcctacggactggctccgatcacgtaaaaggcgataaaaaagcaaatcggaggaaagcaagcgaggcaaaatcatgtatttcggcatttcgataccctctagccgaataaagttattaaatattaagattaactaactcgaattgtgattaataacaaaagccatatgaatatgaatcaatcaacttgtttctttcgtatgcaaactaagttcgtaggtgacccactcaagatagccttatttttacaccttttaaaatcagatacaagcgtatttctcagatttcatcatttgtcacaattttgtaaatcatcactatcaactcgtcgagctaaatactacacggtatagaaaactgaaaacaaaacgcgttttgacatcagttacggctgagcgagttcccagtttgccagttggacggcgaaggggaaagagctggagccgaagcagctgaacatcgatttcaagttgaatgtcgtggcgggccaagaacaaaggttaatgcccggccaataaagaccaagtcgggctcagccatgacatcagagcccgtacggccgtgtatgatgtcaaaactgcttgccgtatgatgtcatttagccatcctccgattgagactcacctcctccacagacttgcgcagcgtgtcgttgatggcgattacccaggacatgagcagctcgttgacgatgaccaggtcgctataaagccagcgaaacacttggctggtccaggtgacggagctctgtagaataaatagagtaaatagagtcgttatatatatatatatcagttgattagtttatatggtttataatattattatatattctcaccgtttctggacccacgacattcgatggcggtgggacatagcgcttcttgcgattctctggcccagtggaactctgacgcaccacccgacgacgtggaccgccggcagctgcaccagcggtattcaatggcgatgctgatgaacgtcctcggccaccggatgcgccggccagaggcttggataagtccaagccttcaaccttgctcttggtggccaggagatcgcgcggctccgagagacgtttctccgtcttgccggcgacggacgtgggtgatccggatgtgggggccacgctcgtctggcgactgttggccgcactggccgacttgtccttgttgagatacttgtggtagagcagcttgattagccacacggagaagagggccagaacggcccacaggaaaatgaagatggccagggagtccattgttaagtcaccaagtccctcgaacgaacagatatagtcatcgatttgatctgctagatccatcgttcagttccaggccgagttaatcccacagatcgtcgtcatcgtcattatcgttctgcgggaatagagtcttttagtgggtgtttctcatctggcgagagtatctccgtaatgggttgagatgagaggaatttgtgtatcggggcagccatgaaagatcttaatcccccctcctgcccaaacgtctctgtcgtattctatttatagaatttgtacaattttctttggggaaaaatatgaaacgttgggaaaaactggtcactcacaaaagcacaaaatccacaggaagttaagaaataataatcgtttaaatatttccaactttaattgtttatattggttaaaatatgtatttgctttaaacaaataatgcaattgaaaaagaaaaatcgaaatatttgataaacgggaactaaaccgaaccgaactgaaacagaactcaactgaaatgaactgctcgcatgcaaatcaattcgaatcggatggtatcttttgtggggatcttcgctctccgaggcgagaggcattctcagatgcaaaggaatctgtatccgacagtacgaatccgagcgaaagatactgcgccggcgcctgtagctggtgtcagagatgtgaacacttgttatccatttagttgttcgtgactccaactattccattcttctggcatttattggctcccccaccattgacgtcatagttttttgggtcgcgacagagaaggaaaagcgatgacgtaaggctgattttccgttgatgaacgccacaccgccctacgacttcactctattgtttataatatgtttgttctgcttgtatttttagacctatcactatttgtttcgttctttccgctactgttggttgtattacacggatttattagaaaacattcgagagaattggcattcggacgactatgggacttgcggggaaaatggaaaattcgtttcgtttcactccccttggcacttgttgcagttaatactgaaaacacattttgcgattcgtgccctcgtcccattcattgctaaattatcgcgaaaatacgaaaatgcgctaagcgtttttggcgatagaaaaacaataacaaaagcgctattatgctggcgattatctgttttatatcaaataataatggcagtgttattttcgcttctttttctctacaactacgcacgcaattttttaggcactggaaaaaattattataacttatagaggctagctattaaatatatttctttcaattaccatcatagtaatacttcaagtccatacagcaatgtacttttgcatttttttttaattaaaatttataatcatttaaaacacacactttctttgcctgcgctacattcttcggctttctgcgccactgattttccacttggcttttctgcttttccactctccctccaatgccccagcaagtacaaaacacttttcgagcattctcagccactggcacgtcgtctattgaccccttgccattatgtgggcaccaagggcgctgcggaggggcgtgaaaatgaggggggtggtattgtgtgcgagtgagagggcgattacgagagcaacaagtactcgcgactatatttagcccttggcaagcgcacacaaatcgcgttggggaaaatgccgtctgccacgccccccgcttggtcgtgcaacatcagccctagtacacatgttcccattgcccccgtgattgacagagatctgcgatctaacggtcgtgtgggaaagtgtccacatcgttaggaaaaacattaaataccatataactagaaaaacatacgatacagagaacacacagactcttaattcttaaaataaagttctatttaggtacaagttgatccaaaaaacaaaaaaaaactctgttttttaattagcatattttccagtgcccttagccaactcctcattaaaataatccacccatatgaaccattttccgccgtgtgaaagatgtgcaaagctcgtgtggtaatagtttgtattcccagaagagccgctgggcctggctaattaatgccaagtgtgcggcacatgcaaactattggccaagtggcttttggccggcccgcttcccaagctcgaatttgatgggcttgggcaacggcaacaggtactgccagtacttccgttttaattgcccgcccgtcaaaccttcaagagggtcagaggtttcgggttgaatgccccccgcctttcgagtggcgaacgtctagaaattgcgtcattcttagtgcctggttttttgttttctgaggtctcagtacccttttttttccagcaagctaaggtattcggtgtgcaaacattttgagatgcacacaccaagtgcgcattgctaatcacattcaaatgcgaataaatattgaaaatgatttccgttaccacgccagagctaaaaatagagattgggtaatccaatccaatccaagccgattcaatccgatccgttcgaaagccggcgatcggaatagaacaaaccacaggtctgaatgtcgccaaaaatataatatataatgactcaaatccgaaaactttgacggggaacacacacttgagtcaccttatcttatcacactctttgcatttatcgcatttaatagccattagtgaattggcattatgactcgatatggatctgggcaactggctaataagacagcaacaggctatctgacttgcacccttaatgggtcaataaaatatgtcaaatgacggtatcgccaacagtttcaaatgctctcgaacatgatgtcattccagtgaatgtttcattcaaattgataaggcgctgcttcagattcacacagtacaacaaagaaaaagctaatgttgtaagactcgaaagtttgagcaaagtttgggtgtccaagacctttgaaatcaattgatcttgaaataagtatgaacatcatctcgaactgatggtaaaaaatttgtcataccagttattagttaggttacacccattgatttaagtgcagtcgtgccgtcgagaaagctctaatcagtcatccatgcatgaagagcctacgaataaaattgcacattattatagcccgattaatctattgccctatggcatcgatatcaacgaccgaacttcgtcgtgtttgccatttcaaagtgtcaaggttgggctaaatttggaaatttggcgaaagtaaatggctagcgagcgcagacagggcgtatgctcgatttgcaaccaaagacattaagcatacgcagcttgatcccaagatacaaacgtactttagcacgcaactgaaagagaccacgtcagaggtcaaaggggaaagggccagttgcgtgtttcactttggtgccagccaaagttcagctcagaaaagccgcacaacccattttacacaactctccgagacagacaaacagcgtttcgaaacctttcgactttggcctattcaaaaactcgtttatcgattcaaactggtcccgcgaacccatcgatttgcgctctgtgaatatgagttctatgcagtcgaaggcgttacgcatcttactcgaggaaagtttctgcccccggcttattgatttttccacgggtttccatttcttatctgaatgattggcctgcaaatatagtcggtggtcagtttactcgccacccgccttcggctggccaaaaggtatttgaactgcggggccaattgttttgaccacgtttggtcaaccatttgaggactagggttgccagggcaaccactaaataattaagggtccgcgcattgatttgtcaacgtgaccgagggccaaacaaaaatcggagttgaatcgtaaaaagtgctcacacttctcggtttatttgtttgttaacccaaaaacatcattttcccttttcctggaagttgcttttccgaggaaaagctttgaccggcaaaggatgcgccatgcgaaagagaaaataatggagagcggagagtaaaaagaacgctgagaggggttggaaaatgcaggcagttacacgagcaaaaaaattatattaaatttaagttttgtttttagtttgtggcaggcgaaaaatgaactttaaactggtatagaaaaagtttaagtattaataaaataaaattgatttgtaatggggctcttaactactacttagtgcaaaaacatactaccgaattaaatataaatcgaattaaatttgaattgttttacattttctctataataccttcaaatgttgccctatttatttatttatttcatatttaataataaatgagatgctttaagttatttttttctgtgcacagtttttcctgcctagttttcctggctttcaacagcgccaacagccagtgacacagtttccacattttggggtggcttccaggggtgtagagagatacggaaccagaaacgagggttgcagatggacgaggcacgcaatttgggcctctatcgcacggaggatcgccgcaacgtcttcatagagagccattaggaacacacccaaaataaaagccaagcccaaaattgagcaaaccctgagctcggttgaaggatgtgcggaaaaatgtggcgttttctttttggaggaagaaaaaagggtttgcttcacttaccgtatcacaaagaacgcaatttgtagatgtaattatagttgttgaatccgcaggataaagtgtgttgcaatttgtgttgttcgtggaagtaaaaatggatggcattatttggggagaaatcacaaccgtaaccgtaaccacatatgtaatggctttttagccctgattctgcgacttgtcggccgaaatgtacttggttttcaggtgttagaaaacatatttataaaatgcaaatacccagtgattgattagtgacaaaaagcttagaccctgctcaatttgtgggtattcatgtgcatgtatttcagtatggtttgcacgtgagttaggtggccaaatatataaaagtttcattaaattccagagccagttatttagggccagcaatttctctgtgcgaaatgcaaatcgataaaggagagggagtgtggtggttggttttcaaaagggggtggtggtggcgggcggaaaagcttggcacacatagtaaacaaatggtgttttcactgaatttttatatgctctactcacacggttgaccgaattttaaaggccacgttagcaaataatattcctacgaatttcgatttagtgcaaacaacaaaaagttctaccaaaacactgccgattattcttgtctcaaaaataatgccgtttcgtattttattacttaatatttttcaaattatttaactatttcgctgcagcgagatagaagatagtcgtgctcttctcgcgttgatgatgaaattctttcgtttgttattgttctttttttttgttgtgtttttgtcactttgttcgttgcgaagatggcgataaaggagaagcgaagaggggaggcgaggcaaatcgagtagacgtgtgaagaattttacaaacttccgtaaaattaactaaaattgaaagacacaattgatatcttttgttcaataaagtcgtcatttcagcaataacaatattttcgatttatgctaaaaagtgtaaatctaagttttgacgcttgaaattggcattttgctatataaaatttagtaaagcattaaaaattccacaatatttaaattcaaatcgaatgaagccactcaagttacagataatcaaaaacagaatagtggaagccactcaagtttaaataaaatacaatcgagttattcaagttcgcctgtgttgtattcaaacttaagttcaatgtcgtcggttgcttccgcttgctcataaaagtttcttttgcgattgtttctctgttatatttgaatgtcttcgataagaaatcataacattcaaattatgtagattgtccgttggcctttgtgtgctttacactgcactacccggttttagttttaactactttacactgacacgttactactgggccacacagtcgctttagtggttttctatttaaacttggccaacatttaaatttccccagccacaataacaacaacaacaattagaaccactgaagagaaagagagagagcgagacaatcagctgtttgcagcatcaatgaagaacgctgcttttcggcagtctttaatttcgatttaagttcggcattataataaattgtttttgtgtagaacaagcaacacatagccacacacgcacacacagaaacacgcgcgcacagtttatatgttaaattgtatatttctgcaatgctttttaaatattttgctgcggtacaacaaatatttttgcggtttgttgccaaatttcccatatacaacgtacacacgcttatcgaataagctttcgttttatcattttgtttctttattttatgttcttttttttctgttgagcactaggaacaataagaaatctttgccgccgctattttatttttcatccgcgaacgaaacgaacaccaaccttactcgttga

SEQ ID NO: 14900 - DNA, 3096 bp, DROSOPHILA
ttaattttacggaagtttgtaaaattcttcacacgtctactcgatttgcctcgcctcccctcttcgcttctcctttatcgccatcttcgcaacgaacaaagtgacaaaaacacaacaaaaaaaaagaacaataacaaacgaaagaatttcatcatcaacgcgagaagagcacgactatcttctatctcgctgcagcgaaatagttaaataatttgaaaaatattaagtaataaaatacgaaacggcattatttttgagacaagaataatcggcagtgttttggtagaactttttgttgtttgcactaaatcgaaattcgtaggaatattatttgctaacgtggcctttaaaattcggtcaaccgtaacgataatgacgatgacgacgatctgtgggattaactcggcctggaactgaacgatggatctagcagatcaaatcgatgactatatctgttcgttcgagggacttggtgacttaacaatggactccctggccatcttcattttcctgtgggccgttctggccctcttctccgtgtggctaatcaagctgctctaccacaagtatctcaacaaggacaagtcggccagtgcggccaacagtcgccagacgagcgtggcccccacatccggatcacccacgtccgtcgccggcaagacggagaaacgtctctcggagccgcgcgatctcctggccaccaagagcaaggttgaaggcttggacttatccaagcctctggccggcgcatccggtggccgaggacgttcatcagcatcgccattgaataccgctggtgcagctgccggcggtccacgtcgtcgggtggtgcgtcagagttccactgggccagagaatcgcaagaagcgctatgtcccaccgccatcgaatgtcgtgggtccagaaacgagctccgtcacctggaccagccaagtgtttcgctggctttatagcgacctggtcatcgtcaacgagctgctcatgtcctgggtaatcgccatcaacgacacgctgcgcaagtctgtggaggagcatggagtggccgttgaagtggttcgagtgctacccgacagtcctgcccccggattgaataatatattttgtaattgcgatgaaaacaatcccgctgatatgctcatcacctttgactgcgatgcaatgccggtgttgcaggtgaagaccttccgccaaaagtcgggcaaggtggagacctcccactacaaggtcaccgtgtctaggttccgcgcccgtatggccattcccatgaactacaacagcctcaagggtgagatgcgagtcgagggctatccggatgttcgcatcgcgatgaacagcgtgggtgccatcaaggcaatggatcaggatgaacagcaattgcagacggtgatcagcgacatcctgacgacggctttgcgcgacaccatctatccggtggacttctccatttactccacctgtccaagggccgaagtggagcccctggacctgccccacaacatggagcagcacatgggtggcgtgggattgagggattcgcaacacatggtttccggccgtcggctgctggtgaagatcgtcaagggcgatggaataagggatgcccagaatccctacgtggtcatcgagatggacgagccggcccagaagaatcagacgggtactcagcgcggcggcaaacccttctgggatgagcacttcctctttgaactctcccctcaatcagctgagatcctgttcgaggtgtatgaccatccggtgattgcctcagatccgcccaagtttctgggtctcggcctggttggaatcgatgagctggccgttggacccgcatccactcaactgttgcagctgcaaccacgcccctatgagacgcagcccgtttcgggagccatcaccgtggactttgtgttcattgagggtgccgaaatcccggcgggcgcacgtccacagcgtctcaaggaggcactgcgtctcagcacaccggccattaacgaacacatccgaaatggagcagatctagcggatgcagccgtaagagctctgcaggatggagcgctctcgagcagcggaagtggcggacaacccagcaagagcactttgatcatccacagtgtgcagcgggtcgagttgaatagagatggccaaatcgaggtgaccgatacggcgacggaattggatcaggcagtggctcaggcattcgaacgtgccgccaatgaggcacaaaccgaacttgagctggagctggccaaggaggagaagtccagccagctgggtgagcctctcatcgattcaggtaatggcaccgtcaacgaggaaagcaccgctgagtttggccagcccaatgccgcctcatcgcccaatggcagtagttaccacaacaactatagcctcaatggcaatggtaactcgaatggcgccggttcgggcggatataacagtctgccacgaaacggtggtgcccagcagctggctcagcaatccggattattggagggccatgacgtggtcgatgatcgcgggcgcagcaaaaaacgaccacgcatgggcattggtcactccatcaccgaccactcacgtcgctcctcaatttcagaatcctcggccatctcaggcttttcctcggctagcaataaaacctacgtgcacgaggcctccaccctggtgctggagaccatcgagaatggcataaagcgccacttcattgtgcctttggccatcgcccagagaccgcgctggcgtcgcaagggcaccaagctgcacatctacaacgatcacaccttcatcgccaagcatttgagcggaagcggtctgcagtgctccatctgtatgaagtccatcccgcggaggcccggaaagcagggctacgagtgtcgcgactgccagctgattagtcacaagcagtgccacatacgggcaccacaagcatgtcccaatcccacggtgctctccatggaactaacgtcatttccggtactcacagagagagatataaacctagttaactaaatccttattttgtgaccaatccaactatctgaatacttattcttttgtaaacaacttgaatccgccaaatgcagtttgatatttaccaag

SEQ ID NO: 14901 - protein, 861 aa, DROSOPHILA
MDLADQIDDYICSFEGLGDLTMDSLAIFIFLWAVLALFSVWLIKLLYHKYLNKDKSASAANSRQTSVAPTSGSPTSVAGKTEKRLSEPRDLLATKSKVEGLDLSKPLAGASGGRGRSSASPLNTAGAAAGGPRRRVVRQSSTGPENRKKRYVPPPSNVVGPETSSVTWTSQVFRWLYSDLVIVNELLMSWVIAINDTLRKSVEEHGVAVEVVRVLPDSPAPGLNNIFCNCDENNPADMLITFDCDAMPVLQVKTFRQKSGKVETSHYKVTVSRFRARMAIPMNYNSLKGEMRVEGYPDVRIAMNSVGAIKAMDQDEQQLQTVISDILTTALRDTIYPVDFSIYSTCPRAEVEPLDLPHNMEQHMGGVGLRDSQHMVSGRRLLVKIVKGDGIRDAQNPYVVIEMDEPAQKNQTGTQRGGKPFWDEHFLFELSPQSAEILFEVYDHPVIASDPPKFLGLGLVGIDELAVGPASTQLLQLQPRPYETQPVSGAITVDFVFIEGAEIPAGARPQRLKEALRLSTPAINEHIRNGADLADAAVRALQDGALSSSGSGGQPSKSTLIIHSVQRVELNRDGQIEVTDTATELDQAVAQAFERAANEAQTELELELAKEEKSSQLGEPLIDSGNGTVNEESTAEFGQPNAASSPNGSSYHNNYSLNGNGNSNGAGSGGYNSLPRNGGAQQLAQQSGLLEGHDVVDDRGRSKKRPRMGIGHSITDHSRRSSISESSAISGFSSASNKTYVHEASTLVLETIENGIKRHFIVPLAIAQRPRWRRKGTKLHIYNDHTFIAKHLSGSGLQCSICMKSIPRRPGKQGYECRDCQLISHKQCHIRAPQACPNPTVLSMELTSFPVLTERDINLVN

SEQ ID NO: 14902 - DNA, 4139 bp, DROSOPHILA
gagatagcgtaagtgaagcacttttcccatcattaaaatatacgaagctaaccctcggactcgtttaggatcgaagacgaccaggagatcgcgaggaaactggagcacgtggacatcagtgctgaaaaagacaaatgtgttcttcaatagaaatcgaaattaaccaaacctgactggagattatacttacacacactcaatcttatctatgtaactagttagataacaactatgttcagagacacgcgataaggtcgcgtggtttttgtggttcggtgtcgcttcttatgcaatcgttatatccaacgacaacaaatacttggaccacttggtatggttattaaaaaaaaaaaggtatactgtgaaacaaaacaaattgcttttgtatttaagcaaaacaattcaagaaataagaacaaaacgtccgttagtgaactaagtaaaaagacaggcacacgtttatacacctatttacgataatcagatcttggtattactttaaattaaatggtggtaactttgtttcatgtttcgttgttgtgccatctgaaccactcctaacttatgtaaatcctgaacgcaatagcgatgtgagatagggaattgaggaggcaattttacgttagttttactttagcatttatcccacataactagaaacgcttcatccaaaaatacacgtacacttatatatttatgaattacacttatacaacaaacctatcttaacataccttatttagacccgtacatttgctctaagttaagcaaagcgctttaatcataatttaaaggtggcttatatacttatataaaatacattttaatttactttgcccaggcgaatgttgtataaagaactgttcgacccaaggaacattaatagctaataaaagaaacgaaaatgctgtcatcagcatcgaataaacccaaaaccattctaagaagtcttatccgttgttatctgggaaagttactccaataacaaaacaaaaatgcgtcatatcgatttatttatttttttgtattaacaggtttctcaatacaaatacttaacagagtatcattttaattgactcagtaacaaaaaagattagtcacgtcgagaggtaatagttttttttattcgatcaacagtttagtgtacaaaaatacatttgtttaatgcaatcaatcgttaaattaatatcgtcttaattgagtgataacatatgtatgtatatatactcggaagctgcattatttccatggatcacttgagaattgcttaaatgattgctaaattagcagagatttcatcacattgtacttgatattattttcgtttctcttgttccttctgaaaggaagtcttttaattactctacaactcgtctacgcatataatctaaaagcatgcaaagagatttaaaagttcacaactaagtgacgtcatgacggcgctaccattgctctagttcagcgataaataactacaaaagaagcgaaatcaaagttgagtataggacacagctacaaaaacaacaaatgcgaaggatagactaacatttggcgtcgccggagatgaggcagatccgtgcgtcatttcgtggagctcctcgtcggtgtaggtctggttggcagcctcgaccttgtagttgaatgtcgccgatacgggcttgtggtcggagagagtgtagtccatgtgggactgataagacagctggttggcactcagggtaatgcccggataaatgttgctctgcacgcgatgcaaaatccgatcgcaccaggcgggtcgccgcttcaagttgtagtcattagtgccttccacgaactgcaaggaaaatcaaatgaactttatatgggtgctagagataaggcgaattaattacattcgacatattgcctcataaattagttggattttgcttttctcatgaaatctgtggagccgaatgaagtgattgattgatgaagtgattggcggaaattaaaaattcaagtgcagataaaattaattacacccacccctatatacattatttagattaagattagaaagttcaaggcaaactttgactgtagagataataagattgtatattagattgttaccttaaaagtgggcgcaaagttgggctgctgctcctccagcaagctgaaggcgtttcccttctcccggagcagattcaactggtcgagcttgagcagatcagcgtatcgctggttctccacatccgtgcggacatcccaagcggacatatcgccggagagacggaagttaagatcgccaaaccaaaagacaaagtcgtgatcgaatatccggcgatatccctgcgcattgtacttgtgattgtccacgatttggtgatagtcttcgatgcgctccttcagcttctcatcgtgcgccgccagatgggagcagacgaatgcgacgccagttccgtagagcgaaagtcgaatgcttacggcacccttgttgccccacagccctccaagtcccgtgcgcgtggcttctgtctcgatttctttcatgtgcgggatgtgcttgtgctgtgcgaacatggttataagaattccctgcagctgcttcgagtccacctttacgaactggtgatcgctcagagagtccgcgatcttcagcacccacggatcgtcattgaagatttttagcacctgcggtgtggtgctcacctcctggaatccgattacatagatatcgggcagctggttatccggacaagtggtggtgccattaagggacaaaagggagctcagatcctgatttcgcggcgtatgggtgcccacgttccaggtcaaaaggaagatgcacagatccgcaatcgccgtggccgtaaccatttttccgccgtctaattatctatgattaatacttgttgttttggacgtcacaaggtggctgttgatgagttcatgggcatccaaaacaggtttacggatttggcagcatcagcaaataaagcgaaaggcgttttgcacacgcaactttcatttatgtaaccgttaattcttcagcactaattttttaagccgctttaattggactaggaagcgctagttgcccgtattatttatagaatactcagatgtcgttatttatgtttatttgtccgtccgttgcgtgagcttagtgtgaccgcagcacaactatttaaatataccttaggcggcggcaaaaattttatggtatctcgatagtaacggagctctgaagctcatcgaaaacatcggctaacatgagcttctcatctaatttagatttttatttgaaacacattagatattataaaagccaaaaatcaatttaagaaatataaagatataagattaaaagttgtactgtgcgtaagttcctttaaaataataatactcttatttcattgtttttttttttacgcgagaatgcccctttgcatttgcttgtgctaaaccgatattatcggcaactagtcaattgtgtgtacacactggctaaggatttttcataaaaataaacactttgtataaacttaccttccgaactattttacttaagttaaaagtatggctaacagctacgacatacccagttggtgcgttgtcaaattcagccgctgccttgccacaaaatcacgtagcattttatttattttagggctggaaaaccgcccactggcttacatctggatgtgctaaaggacgacaaactagtacaaaaactgatggtggatgaaaaaagatgctatctatttggtcgcaacagtcaaatgaacgacttctgcatagaccatgcctcttgttcgcgggtccactcggcgtttgtctaccacaagcacctcaacatagcctacctcgtggatctggggtccagtaggtactaagatatctgggattcggagtaagcttatccatttacttttgacagctcatggcacctttattggaacactcagattggaagcgcacaagcccacacagctgcagattaatagcaccttccactttggggcttctacccggaactacatactcagggaacgaccctctggccaccacagcaacatcatggaagacctgccgctcagtgaaaccagcgatggagctctcctgggcctacccgaaagccaaacggagcttgatgtgcgtttggttgaaaa

SEQ ID NO: 14903 - DNA, 1858 bp, DROSOPHILA
tcacactaagctcacgcaacggacggacaaataaacataaataacgacatctgagtattctataaataatacgggcaactagcgcttcctagtccaattaaagcggcttaaaaaattagtgctgaagaattaacggttacataaatgaaagttgcgtgtgcaaaacgcctttcgctttatttgctgatgctgccaaatccgtaaacctgttttggatgcccatgaactcatcaacagccaccttgtgacgtccaaaacaacaagtattaatcatagataattagacggcggaaaaatggttacggccacggcgattgcggatctgtgcatcttccttttgacctggaacgtgggcacccatacgccgcgaaatcaggatctgagctcccttttgtcccttaatggcaccaccacttgtccggataaccagctgcccgatatctatgtaatcggattccaggaggtgagcaccacaccgcaggtgctaaaaatcttcaatgacgatccgtgggtgctgaagatcgcggactctctgagcgatcaccagttcgtaaaggtggactcgaagcagctgcagggaattcttataaccatgttcgcacagcacaagcacatcccgcacatgaaagaaatcgagacagaagccacgcgcacgggacttggagggctgtggggcaacaagggtgccgtaagcattcgactttcgctctacggaactggcgtcgcattcgtctgctcccatctggcggcgcacgatgagaagctgaaggagcgcatcgaagactatcaccaaatcgtggacaatcacaagtacaatgcgcagggatatcgccggatattcgatcacgactttgtcttttggtttggcgatcttaacttccgtctctccggcgatatgtccgcttgggatgtccgcacggatgtggagaaccagcgatacgctgatctgctcaagctcgaccagttgaatctgctccgggagaagggaaacgccttcagcttgctggaggagcagcagcccaactttgcgcccacttttaagttcgtggaaggcactaatgactacaacttgaagcggcgacccgcctggtgcgatcggattttgcatcgcgtgcagagcaacatttatccgggcattaccctgagtgccaaccagctgtcttatcagtcccacatggactacactctctccgaccacaagcccgtatcggcgacattcaactacaaggtcgaggctgccaaccagacctacaccgacgaggagctccacgaaatgacgcacggatctgcctcatctccggcgacgccaaatgttagtctatccttcgcatttgttgtttttgtagctgtgtcctatactcaactttgatttcgcttcttttgtagttatttatcgctgaactagagcaatggtagcgccgtcatgacgtcacttagttgtgaacttttaaatctctttgcatgcttttagattatatgcgtagacgagttgtagagtaattaaaagacttcctttcagaaggaacaagagaaacgaaaataatatcaagtacaatgtgatgaaatctctgctaatttagcaatcatttaagcaattctcaagtgatccatggaaataatgcagcttccgagtatatatacatacatatgttatcactcaattaagacgatattaatttaacgattgattgcattaaacaaatgtatttttgtacactaaactgttgatcgaataaaaaaaactattacctctcgacgtgactaatcttttttgttactgagtcaattaaaatgatactctgttaagtatttgtattgagaaacctgttaatacaaaaaaataaataaatcgatatga

SEQ ID NO: 14904 - protein, 357 aa, DROSOPHILA
MVTATAIADLCIFLLTWNVGTHTPRNQDLSSLLSLNGTTTCPDNQLPDIYVIGFQEVSTTPQVLKIFNDDPWVLKIADSLSDHQFVKVDSKQLQGILITMFAQHKHIPHMKEIETEATRTGLGGLWGNKGAVSIRLSLYGTGVAFVCSHLAAHDEKLKERIEDYHQIVDNHKYNAQGYRRIFDHDFVFWFGDLNFRLSGDMSAWDVRTDVENQRYADLLKLDQLNLLREKGNAFSLLEEQQPNFAPTFKFVEGTNDYNLKRRPAWCDRILHRVQSNIYPGITLSANQLSYQSHMDYTLSDHKPVSATFNYKVEAANQTYTDEELHEMTHGSASSPATPNVSLSFAFVVFVAVSYTQL

SEQ ID NO: 14905 - DNA, 4277 bp, DROSOPHILA
tgatgacccaccacagcacgtatggcattcataactaccatgtccgacgatagggaatgctgctcctgggcctcctccagctcctgcagtgagtatcgcaaatctaccaggtgccgcaccaaccagcgacgctcctcgctgagttcctcgctcagcaggacgagatctctgcaatgggcgatggccgcctgcaaatcctggatattggcatcgctggtgaagattaggcgccattgctcgcgcaccaaggacgcgggaatgggcaacgccctgtactccgcaccttgtggaccactttcctcggagcctccggcctcggatccagatccagtggagccagagcctccaaggccaactgttgatcccagcgtggatgaggcgtgtaacaggttgctggcgctctcgttaatcaactgcgccaccgtgcccggaatgctcgtgagactgtccttccaggagctcatttttggggaagaacaacaaaacaagtctttgtgtgtttttttagcgaccagggatgcgagcaattggtgcagatgagcgaactagttatcgttcacggggcaaactgcaggtggttgtacgcatccctggaatgcaccttaatacagtgaaagaaaaaatgtgagggttaattatttataaatattttgaatttaacttttaatatttttaaaatatgatacaatttgaaaccatattctgaaatatgtcaagcgtggtttgcataaagcaaatatttttgttaccatattttaccatttaatattaaattgtaatttaagaaatctaacaatctattgtgtttattccagataaaaatgcctatttttaacttgaaaattcgtctgctaaaaactgtaggctttaaaactagtatcaataagccctttattctattgttccttctatttacatatattctgtaagtagaggaaaataactagaaaaccaaaaatatattttgaaaaattgaaaagagagtgacttgtgttgaatacgtttattgttcgatggtcacaaggtggactgacaagctgggtaaaaattgagttaaattacgatctctatggggtaagtggatgcagacaaagatataacaaggaaaacatatgtaatctatccaatatcgttggttcgttttggggttcgtattcgttgggtccaggatctagaccacattggtgtgctcgtcgcgatggaagatcttcacgtcgacgaacttgaagttgtggacatcgaagtagtagtcatgcttcaccggcctgttgaaggggaaaccgaagggcagggcgtccacgtagcgggaaccgtgtcccacgccgcagctgaccaccggatcgtagccagtgaactgggcaacctcgggctggtggtacgggtagaccatgtagaagaactggaacacctggccgcccttcttgccgcgcggcagcatcattcggttgggcacgccgcaatgggcctccgactgatccagcttgaacttgtagtcactgttggtggcgtccatcagcttctggtagagctccaggtaggtggtgcgatcgttcacccagaaggagaagtcaccgctggcgcgcttgatgtggttaacgcccgcctccagatgcaccttgaagtgctccagctcgaagaagttctggtagttgtgctccagtgggatctcgtgtccgtgctcatcgtacttgggtccaatgaagaccttcacaacggcatcctgagccttgtccgaggtcacgtccagggtgaactcgaagggcttgtggttgagacgctgctggcgggccttgatcacatagctggatcccttgtagtgggagttcctgccgaaggtgtacaacggatcggcggatccctcaacggcgggctccacattgacggcattgctgatgtccgagtcgaagtgctcgaagtaggtggtcagactttcgggcatgtggacggcatcgatgtggacaccctcgaaggcgtaatccttcttgtggtactccggataggtctccatcagatgccagtagtggctgacaatggtcttgtatacctcgtagaagatcggatcgcgcatagaggtgtcgtagtgcatgaaaaggccagggaagctctcgtcaccatggccataatggtggccctcgttcacaatgaagcggtacagcttgtcaagactgccgtagaacttcttgtccacgctgtccgcattgccctggatgatgttgcccagcacattgatggtctccacatcgaacttctcgttcttgtggatccagtccatgacacgctgcgtgtacatctccacatgctcgatgtgctcgtagttgtgctcgtggtagaagctgtggtgattctcccggtgccattggggtacgccgtagtaggtgcgcaggttactggcatagccggattcggttggcacatacatgttgaaagcgggcacctcgccgagatcgtgggacagacgctccaggtaccaacgggccagcaattgccagtggacatacaggtagagctcaccgcgacgatccttgttaaggacatgctcctcgccgcccttcgtccagaacggatagtccagattgaagtagtagtagaaggcattgaagccaacatcctccaggtagtaggccaaatcgtgatcgtagttcagggaaccgtgcacgttcgaatagttcgtacggatcaccacgttgtagatgttgtccatctgcttgacatgatggaagccgtgcattttgtagtgctcagcccattccagtgcctggctatcgaagtagctccatgggtggatctcgtagtgggccggcaggacgactccctgcatatcatcacggaacaaactggcaatggtcacggcgtacacgaacaactgcttgtttacgtgctggcgggcccagtagacgacgtgctggaaggtctcccagttcttggcgaagtagaagagacgcaccagacccaccacatactcctcgtgcttgtcgtacatcaccgaccacaccatgtcatcggtgaagggttggtgttgccacagctcgaagaagtgctccaacatctccgggtgcacatagtcggccacgtgctcccacggcttgtactccacgtagctgcccccgaagggcgtggtgaacacatcgtcctggtagatgtgctgcaggatctggtacatgaacttctgtttcatcagaaagtccttgtccgccaccttggagtccaggtgcttggcctggccgagagtagccagcaatgccactgcagctaacgcaatcaccgtgaacgacttcatcttctcgagtcgattcgaatcgtaacgctgcaatgatcggtagccagtatttatacccccggatcggcgatacgcagattgcaatccggccaatgaccggtcgcatccgtagccttgatccgcgccatcgccggatctgaacgacccgcgaagctctcaatcttagcgcccatgctgcatccataattgcaggtgataagaccgacgattaggcggccataccaagatcaatcctacatcattatctaaattcaagagtgagccactagaaactggtggttaggtgaagcagctggaagatccagttaagatttcctcgctccagagacaccttctccagctgtctaaataggagagtctaaaaaaaagaatgcccaaaatatcacgattacattgatactatttataagcaaacccacttgcattgtcaacttaaaaagttcataccacagcacattaaaaacgtgaattggtacacctattttgtcgccgtgtaatgactttcatttttccccatttttccatttcaaactgatgatcgtgcttttttcacacatatcaacaacaggtgtttgacgggcccccttgattaacctatttcaaatagtgattaagattacatggccacctgatctcctgtcaattgaggtgttaccaggcggcttccttgataagtttgctttgttcgccgcatcgattctttatcaatgctaaaaatattccgaattgcaaaacacggagcatcatgttgctgcgacaacaaatcccggacaacaaagaacaatggaccatcgaatgatccgcaggtcaatggagaacatatcaatcaatcagacccatttcagtcctcggtttttatactgctattaaatgtccttcaaaataaaaatatatatgattacaggataggaaattatgacgttctatgcaaatgcatatgatctcattagtatatctatacgtacatatctttattttagtttacacagaatctacaaaa

SEQ ID NO: 14906 - DNA, 2277 bp, DROSOPHILA
atgaagtcgttcacggtgattgcgttagctgcagtggcattgctggctactctcggccaggccaagcacctggactccaaggtggcggacaaggactttctgatgaaacagaagttcatgtaccagatcctgcagcacatctaccaggacgatgtgttcaccacgcccttcgggggcagctacgtggagtacaagccgtgggagcacgtggccgactatgtgcacccggagatgttggagcacttcttcgagctgtggcaacaccaacccttcaccgatgacatggtgtggtcggtgatgtacgacaagcacgaggagtatgtggtgggtctggtgcgtctcttctacttcgccaagaactgggagaccttccagcacgtcgtctactgggcccgccagcacgtaaacaagcagttgttcgtgtacgccgtgaccattgccagtttgttccgtgatgatatgcagggagtcgtcctgccggcccactacgagatccacccatggagctacttcgatagccaggcactggaatgggctgagcactacaaaatgcacggcttccatcatgtcaagcagatggacaacatctacaacgtggtgatccgtacgaactattcgaacgtgcacggttccctgaactacgatcacgatttggcctactacctggaggatgttggcttcaatgccttctactactacttcaatctggactatccgttctggacgaagggcggcgaggagcatgtccttaacaaggatcgtcgcggtgagctctacctgtatgtccactggcaattgctggcccgttggtacctggagcgtctgtcccacgatctcggcgaggtgcccgctttcaacatgtatgtgccaaccgaatccggctatgccagtaacctgcgcacctactacggcgtaccccaatggcaccgggagaatcaccacagcttctaccacgagcacaactacgagcacatcgagcatgtggagatgtacacgcagcgtgtcatggactggatccacaagaacgagaagttcgatgtggagaccatcaatgtgctgggcaacatcatccagggcaatgcggacagcgtggacaagaagttctacggcagtcttgacaagctgtaccgcttcattgtgaacgagggccaccattatggccatggtgacgagagcttccctggccttttcatgcactacgacacctctatgcgcgatccgatcttctacgaggtatacaagaccattgtcagccactactggcatctgatggagacctatccggagtaccacaagaaggattacgccttcgagggtgtccacatcgatgccgtccacatgcccgaaagtctgaccacctacttcgagcacttcgactcggacatcagcaatgccgtcaatgtggagcccgccgttgagggatccgccgatccgttgtacaccttcggcaggaactcccactacaagggatccagctatgtgatcaaggcccgccagcagcgtctcaaccacaagcccttcgagttcaccctggacgtgacctcggacaaggctcaggatgccgttgtgaaggtcttcattggacccaagtacgatgagcacggacacgagatcccactggagcacaactaccagaacttcttcgagctggagcacttcaaggtgcatctggaggcgggcgttaaccacatcaagcgcgccagcggtgacttctccttctgggtgaacgatcgcaccacctacctggagctctaccagaagctgatggacgccaccaacagtgactacaagttcaagctggatcagtcggaggcccattgcggcgtgcccaaccgaatgatgctgccgcgcggcaagaagggcggccaggtgttccagttcttctacatggtctacccgtaccaccagcccgaggttgcccagttcactggctacgatccggtggtcagctgcggcgtgggacacggttcccgctacgtggacgccctgcccttcggtttccccttcaacaggccggtgaagcatgactactacttcgatgtccacaacttcaagttcgtcgacgtgaagatcttccatcgcgacgagcacaccaatgtggtctagatcctggacccaacgaatacgaaccccaaaacgaaccaacgatattggatagattacatatgttttccttgttatatctttgtctgcatccacttaccccatagagatcgtaatttaactcaatttttacccagcttgtcagtccaccttgtgaccatcgaacaataaacg

SEQ ID NO: 14907 - protein, 701 aa, DROSOPHILA
MKSFTVIALAAVALLATLGQAKHLDSKVADKDFLMKQKFMYQILQHIYQDDVFTTPFGGSYVEYKPWEHVADYVHPEMLEHFFELWQHQPFTDDMVWSVMYDKHEEYVVGLVRLFYFAKNWETFQHVVYWARQHVNKQLFVYAVTIASLFRDDMQGVVLPAHYEIHPWSYFDSQALEWAEHYKMHGFHHVKQMDNIYNVVIRTNYSNVHGSLNYDHDLAYYLEDVGFNAFYYYFNLDYPFWTKGGEEHVLNKDRRGELYLYVHWQLLARWYLERLSHDLGEVPAFNMYVPTESGYASNLRTYYGVPQWHRENHHSFYHEHNYEHIEHVEMYTQRVMDWIHKNEKFDVETINVLGNIIQGNADSVDKKFYGSLDKLYRFIVNEGHHYGHGDESFPGLFMHYDTSMRDPIFYEVYKTIVSHYWHLMETYPEYHKKDYAFEGVHIDAVHMPESLTTYFEHFDSDISNAVNVEPAVEGSADPLYTFGRNSHYKGSSYVIKARQQRLNHKPFEFTLDVTSDKAQDAVVKVFIGPKYDEHGHEIPLEHNYQNFFELEHFKVHLEAGVNHIKRASGDFSFWVNDRTTYLELYQKLMDATNSDYKFKLDQSEAHCGVPNRMMLPRGKKGGQVFQFFYMVYPYHQPEVAQFTGYDPVVSCGVGHGSRYVDALPFGFPFNRPVKHDYYFDVHNFKFVDVKIFHRDEHTNVV

SEQ ID NO: 14908 - DNA, 2547 bp, DROSOPHILA
aggttctgagcctaaaggctcagatgaatggtgcgagcagtaggtccggaaagggtgatgaagtggaggtgggtttcttttttttaagctaatattttatatattttgcaaacaatgggccttgtcaatttccagtcactggacatcgaaaccagtcttgccaagattaacttcctgaactcaattattgctgacatgcagcagaagaatgatgcactcaaggcaaaggtgcagacccttgaaaccttgccaatggatttcaccaagtgagttaaattctttttcatctcggtcgaagcattttcgttcataaatgtatataatatatttaagacctcatgccttcgatgccctgacaaagcggaaaccggctcccagacttttctgcgacatctgcgatgagtttgatcagcacgatacggaggattgtccaatccagggaagcgaagatcaagactactccacaccgtcatccgagtccaacaacaacgagaaggagcggaagctgccggcacccaggaaatactgtgattcctgcgagggtgagtaaaataaaatatcaaattttactgacatttaacaatgtttttcccaattacagtttttggccacgatacgagcgaatgtgccgatgatgaaacctattagttagctctagttaaattctattatttccattttactttgttttagactctatagcataaccatattgcgagatctatcagatgagatacttttacctcagcagagcttcactcaatcacacaaagaaatttctctacttaaaattgtgatcttgcgttatgcacacatccatggatagtagtctattttaaattgtttttatttattgaatgcgattcgtggcaaacacacaatcggttgttttcgtaatttttgagtgtaaacatagtgtaaaaaataaaatcaagaacgtggaagaagaagcttttattgggttttcataagactaaggaattaattggtaattatatgattaatcgccgccctccttcttctccttgatggcgtcctgaaatcagagaaacatggatattaaagaaatgtttcgaggacgttttgtgcaggtaatactttgaaacgctcttcgaagagagataattctgctagaagatcggttatggcgttcatgaatgcttcctgcggagaataatcggccgtagtctggatgcggatgacgaacttgtgctccagaggatgcggaaccttgtagccggcaaacagaacattgggatccttcagcagttggctgcaggcaagaatgcaaatttaatgtgtaatcagacgggcttgttggccaacatacttgcggatcatgttgcccagcgtgtgatcctctttgtttatggtgaatatagccgcattggtcactttggtgtccagttccttgatgattctgcagccgcgccataacaaacataaaaacgggttaaaggtggtcattcggagtagtctgttttctttactcactttttctcgccttcatagagcagaaatgactcaaaggtaggtggtgcgttcattttgatgtcttacttttcgttagttactgcaaaacttataaattgtttattaaaatcagcagcacgctcagcaaaattctccggtacagtgttgactaacgcccaagtgcaacacaagctaaagtagctatatctagcaaaaagtagctagaacgcctagctaatttattttagtattttataaatcatttttaatgtgagcatctattaaataaaataaaacttgtactttgaatttgaaaataatttaatttgcttatgttttttggtcattaaataaatagcttaatcacttcttgcaaccaacactggcagccgatacctatcgcatagacaagctgttgtgggccatccctaggtttcggtggttgaattatttgcaaatttttatccaatcgcgccaaacgctgcgcattccgccactttcgagaaactgacacgaagccaagctaaaaatacattattaaacagctgacatgagcgagtcgaatgccacagatggtgtccacgaggttgaggagtccaatccgctggagcagtcgaccattacgatgctagatgtcctggaacaggaaaaggagctggaggacgagtacgccgcagtgctgggcgcctccgatgagaagtcgtgcacttacgccaagggccccatcggccgacaggctctgtactcgtgcctcacttgttgccccgaggcgcgcgaggatctggacaaggccgcaggagtctgcttggcctgctcctatcgctgtcacgagcaccacgaactggtggagctctatactaagcggaatttccgctgcgattgtcccacccagcgtctgggcaagtgctccctgaacccacaagtcgagggcgttcaaccacgtaacgtgggcaatctgtataaccagaacttccaggggctgtactgcaagtgcaagcgaccctatcccgatcccgatcgcaccgttgaggaggttatgctgcagtgcgccatctgcgaggactggttccactt

SEQ ID NO: 14909 - DNA, 354 bp, DROSOPHILA
atgaacgcaccacctacctttgagtcatttctgctctatgaaggcgagaaaaaaatcatcaaggaactggacaccaaagtgaccaatgcggctatattcaccataaacaaagaggatcacacgctgggcaacatgatccgcaaccaactgctgaaggatcccaatgttctgtttgccggctacaaggttccgcatcctctggagcacaagttcgtcatccgcatccagactacggccgattattctccgcaggaagcattcatgaacgccataaccgatcttctagcagaattatctctcttcgaagagcgtttcaaagacgccatcaaggagaagaaggagggcggcgattaa

SEQ ID NO: 14910 - protein, 117 aa, DROSOPHILA
MNAPPTFESFLLYEGEKKIIKELDTKVTNAAIFTINKEDHTLGNMIRNQLLKDPNVLFAGYKVPHPLEHKFVIRIQTTADYSPQEAFMNAITDLLAELSLFEERFKDAIKEKKEGGD

SEQ ID NO: 14911 - DNA, 3003 bp, DROSOPHILA
ggaaagggggaaccagccaaagtgcaaggaagaggagaagttcatgtgcatcctgtgcggaaacgtcttttacaagaaatctgttttcacggcccacatgatgacccattcagagtacaagccccaccaatgcgagtaagtgatattaaggtttaggaaggaacaaatttatcctacaaaaatgttattgctttcagaatatgcaataaatcttttcgacaaatgggcgaattgcgagcacacatccgtcgtcatacgggcgaccgtccatacaagtgtatgtactgcgaccgccacttctacgatcgcagcgaacgggtccgccatgaacgggtccacaccaacacgcgtccttatgcctgccaggagtgcgggaaaacttttacgcacacagccatcctcaaaaatcacatcctttcgcactccgcccaaaagaattacaagtaagggagagtaatcctttctagtgatttgcactttttattaataatttgaacttttcagctgtggtatctgttgcaagtcattcactctgctgcaccagctgaaagctcacctgcaaacgctaacccaccgcaacaaaatggagcaaaccattcccagctctccggaaatgttagagagctaatatagtaaattaattgaggaactagggttatctattataagtagtataaagccacttttccagaatagaccagctatttttattaactattctaccacgtcgctgtactccttagctatcagacggtgcgcaagagacttctcgtgcgctgtaagttggtgcttaagccgaaattcttttttacacataagacacttgtgagacttttcagacgaatgcaggtagtagtgagcgttacgagaggaggacagagagaatgtttttccacatatgttgcaagcatagggtctttcattcgtgtgcaaactgaaatgaagaaattcaacattggaacttaaatgctgtacacaatatatatagtttttgtccattctaccgttcgtgcttgcgatgagtgctgttgtcggcaaaacggcgcgaacagtagcaacattggtaaggtttctcgcccgtgtgcgtccgcatgtgtgttttcaggttgcaggcggctctgaatgtcttttggcaaaccctgaatcatacattttatatatgaaatattatgttaagatatatcacggatacttactcgcactggtggtccttttccttgcggtgcacctgcgagtgtgcatttagctgagataagcagcggtatgtattgctgcagatcttgcatctgtacttgtccggctcgcaggccactcctagatctatcacgtagtcggcacttggctctagattatggtaatcctcgcttgtctcttgaatactgtccgtagcagcgctgctttcttgcgaatacgtttcggagtaattttgatcggagatctccctgtccaaatccatatcactgatggtatagtcctcctggtgtatgtctttctcgttttccgcattcacgttgagatcgaacacgaaatcgcttgaaaatttatttatgggtaagatttcatcatctttggtcgtttccaatgcattctcttgagtcttaaagttaataggattctcttcgatgagtctccccgaaatgttctgcttcctggcgcgttttttctgttcaagctggtccttatcctccagcgtctcaaatgccgatgcggaggacagagtttgacgaacgaggcttctcaggtgcgcgtcggattgtttgcacgcgctaagaaatctgtccacctcctccagttgcatcaagcagactgtgcaaatttgatccggcagtccatcatccggtttcacctaggagagaggatttgtaactggtaaactggaagccaaacagaaatcgagtactcacagatgtgccggcatacgagatcaacagcttgtgggcattggactcgaagagcgactgcagcgtggattgcgttccttttttgcggcaagtgcggcacatgctccatttaatgctgatttccatcgttatttccgcaggaagtccctctttcgcgtcaaatgccgattcaaatgccagagcagtgaattaaaagtaaaagggttgtcaggtacgcggaattagtaacagttttcaactatcattccaaatttttttgcatttagttctaaaactgtatttttattgcgtgactcaagcttaaatatttaatagggcccacctgttagtttaaaaaaaaaaattaagatttaattattatcaattattcaatcgatatgccgatagcaagttcgatagccatttatcgttttgcgtacatgacaaccctgggaaaagttccaagacgcttgtttatttcagaattgcaagcatacgtacgtccaggacgtgcaagataatgcccgagtacatgttgtgccgaatctgcttgacagaggacatcaactcggaggcgatggcgcccctgttcgatgacaacgacgcccagtgccgggagctggtgcgcaagattgaagaagtgggcagcataaaggtacatgtggatgcaaatgtaaaatcctgcgacttaacccactctgtgctttcagctggtgccgctgcagaacatccccagtatgttgtgctacagctgcgtggagcgactgaccagtgcccacaagttccgggagctttgccaggagagcgagcgcacatttgccaccaatgtagtcaaggtacgtatagagttgatgggccacatataaacatcccacttgacccggtaccatgtcaggccgagatgaagtcggagccaacggacgaggtgccgcacgtagtggctgacaacattgagtacatctacgaatcggccaacgacttcatcgacggtgtcgaggatgacatcggaatggagaacatcatggaggagcccctggaggatggtgtcggggaaacgtcgcaggcctacgagactagcactgtagtggacgacctggacgaggatgacttgctggtgccgaat

SEQ ID NO: 14912 - DNA, 888 bp, DROSOPHILA
atgtgccgcacttgccgcaaaaaaggaacgcaatccacgctgcagtcgctcttcgagtccaatgcccacaagctgttgatctcgtatgccggcacatctgtgaaaccggatgatggactgccggatcaaatttgcacagtctgcttgatgcaactggaggaggtggacagatttcttagcgcgtgcaaacaatccgacgcgcacctgagaagcctcgttcgtcaaactctgtcctccgcatcggcatttgagacgctggaggataaggaccagcttgaacagaaaaaacgcgccaggaagcagaacatttcggggagactcatcgaagagaatcctattaactttaagactcaagagaatgcattggaaacgaccaaagatgatgaaatcttacccataaataaattttcaagcgatttcgtgttcgatctcaacgtgaatgcggaaaacgagaaagacatacaccaggaggactataccatcagtgatatggatttggacagggagatctccgatcaaaattactccgaaacgtattcgcaagaaagcagcgctgctacggacagtattcaagagacaagcgaggattaccataatctagagccaagtgccgactacgtgatagatctaggagtggcctgcgagccggacaagtacagatgcaagatctgcagcaatacataccgctgcttatctcagctaaatgcacactcgcaggtgcaccgcaaggaaaaggaccaccagtgcgaggtttgccaaaagacattcagagccgcctgcaacctgaaaacacacatgcggacgcacacgggcgagaaaccttaccaatgttgctactgttcgcgccgttttgccgacaacagcactcatcgcaagcacgaacggtag

SEQ ID NO: 14913 - protein, 295 aa, DROSOPHILA
MCRTCRKKGTQSTLQSLFESNAHKLLISYAGTSVKPDDGLPDQICTVCLMQLEEVDRFLSACKQSDAHLRSLVRQTLSSASAFETLEDKDQLEQKKRARKQNISGRLIEENPINFKTQENALETTKDDEILPINKFSSDFVFDLNVNAENEKDIHQEDYTISDMDLDREISDQNYSETYSQESSAATDSIQETSEDYHNLEPSADYVIDLGVACEPDKYRCKICSNTYRCLSQLNAHSQVHRKEKDHQCEVCQKTFRAACNLKTHMRTHTGEKPYQCCYCSRRFADNSTHRKHER

SEQ ID NO: 14914 - DNA, 7614 bp, DROSOPHILA
atattgaaaattaagtgttcaaagattttatctaatttttagacagatgtatgtttgtacaaaatattttttaaattcgcatatgtgcaaatgttttgagtttgtgcatgtgtgtgcgcaataagacagttagaatttatgcgacgtcgactgcaacagttggccatgaccaacagagcgagatggcgaatgcgtgatcggcatttgtaattgcacacactcctgtaattgcacaaacaacacatgcatgcacatacaaatatacaaatgcaattacacactcgcaaagggccaagaaaaacacgcacacccacgccacaaagcaaaaacatacatatacacacacacacacacacacacacactactcactcacatcgacaaaaagccttgatcttgatcgaagtaacaacttacagtaacagtgttgttggttttcttgcttgcctttttcgctgcacttgttttgttttaaagccaagacggctttttcagcggctaaccttgtctttgcccgttttgtctttgcacttgcacttgcaattggcgaatcgcaattgattaaaaaaaggccacttaatttaacgtttaacaaatccgttcgctcagcaaatgaacgtcaacaaaaatgatcttcgtaagaatatccgagagagggcgctttcagctttggtttgaaaacagcagaaaaataaagccgttaaaattgaatttaacagattttaataaatagttttaacttaatggttcagcacattttaaatgtaactgttaatatgcatagccctgttttaatttttaatttcaagttaataacttttattcacatcatactcagatagtatattttagtgtactcttttgagataatttcatcacttgttgattcgtcgttggcaactctgcacccacgactacagttagaattagaatgacacacacccatggaattgaagaatgtaaggaagaaagggagtgtgatcgaaagtccgttcctttttacagttacatagcaatcgtccgagcgaacggacagacaaatttctgagaatcgcacttctttgcttctctcattttcggtgattttccgttgcttttttattgtgtgtgcactcgaaagttctattaggttccacagggtttttatacatatgattaattcgtatttaaagtaactttgtgcacctgatgctaatttaattttcttctcctttcttgcagaaaactttgccgccgagttgctgcagcgtttgacaccaaacactgccaccactgcacaaaataatattgttaacaatttggttaataatagcagagccgccacctccgttttagccactaaagactgtacaattgaaaattccccaattagcataccaaaaaatcagcgagcagaggacgaggaggagcaagaagaccaggaaaaagagaagcccgcagagcgggagagagagaagtccgatgagaggacagaacaggtagaaaaggaggagcgggtggagcgcgaagaggaggaggacgacgaggtggatgtcggcgtagaggcgccacgcccacgattctataataccggcgtggtcttaacccaggcccaacgcaaggagtatccccaagagcccaaggacttatccctaaccatcgccaaatcctcgccagcttcaccgcatatccacagtgactccgaatccgattcggactctgatgggggctgcaagctaattgtggacgagaagccaccattgccggtgatcaaaccattgtccctgcgcttgcgcagcacaccgccaccggcggatcaacgaccaagtccgccgcctccgcgagatcccgcgcccgctgtccgctgctcggtgatccaacgggcgccgcaatcccaattgcccaccagccgggctggcttcctattgccccccttggatcagctaggacccgagcagcaggagcccatcgattatcacgtgccgaagcgaaggagcccctcttatgactccgatgaggagctgaacgccaggcgcctggaacgagcgcggcaggtgcgcgaggcaagacgacgcagcaccattttggccgcacgagttctgctcgcccagtcccaaaggcttaatccgcgcttggtgcgatccttgcccggtattttggctgcggcagccggacacggacggaatagcagcagttccagcggtgccgccgggcagggctttcaatcgtccggttttggcagccaaaacagcggcagcggctcgtccagtggcaatcagaacgccggcagcggcgctggttcacctggatctggtgccggtggcggtggtggtatgggcggtggtcgcgacggccgagggaactacggacccaattcaccgccaacgggagcattgcctccgttttatgagagcctcaagagcggccaacagagcacggccagcaacaatacgggccaaagtcccggcgctaatcattcgcatttcaacgcaaatccagcgaattttctgcaaaacgcagcagcggctgcgtacatcatgtcggcaggttccggtggaggaggctgcaccggaaacggaggtggtggagcatcggggccaggaggtggcccatcggcaaatagtggtggtggtggtggtggtggcggcggcaatgggtacatcaactgtggtggtgttggtggtccaaacaatagtctcgacggtaataatctattgaacttcgccagtgtttctaactataacgaatccaattccaaattccataatcatcatcatcatcatcaacacaacaacaacaacaacaacaatggtggtcaaacatctatgatgggtcatcccttttacggcggtaatccctcagcctacggcataatactcaaggatgaaccggacattgagtacgacgaggccaagatcgatattggcacctttgcgcagaacattatccaggcaacgatgggcagctccggtcagttcaatgccagcgcctatgaggatgctataatgtcggacctggccagttcgggtcagtgtcccaatggagccgtcgatccgcttcagttcacagccactctgatgctgagttcgcagaccgatcatttactggagcagctgtccgatgccgtggacttgagttcattcctgcaaaggagctgcgtggacgacgaggagtccaccagtccgcggcaggatttcgagctggtgtccacgccctcgctaacgccggattcagtgacgccggtggagcagcacaataccaatacaacccagctggatgtcctgcacgagaatctgttgacgcagctgacccacaatatagtccggggcggcagcaatcagcagcagcagcaccatcaacagcatggtgtgcagcagcaacagcagcagcagcatagtgtgcagcagcaacagcagcacaatgtgcaacagcagcatggcgtgcagcagcaacatgtccagcagcaaccaccgccctcgtatcagcatgccacgcgtggcctgatgatgcaacagcagccgcagcacggcggctatcagcagcaagctgccatcatgtcgcaacagcagcagcaattgctcagccagcagcagcagcagtcgcaccaccagcagcagcagcagcagcaacatgccgctgcctaccagcagcacaacatctatgcacagcagcaacagcagcagcagcagcagcatcatcaacagcagcaacagcagcaacatcatcacttccaccaccagcaacaacagcagccacagccacagtcgcatcattcgcaccatcatggccatggtcatgacaacagcaacatgtcgcttccctcgccaactgcggctgcagcggcggcggccgctgctgctgctgctgcggcagccgcagccgctcatctgcagcgtccgatgagcagcagcagcagctccggcggcaccaatagcagcaacagtagcggtggcagcagcaacagtccgctcctagatgcaaacgctgctgcggcagctgcagctgctttgttggacacaaagccactcatccaaagcgtaagtaatccaattggtcagccactaaatacgcaatcacagcagcaaaagcagggacaacaaatcacattgatgaagaccactaggtacacggaattcgtcgagatggtgtccatggacgtgacggtcaagccagagctctttagcgagctcaagccagaaatgaccgagatcaccgccgaggagttgactttggaagcagagacaacagcagcagcggcggcagcagcagcagcagcagcagctgcaacaacaacatcagcaacagagggaactcaggttctggcagcagcgccggcaccattgtcatccggcagaaagctgcgtggacgcgccaaggctgtagcctatggctccacaatgattacgctgatatccacgctgaaatcgtcgccagaagtgccggccaccaagacggtgcaccgcaccactttgcgatctttggctacggcggcagcggccactgcagccggtttgctggcgccatcgcccaccgtttccgttttgaatgagagcaaagtcttgcagcggcgcgtaagtgcggaagatgagtcggaaactggacagctgtgggcctccaagagattagctatcatttgcgtttcaatggactgcggttatcgatggcgcttaccacgaaacattaggttccagtccattgaaaagttttagtgttaatttactggattaaagaagcttggagcttggagcttggagtttaccgacgattctttctaggaactaacccgcttatgtgtcttctatctatagttgtctgtagtttgtgcttgtctgtgattgtcttagatttgttaactccttcaatatgtttaacccattgtgtgtaatcataattaatgaacgttcgttctatgcatttttcaacagttgggcttgccgccggatctgcagcttgagtttgtgaacggcggccatggcattaagaacccgctggccgtggagaatgcccacggtggccatcaccgaattcgcaacatcgattgcattgatgatctcagcaagcatggccaccactcgcagcaccaacagcagcagggctcgccgcagcagcaaaatatgcaacaatcggtgcaacagcagtcggtgcaacagcagcaatccctgcagcagcaacagcagcagcagcaccatcagcaccacagtaacagcagtgcaagcagcaatgccagcagtcatggatccgccgaagccctttgcatgggctcatccggcggagccaatgaggattcgtcgtcgggcaacaataagttcgtctgccgcgtctgcatgaagacattctcgctgcagcgcctgctcaatcggcacatgaagtgtcactcggacatcaagcggtatctgtgcacgttctgcggcaagggattcaacgacaccttcgacctcaagcgccacacgcgcacccacacgggcgtccggccgtacaagtgcaatctctgcgagaagagcttcacgcagcgctgttccctcgagtcgcactgccagaaggtgcatagcgttcagcaccagtatgcctacaaggagcgcagagccaagctgagcatggcttttcacattcccaggagtactgccaaatgggagatgtatggttctatctgtaatcggcgttcccttccctttttttttttcacagatgtacgtgtgcgaggagtgcggacacaccacctgcgagccggaggtccactatctgcacctgaagaacaaccatccgttctcgccggcgctgcttaagttctacgacaagcggcactttaagttcaccaactcgcagttcgccaacaatctgctcggccagctgcccatgccagtccacaattagttgatggattttagttatatagaataggaaccattcgatcgattcgaatcattcgaataactcgaatcactcgaatcactcgaatcacttaagcaaaccaacattgtgactttgaagttttttgaaaactgcccccccctccttttgcggaggatacggaattattggagattatgcttattatgtatatttttgcgtagtcctaagaaaattagttactagttactagctgaattagtacccactgtatcatgctaccccacttcactttgctgtgcaaatctctctcacttgagaaaactcgagttcccttttctttattgttaatcttgaattttcgtttatttcaagtatggatctttcgaaaaaaaaaactcgttgttagtcaaaaagaaaggtatcgttaggacgtaagaaatgtttgaaaatgctttgagcaacactcacacaaattatgaatgatcgcgtatacatatattagaagaaaatatatattaaatatttagctttaagatgttaagagctaccaaccgaacaagctgcaaacgttggcatttatttgtcttcaacaaaacagaacacaaatcaaaaaacaaaaacttcgaaaaaaaagaaaaaaaaaaacagaacgcgtagagcaatgagcgcggttcggataacatatgttatatacatacacaccaccaaccatacgcattaatatatttattacttaatcacaaaaccacattgcaaagaggcaaatcattcgaataaactaggctaggatccttaaaataaactaaagctgttcataaatgaagtcaaagcccaacaaaaaatccaacgtgttttggaaaatcgaatcgcgagaatatgatctactgaatatatagtttgcaataatcttagcttttaggcaataccaccaattgtactgatctttaatgaacaaacaaaatactaaacacaacataaacataaacataacataaataacattatgtatctgatggtataatttctaagacctaggtgtaatgaactttgaatttggattcgaatttgagtttgaatttgtttacgattgcagggaaactacgatttccaattcgtaacattaaactgcattattatttctgttttagcatagcgcttttttttttcttttaatttgttgtaagcaacaacgggttttttgtgcaatcgcttggtgttggttaaatggaaaataaggatgaaatgacatgacaaatctaatttaagcatcgtactttaaggtttatgcgggggctgtccattgtggcgccacgcccaccgcccgctgtgcagcccccgtggaaaatggaggagacgtcgaatgaacgagggagcaaatcgaagcttggcaatgaacgagtccttgtttccatatcctccctcaactaacttagttcttaactagaaaactttcactcacacacataactacacacatatataaatatcagttctgcacacaaaaacacacacacacacacacaacgcacaccttaatatatgtacttaaattaagttagttagtttaggcaatatcttgaacttgaaaacggatggcagcagaaaatttgatcaatgaaaatctgagacttccatgaaaaattccaaattttttttcattatcatatttatcgaattttgtgcggaaatgaacgaggaattacaaattattacaaatatattaaatatataacgaaaattgaacggaaggcaaaaaagcttagtttataaaatgatacagtttttt

SEQ ID NO: 14915 - DNA, 5021 bp, DROSOPHILA
acagttacatagcaatcgtccgagcgaacggacagacaaatttctgagaatcgcacttctttgcttctctcattttcgaaaactttgccgccgagttgctgcagcgtttgacaccaaacactgccaccactgcacaaaataatattgttaacaatttggttaataatagcagagccgccacctccgttttagccactaaagactgtacaattgaaaattccccaattagcataccaaaaaatcagcgagcagaggacgaggaggagcaagaagaccaggaaaaagagaagcccgcagagcgggagagagagaagtccgatgagaggacagaacaggtagaaaaggaggagcgggtggagcgcgaagaggaggaggacgacgaggtggatgtcggcgtagaggcgccacgcccacgattctataataccggcgtggtcttaacccaggcccaacgcaaggagtatccccaagagcccaaggacttatccctaaccatcgccaaatcctcgccagcttcaccgcatatccacagtgactccgaatccgattcggactctgatgggggctgcaagctaattgtggacgagaagccaccattgccggtgatcaaaccattgtccctgcgcttgcgcagcacaccgccaccggcggatcaacgaccaagtccgccgcctccgcgagatcccgcgcccgctgtccgctgctcggtgatccaacgggcgccgcaatcccaattgcccaccagccgggctggcttcctattgccccccttggatcagctaggacccgagcagcaggagcccatcgattatcacgtgccgaagcgaaggagcccctcttatgactccgatgaggagctgaacgccaggcgcctggaacgagcgcggcaggtgcgcgaggcaagacgacgcagcaccattttggccgcacgagttctgctcgcccagtcccaaaggcttaatccgcgcttggtgcgatccttgcccggtattttggctgcggcagccggacacggacggaatagcagcagttccagcggtgccgccgggcagggctttcaatcgtccggttttggcagccaaaacagcggcagcggctcgtccagtggcaatcagaacgccggcagcggcgctggttcacctggatctggtgccggtggcggtggtggtatgggcggtggtcgcgacggccgagggaactacggacccaattcaccgccaacgggagcattgcctccgttttatgagagcctcaagagcggccaacagagcacggccagcaacaatacgggccaaagtcccggcgctaatcattcgcatttcaacgcaaatccagcgaattttctgcaaaacgcagcagcggctgcgtacatcatgtcggcaggttccggtggaggaggctgcaccggaaacggaggtggtggagcatcggggccaggaggtggcccatcggcaaatagtggtggtggtggtggtggtggcggcggcaatgggtacatcaactgtggtggtgttggtggtccaaacaatagtctcgacggtaataatctattgaacttcgccagtgtttctaactataacgaatccaattccaaattccataatcatcatcatcatcatcaacacaacaacaacaacaacaacaatggtggtcaaacatctatgatgggtcatcccttttacggcggtaatccctcagcctacggcataatactcaaggatgaaccggacattgagtacgacgaggccaagatcgatattggcacctttgcgcagaacattatccaggcaacgatgggcagctccggtcagttcaatgccagcgcctatgaggatgctataatgtcggacctggccagttcgggtcagtgtcccaatggagccgtcgatccgcttcagttcacagccactctgatgctgagttcgcagaccgatcatttactggagcagctgtccgatgccgtggacttgagttcattcctgcaaaggagctgcgtggacgacgaggagtccaccagtccgcggcaggatttcgagctggtgtccacgccctcgctaacgccggattcagtgacgccggtggagcagcacaataccaatacaacccagctggatgtcctgcacgagaatctgttgacgcagctgacccacaatatagtccggggcggcagcaatcagcagcagcagcaccatcaacagcatggtgtgcagcagcaacagcagcagcagcatagtgtgcagcagcaacagcagcacaatgtgcaacagcagcatggcgtgcagcagcaacatgtccagcagcaaccaccgccctcgtatcagcatgccacgcgtggcctgatgatgcaacagcagccgcagcacggcggctatcagcagcaagctgccatcatgtcgcaacagcagcagcaattgctcagccagcagcagcagcagtcgcaccaccagcagcagcagcagcagcaacatgccgctgcctaccagcagcacaacatctatgcacagcagcaacagcagcagcagcagcagcatcatcaacagcagcaacagcagcaacatcatcacttccaccaccagcaacaacagcagccacagccacagtcgcatcattcgcaccatcatggccatggtcatgacaacagcaacatgtcgcttccctcgccaactgcggctgcagcggcggcggccgctgctgctgctgctgcggcagccgcagccgctcatctgcagcgtccgatgagcagcagcagcagctccggcggcaccaatagcagcaacagtagcggtggcagcagcaacagtccgctcctagatgcaaacgctgctgcggcagctgcagctgctttgttggacacaaagccactcatccaaagcgtaagtaatccaattggtcagccactaaatacgcaatcacagcagcaaaagcagggacaacaaatcacattgatgaagaccactaggtacacggaattcgtcgagatggtgtccatggacgtgacggtcaagccagagctctttagcgagctcaagccagaaatgaccgagatcaccgccgaggagttgactttggaagcagagacaacagcagcagcggcggcagcagcagcagcagcagcagctgcaacaacaacatcagcaacagagggaactcaggttctggcagcagcgccggcaccattgtcatccggcagaaagctgcgtggacgcgccaaggctgtagcctatggctccacaatgattacgctgatatccacgctgaaatcgtcgccagaagtgccggccaccaagacggtgcaccgcaccactttgcgatctttggctacggcggcagcggccactgcagccggtttgctggcgccatcgcccaccgtttccgttttgaatgagagcaaagtcttgcagcggcgcttgggcttgccgccggatctgcagcttgagtttgtgaacggcggccatggcattaagaacccgctggccgtggagaatgcccacggtggccatcaccgaattcgcaacatcgattgcattgatgatctcagcaagcatggccaccactcgcagcaccaacagcagcagggctcgccgcagcagcaaaatatgcaacaatcggtgcaacagcagtcggtgcaacagcagcaatccctgcagcagcaacagcagcagcagcaccatcagcaccacagtaacagcagtgcaagcagcaatgccagcagtcatggatccgccgaagccctttgcatgggctcatccggcggagccaatgaggattcgtcgtcgggcaacaataagttcgtctgccgcgtctgcatgaagacattctcgctgcagcgcctgctcaatcggcacatgaagtgtcactcggacatcaagcggtatctgtgcacgttctgcggcaagggattcaacgacaccttcgacctcaagcgccacacgcgcacccacacgggcgtccggccgtacaagtgcaatctctgcgagaagagcttcacgcagcgctgttccctcgagtcgcactgccagaaggtgcatagcgttcagcaccagtatgcctacaaggagcgcagagccaagatgtacgtgtgcgaggagtgcggacacaccacctgcgagccggaggtccactatctgcacctgaagaacaaccatccgttctcgccggcgctgcttaagttctacgacaagcggcactttaagttcaccaactcgcagttcgccaacaatctgctcggccagctgcccatgccagtccacaattagttgatggattttagttatatagaataggaaccattcgatcgattcgaatcattcgaataactcgaatcactcgaatcactcgaatcacttaagcaaaccaacattgtgactttgaagttttttgaaaactgcccccccctccttttgcggaggatacggaattattggagattatgcttattatgtatatttttgcgtagtcctaagaaaattagttactagttactagctgaattagtacccactgtatcatgctaccccacttcactttgctgtgcaaatctctctcacttgagaaaactcgagttcccttttctttattgttaatcttgaattttcgtttatttcaagtatggatctttcgaaaaaaaaaactcgttgttagtcaaaaagaaaggtatcgttaggacgtaagaaatgtttgaaaatgctttgagcaacactcacacaaattatgaatgatcgcgtatacatatattagaagaaaatatatattaaatatttagctttaagatgttaagagctaccaaccgaacaagctgcaaacgttggcatttatttgtcttcaacaaaacagaacacaaatcaaaaaacaaaaacttcgaaaaaaaagaaaaaaaaaaacagaacgcgtagagcaatgagcgcggttcggataacatatgttatatacatacacaccaccaaccatacgcattaatatatttattacttaatcacaaaaccacattgcaaagaggcaaatcattcgaataaactaggcta

SEQ ID NO: 14916 - protein, 1028 aa, DROSOPHILA
MGGGRDGRGNYGPNSPPTGALPPFYESLKSGQQSTASNNTGQSPGANHSHFNANPANFLQNAAAAAYIMSAGSGGGGCTGNGGGGASGPGGGPSANSGGGGGGGGGNGYINCGGVGGPNNSLDGNNLLNFASVSNYNESNSKFHNHHHHHQHNNNNNNNGGQTSMMGHPFYGGNPSAYGIILKDEPDIEYDEAKIDIGTFAQNIIQATMGSSGQFNASAYEDAIMSDLASSGQCPNGAVDPLQFTATLMLSSQTDHLLEQLSDAVDLSSFLQRSCVDDEESTSPRQDFELVSTPSLTPDSVTPVEQHNTNTTQLDVLHENLLTQLTHNIVRGGSNQQQQHHQQHGVQQQQQQQHSVQQQQQHNVQQQHGVQQQHVQQQPPPSYQHATRGLMMQQQPQHGGYQQQAAIMSQQQQQLLSQQQQQSHHQQQQQQQHAAAYQQHNIYAQQQQQQQQQHHQQQQQQQHHHFHHQQQQQPQPQSHHSHHHGHGHDNSNMSLPSPTAAAAAAAAAAAAAAAAAAHLQRPMSSSSSSGGTNSSNSSGGSSNSPLLDANAAAAAAAALLDTKPLIQSVSNPIGQPLNTQSQQQKQGQQITLMKTTRYTEFVEMVSMDVTVKPELFSELKPEMTEITAEELTLEAETTAAAAAAAAAAAAATTTSATEGTQVLAAAPAPLSSGRKLRGRAKAVAYGSTMITLISTLKSSPEVPATKTVHRTTLRSLATAAAATAAGLLAPSPTVSVLNESKVLQRRLGLPPDLQLEFVNGGHGIKNPLAVENAHGGHHRIRNIDCIDDLSKHGHHSQHQQQQGSPQQQNMQQSVQQQSVQQQQSLQQQQQQQHHQHHSNSSASSNASSHGSAEALCMGSSGGANEDSSSGNNKFVCRVCMKTFSLQRLLNRHMKCHSDIKRYLCTFCGKGFNDTFDLKRHTRTHTGVRPYKCNLCEKSFTQRCSLESHCQKVHSVQHQYAYKERRAKMYVCEECGHTTCEPEVHYLHLKNNHPFSPALLKFYDKRHFKFTNSQFANNLLGQLPMPVHN

SEQ ID NO: 14917 - DNA, 5946 bp, DROSOPHILA
ctttgcttcaagcacaaaatgcgcaacctagtgtggagcaagggacccagcggcctggaaggcacattcaagtctggctccgaggtgagattaatatagacaaattctgatggcaaatataataatatacattaatattctagttggacttctacatcgacgacgacatgatccacatagccgacaccaaggtttcacatcggtatggcgacttctttgtgcgtaaaattcttaagttcaacgatctgaatcgcaaattgaagaacatcaacatttaagccgactccttgtgacccttaatgataaatttaatattccatactggaccgatttgtttcgatatcaataaaaatcgcttgcgatcttgcgcaagtttggtcctcaaaatgtgtcttgagtatttaaataatttaaaataattatctaatttttaataagaatccaagttgttttaacacttgctttatttttaacaataccgttattttataaaaattgtttgtatgactataaggaaattcaagactacacagtacgatttttgagttcgccacaactccacttgtgctcggcatgtgccttcagcaacgcaaccaagattcgttttcggttatgggggaatgtgcgttgaattaatacgtagtatataataataacatctcatatcaaatttctctcctgttcgtcgcatagcgaacacgagcaaatttctttggtaaatcaatcgtattaagcgcttgttgggggtaaataattgtgattttcgggggggttggacagttggcgtggagttggggctacaagcagttccacacacatacacacagtttaaaattcaacttaggattacagtacactttatacacgacattgccttctgttctctagtttctgttgcgtttttgtgtgctctctctttagctaaccattggttcacttaggactaacattaaaatcaaacaatttacaattacggacttgttggtggccgggccagttgttagtccacggacactgtgcgctgattgacgtcgatcaagtagatgtccttgtgattctgcagcacaaagtcgacgaaagcattgatgggagcgatctcctccagggaggtactggtgctgcgcgaccacaggaaattcggaccgaacacgatggccaggttggaggaggtcatcttgttcagatcctcgcagtccatcaccctgaccaggaactcaacaatgtacttgaacagttcatagttctcctctggcagtttttcgcgtatcagttgcgtcacgttcctcgaacgctcttccttgggccagtctagaaaaccggtcacatcctcgtacagctcgaaggtgagcagcggctcggcgagatcgcgcaggaaactcttcagcaggccggctatcacgtggacattaacgctcttcagatccacatcctcgccgcggttgacgcgctccttgagcgccatgatctccgagtgattgcccgatcgacggaatatgccctccgtatcgatcacgcccgttatggacagcgagtccacgcacttgcgcacaattggcggaatggagtttaagcacggactgttcatcacaatgaatttcaggggcacaccaaattgatgcgtcgtcgccattttgtgctgctgctgccgggatgcatttatattgctgctgggcggcggtgtcgatggcttccggctggggttcagtttgtcgtccaggtcgcagatgttgtccggcaacttcagcttgttcaggccgagcgcctggcgcaactcgtccaagctggagatgtagactagcttcttgcggaacttgtcgctaatgaacgggctaaagaagttccaaatgacccgtatgaaccacgtcggatgaaccacatacaacgtcttcagattcttgcggaagttgcgatcgagctccttgtacgaattccacaggaactgtgcggatggtttgttgtcctccttgaggccttgatggaagtaaaccaaaatgtagtcgttctccacaaaaggttcgatctccttgatgatttccctgatagacaaatggaaatagattaatgattgaacaaaaaatgtactcgaatatgaatcctaccgcacaaatccttccagttgggatttttcgggaaagcgggatgcataaatgccaaagatgtggcgaccctgcttatcggttcccaggaaatcgcatttgtttctgggagtctgaaagttttcagactgctccctgagttggtcctcgaagtcgtcctccagcggatttacatcttcctcgggctcaagttctggatctaggcgtaatgcgaaacgttattcattggccaggagaagtagattccgccacttaccttcggccagaacgaaatcaccgaccataacatcttctgggaaaaatcgaagaattagtttgactatgattttgtagattctttaaatattcaatttactttcaagcggagatggggccagcagctcggtatcatcaaactctagcttcggctcgaagtcgtgcagatcggagagactgggttggggctcatccgagttatcgacgatcggattgatggcgggaccttggggtgcgagaggaaggcatttataaatctcgtaggtttccctggcgcggacttgtattccaaaaacgtaatcttacaagtaatgctttcagttaagtattttgacggcctgaggcaacaagtttagttcggattgagtttgagtaagtgaatagacatgaatcagagaaatttcatttgttaagtacattggcatctgattgtataatcaacagtcttacggtttcgatataattggcagacgattactgaacagaacagaacagagacgattaggaaactctaagctagggcgattagactatagactatgaagtaaggctataagggctagggcaaacacatacgatcacaaaacacatcgggtaaccaaacattggcaacaacacagctagcgaaaagtagttaacaaataggatccacaacaaaccaagcaaacaaaccacattggatagttttaaaatgcaagttatgtatgtacaggaggagacggtaagctgcccacataggctggataatgcagtttgaaatggggttagtagcgcaacttgataccaaaaacaaagaacttggttagggggcggcggttgggggttagtcaaggcggggcggggcggggcacaaaattagtcgtaattactggctttaactgttagttctcaaacgagggcacttcccccctcaaagaaactacgatacggcaatgaaaacaacgaaataaagcagcgcaaagaaatgactcccaaaacttgaaacacagattggaggtgaggtattgtagaaaacctggcctcatatttttaggcccgtttttataatcttcatggtgggctcaaagttaaaagagaatgatgggaaaatgggtttccatatggtgtacccacaattagttactttatatttaggcaatcaaacagataattcttttacaattacgtctttcattagattaggtagttagtattaacgaagttctttattttgggaactatttctgaacgctcaaataaggcaaatcactggacaatggcaatgctaagcagttacagaaccaaagatcaaaactagatatatattcgaatcgaaaagcatgacttggccgttcggccggcggacttacctggtaatctcggcgcgaaacgcgaatgggcgtccatggcggtggagatgggagtggatgcggattcaggtgctatccgttcgatgtgattggattactcgcggtgacgcaggacgtggctcagtcagtcgttgggctcgattattggcatgtagaatgtatgcggctgaaatgtgagaataaattagccaaaagcagcagttgccagtactctatcgatgacgtcattagcaagctatgtagttttcttggctgtttgggttgcttgttcgatggttatttcttggtattggatatagtacaggttgtatggcacggctgattcacattcatttacatcaatgattttgctcgaagtcttagtgctaagttggccctgaaagacgcccaccgcctccatttctaatgttcaaacatgcatacatacagtggggacatttaaagtggccatgactgcggtctcaagacaagtgaattgtttttcgaagagataacacaaaaacacagaggctgcttatcgcaatttcgacaaaaagcttcacaaaagcacatagaaaggcacaattttaagtgaaacgtagtttgcttccttcgtttctgccaaaaatggttatatattgtcgcgataatttcttgtgataacttgagtatataaaagaacggaagttctttttttttgagcgtcctaactagggagggtgcactgtacatacagcttgtatgactttattttaaatacgtgattggattgtaaatgggaaataaattaataattttcaagcgtaaactgagattagtacacatcctttttgacaccactgtttcaaaaggtgacaaatcctttaggccgccactgtaaatgggagtaggctcctttgtccctccactgtttgcacatacacacacgcagaagttgagtaaaaatttcacaagtttcttgtcgaaaaacgcaatttctgtgcaacaacaaccgattaattgcaagtaaactgcgcatttgtgtctagcctttttaaatgatatttacttttttgttatactaagttacgaatttctataagtcacaagaaatcatcacattttatacgaatgatgaatttgtcttaatcacgctttcgtttctcatttcagttaagtttttactctgtttgtgagtcagatttagctaggaaagtaccttttatcagtacgggaaaaaatcttcgttaattttatactgccagacgacgttgtttttgtcgatggttagtgatggcaaactttggtttggcgagcccattagtggtgcaaaaaagcacaaatctaacgaacaccagaaaaacttgttcgtgtcacggagcagcatgcacgaaatatcgctaagaactatttatatagtgactgaattcaagtctgtgtatattgacaatgtctaataataagcttataattctcttcccacgaattacaaaatggattttatataaaaatttagatcgtaatagccgttgtgaattattttaatctattgttcgccacatcttcttaacctaaacaatttatttattttttttaaacatttttagtgcttgagcagcaataatcaactcactctgccatctctgctgttatcgatatatcaaaacagaaaaacggtctgcaaaaagtgtgaccgtttgccgtgctgctcgcaactttgacacgaccagttccaaaatatcgtgagatttacgcaaaactactagaaaatggtcggttggagccgtttgctgtcgccggcggcgaagttcgccagctaccgggctgtcctgcaagagcccgcgtgccggaatggtgagcatttcttgaaaatatccgccgtaaacacacttcacattacgcaaccatatattctggatttctagccctgcaccaacagctgcgcagaatgggaggcgatcatggacaccaccaaatgatcatcaagccatcccgcttccagtgggacaagttcaaggatctgttgcacttttacgtaatgctcggcgtcatcccagtcaccgcattggttctctacgcgaacatctttgtgggacccgcgcagctcgccgagattcccgagggctatgagcccaagcactgggagtacgagaaggtatgatgggctcggaaaggcaaccaatcgatactaagattgtaattccgagatatctctttattatctagcaccccatctcgcgctttatttcccgctacattttgaactcggatcagcaaaactacgagaa

SEQ ID NO: 14918 - DNA, 1629 bp, DROSOPHILA
accatcgacaaaaacaacgtcgtctggcagtataaaattaacgaagattttttcccgtactgataaaagccgcatacattctacatgccaataatcgagcccaacgactgactgagccacgtcctgcgtcaccgcgagtaatccaatcacatcgaacggatagcacctgaatccgcatccactcccatctccaccgccatggacgcccattcgcgtttcgcgccgagattaccaggtcccgccatcaatccgatcgtcgataactcggatgagccccaacccagtctctccgatctgcacgacttcgagccgaagctagagtttgatgataccgagctgctggccccatctccgcttgaaaaagatgttatggtcggtgatttcgttctggccgaagatccagaacttgagcccgaggaagatgtaaatccgctggaggacgacttcgaggaccaactcagggagcagtctgaaaactttcagactcccagaaacaaatgcgatttcctgggaaccgataagcagggtcgccacatctttggcatttatgcatcccgctttcccgaaaaatcccaactggaaggatttgtgcgggaaatcatcaaggagatcgaaccttttgtggagaacgactacattttggtttacttccatcaaggcctcaaggaggacaacaaaccatccgcacagttcctgtggaattcgtacaaggagctcgatcgcaacttccgcaagaatctgaagacgttgtatgtggttcatccgacgtggttcatacgggtcatttggaacttctttagcccgttcattagcgacaagttccgcaagaagctagtctacatctccagcttggacgagttgcgccaggcgctcggcctgaacaagctgaagttgccggacaacatctgcgacctggacgacaaactgaaccccagccggaagccatcgacaccgccgcccagcagcaatataaatgcatcccggcagcagcagcacaaaatggcgacgacgcatcaatttggtgtgcccctgaaattcattgtgatgaacagtccgtgcttaaactccattccgccaattgtgcgcaagtgcgtggactcgctgtccataacgggcgtgatcgatacggagggcatattccgtcgatcgggcaatcactcggagatcatggcgctcaaggagcgcgtcaaccgcggcgaggatgtggatctgaagagcgttaatgtccacgtgatagccggcctgctgaagagtttcctgcgcgatctcgccgagccgctgctcaccttcgagctgtacgaggatgtgaccggttttctagactggcccaaggaagagcgttcgaggaacgtgacgcaactgatacgcgaaaaactgccagaggagaactatgaactgttcaagtacattgttgagttcctggtcagggtgatggactgcgaggatctgaacaagatgacctcctccaacctggccatcgtgttcggtccgaatttcctgtggtcgcgcagcaccagtacctccctggaggagatcgctcccatcaatgctttcgtcgactttgtgctgcagaatcacaaggacatctacttgatcgacgtcaatcagcgcacagtgtccgtggactaa

SEQ ID NO: 14919 - protein, 476 aa, DROSOPHILA
MDAHSRFAPRLPGPAINPIVDNSDEPQPSLSDLHDFEPKLEFDDTELLAPSPLEKDVMVGDFVLAEDPELEPEEDVNPLEDDFEDQLREQSENFQTPRNKCDFLGTDKQGRHIFGIYASRFPEKSQLEGFVREIIKEIEPFVENDYILVYFHQGLKEDNKPSAQFLWNSYKELDRNFRKNLKTLYVVHPTWFIRVIWNFFSPFISDKFRKKLVYISSLDELRQALGLNKLKLPDNICDLDDKLNPSRKPSTPPPSSNINASRQQQHKMATTHQFGVPLKFIVMNSPCLNSIPPIVRKCVDSLSITGVIDTEGIFRRSGNHSEIMALKERVNRGEDVDLKSVNVHVIAGLLKSFLRDLAEPLLTFELYEDVTGFLDWPKEERSRNVTQLIREKLPEENYELFKYIVEFLVRVMDCEDLNKMTSSNLAIVFGPNFLWSRSTSTSLEEIAPINAFVDFVLQNHKDIYLIDVNQRTVSVD

SEQ ID NO: 14920 - DNA, 4438 bp, DROSOPHILA
gcgtaagaagatacaaaccattttacatattgtacatctgagtgttgaatttttccataaatatttagcaccgagataaagaaatattcaagcaacagtgccaacaaaaagtaaaacacccaaaactaaatatataaactataaatgataaacgaaattgtaccttgagaaagtccaagcaaaactatctacggcggtagcactcaatgcgaaccaaccgatcgacaaaaaaagtcaaacaataagaaagagtacccctctgtcaacgtttaaggacgaatattctatagctacctagttgtgttttgcacattttgtaaactttacaacacgatgaaggaaaccgaatatctagataaacgacagccccgcagcgttatatataatgatatatatacttatacaggatacaagaacataactaataaaaccgtttttaaaacccgtgaaacttgaatactgtttttacacttttattttaaacaatgagtgaattagttctaatacgaaacacaacgagtttggtttgttagttattagtggcttgtaaaagcattctcctgctcagcagctcagtttagttagtttcagaatgaaaaattatctaaattgtcaattattacagttttaaaataacgtataacatgaacacgatttaggacatacatatttgaatattaatacccattatgtgctagccctgctaaggttcttatgagcaaatacatttttttggatgtggatgtcactagatatgataacttatcatacaatttaacaaattagaaaaacctagcaggtccgagatttacattttaaaacagctgagattccttttagcttagcaactacgacaattgacacatgacacacggaacaactgcaactgcaaagttgcgcaatctaaaacagtaaatgctacataaaacatgagacgagaacggataccactaacacacaattgtcttccctcaattccaggattattgtcgagccgatcttacagacccttgttgaagtagacacgcttgggcactttgccctgagttttcttctcgaggtcctcgtaaagttcgggctcgaaggtgcgcataatcgaagtgtccaaggaacactgctgtgggaacagggcgcaggcagtgggcaccatgaagcaaaggctaaacatcaaagaataaaaagatcagttaaaggaacaagtggtcgtagatgataaagttacttacaagcacccaaccaaaagggtctggaatggagcattaatccacttgatgcgcctgtaggcaggcagtttctccagcctctccattatcaatggcagcaccagcattccgggcgccgccatcgcaatcctggacacaaccacctcaccgattcctttgatggctgccaatctactctggcccacaaccactccatcgtcgttcttcacctctatgccattgattatctcattttgtcgcatcagcggaatgttcacgaagttggctgccgccacagctgcgaagggcacaaatctttggaacagcggagtcgctttctttgaccaatagttcttgcatccaatagcagctaccagagccgatgtcgtggcggatacataggccacgcccagctgcgtaacgctagttggcgagttggcattgcgattcgtgtagttaacaaccgcattgaaggactggttgatgaactgccagagcaccacggcgggcacggtgcgatagaaggccagcatgccaccggtgatcaacatgcctccgggtacctgaagatagaccaaatacacaaagcaattagtaaagcttaaatatgtaagcatcgatttagataagcccttaagggaacaggttctttgatgctaaaaccaacaaaatgctcgaagatttggcattccgagcaattggtcttgatatcgtcgtgccttccttgtgtttttggcaacccattcacaaggcgtccacgccagacgcttctattttcagcgaccacgtgccgaacccatctcgagacttgcctgaaaactcatgcggccgcaaaagttctgcagctcgccggtatccggatgaaaggctgagttgtacagcttcatgttgtagtgcacctcctccggcttcagcggcggggattggtcacctttccggtagcgttcaaccattgctttggcttccagcaggcgatcgctggatacgactacggtgcgggggtccgtcatccaggcgaagtactggaagcgcccagcgaaggtgctgagatcgaagagtggcttgtccacatcgatgagggctagggttagggattggttgggtcagtgggcatagaatgatcgtatctctgggctctctcaaatatcaaatttattaagtacattattttagatactgctactatttgaagattgtttaaaatttgatgaaagtacatttattttggctgccacgttatatattaaagtgtattaattgaaatattacatacaagctctagctgacttttaatttttaaaatatgtagtttacagaattttgagaatcaaaatggaaataataaaaaattatggctatagatttattaattcttaaaacttttttaacaaatgaatagattcatttatacaataaattgatattagaaagtgttgagtaaatgtcataatcagtcttatgtttttgaaaagctttcgaaaaaaaaacacaacaaaactgattagataatgaagatgctgtgaaatgaatatccttttatgttatttattttcacaaaatatgcataagaaatgattcatcaaaaacttatttgctttgattcctctatgtgtatgtattcacttgaatgctcaatatattcgatattcgtgggagcccatataaagtggtggttttgatttgattcttacttgatacctgcgacattttggctgctgatccaattgcctaactgcttgtaatttgtaattgcgagcggcttacgtaagcagtaactttcagctgttgccggtttatggcggcttgcttttgttattgttgttgttttggccgcttgcgcttttgggcagattctcaccttatgtgtttgcttagggccgatttaacagcaaatgattcgttttagccacgcacctgatccgccagctgttcaattcacttttctgcctcgtaatgcggttcaaatgttcactttttatgtcgctctccgttttttttggcactcttccaattggaaaaaaagttgttttgtttgccgctctctgtttgtcttttttcgctctgagtttgtgcatccacaagtacttgctgtgctcgccgcaacctctcaatttagcacttcttttgttgtgcaatttgccgaatgattcgcaaactcagtcgcgtataaatgcaattttcaaattgtttactgcgatggtaaggaagaagaagcaatgtggcggggtgggggtggctttgcacaatagtgggaccgtgcgtagatcaggcgggaaaagccacaggcaagcagtggaaggtgccatggcttcaagcaagcagttcatgttcgcataaaaatatgcagtaatctctagaaattcaataatgtaatgtaatgtataattcagtaactttattattaatcatgttaaaagtaaggtattcagagcacgagtgttttttccatggcacaagttttgtatactcgccaactgcttgctattaagacacgctttaaatttcagatgttaacgcggcatcgctaatgcttctttcagctgcaaaatagctagatttgccggtctgaacagctagccggacatctctgaatgccattcgcaggagacgacgacaaagccgcagttgttgctgctgttcttttcactttcgttgcgttttgcactgcattttatttggcaatttgtgtgcatttttcaacagctgtgatattttgccatcgcatcgtggcggcaagatgatgaaaatcggcgaaaaaagcgggagcagaagcagcagataataatagaagccacgtacttgtgcgtgtgtgtgcgttgtgtatgggctgagcgccagtgtttgtgtgtgtttttgcaaaaaaaaaaaaaaccggaaaagcagaaacacagacacgaatgcggatgcggatgtagaagcggatgcaaaggccactgcggatataatccacaaacacaaaatgcaaatcctgcaagtgtttctgggcacgctgctctgcggcatcgtcctgggcgccaatgtactgacagtttttcccagtgtctggaaatcccactatctctttggccggagattgcttcaggagctggtggagagttcgggcaaccactccgtaactctgatcagtccacatgccgcgcaggaaggtgtggatgcggaaatacccaaaatcagggagctgcgcatcgaagggctgcgggaaaactggctcgacatgggcatgagttttgaggccg

SEQ ID NO: 14921 - DNA, 1585 bp, DROSOPHILA
ccacccccaccccgccacattgcttcttcttccttaccatcgcagtaaacaatttgaaaattgcatttatacgcgactgagtttgcgaatcattcggcaaattgcacaacaaaagaagtgctaaattgagaggttgcggcgagcacagcaagtacttgtggatgcacaaactcagagcgaaaaaagacaaacagagagcggcaaacaaaacaactttttttccaattggaagagtgccaaaaaaaacggagagcgacataaaaagtgaacatttgaaccgcattacgaggcagaaaagtgaattgaacagctggcggatcaggtgcgtggctaaaacgaatcatttgctgttaaatcggccctaagcaaacacataaggtgagaatctgcccaaaagcgcaagcggccaaaacaacaacaataacaaaagcaagccgccataaaccggcaacagctgaaagttactgcttacgtaagccgctcgcaattacaaattacaagcagttaggcaattggatcagcagccaaaatgtcgcaggtatcaaccctcatcgatgtggacaagccactcttcgatctcagcaccttcgctgggcgcttccagtacttcgcctggatgacggacccccgcaccgtagtcgtatccagcgatcgcctgctggaagccaaagcaatggttgaacgctaccggaaaggtgaccaatccccgccgctgaagccggaggaggtgcactacaacatgaagctgtacaactcagcctttcatccggataccggcgagctgcagaacttttgcggccgcatgagttttcaggcaagtctcgagatgggaaggcacgacgatatcaagaccaattgctcggaatgccaaatcttcgagcattttgtacccggaggcatgttgatcaccggtggcatgctggccttctatcgcaccgtgcccgccgtggtgctctggcagttcatcaaccagtccttcaatgcggttgttaactacacgaatcgcaatgccaactcgccaactagcgttacgcagctgggcgtggcctatgtatccgccacgacatcggctctggtagctgctattggatgcaagaactattggtcaaagaaagcgactccgctgttccaaagatttgtgcccttcgcagctgtggcggcagccaacttcgtgaacattccgctgatgcgacaaaatgagataatcaatggcatagaggtgaagaacgacgatggagtggttgtgggccagagtagattggcagccatcaaaggaatcggtgaggtggttgtgtccaggattgcgatggcggcgcccggaatgctggtgctgccattgataatggagaggctggagaaactgcctgcctacaggcgcatcaagtggattaatgctccattccagacccttttggttgggtgcttcctttgcttcatggtgcccactgcctgcgccctgttcccacagcagtgttccttggacacttcgattatgcgcaccttcgagcccgaactttacgaggacctcgagaagaaaactcagggcaaagtgcccaagcgtgtctacttcaacaagggtctgtaa

SEQ ID NO: 14922 - protein, 351 aa, DROSOPHILA
MSQVSTLIDVDKPLFDLSTFAGRFQYFAWMTDPRTVVVSSDRLLEAKAMVERYRKGDQSPPLKPEEVHYNMKLYNSAFHPDTGELQNFCGRMSFQASLEMGRHDDIKTNCSECQIFEHFVPGGMLITGGMLAFYRTVPAVVLWQFINQSFNAVVNYTNRNANSPTSVTQLGVAYVSATTSALVAAIGCKNYWSKKATPLFQRFVPFAAVAAANFVNIPLMRQNEIINGIEVKNDDGVVVGQSRLAAIKGIGEVVVSRIAMAAPGMLVLPLIMERLEKLPAYRRIKWINAPFQTLLVGCFLCFMVPTACALFPQQCSLDTSIMRTFEPELYEDLEKKTQGKVPKRVYFNKGL

SEQ ID NO: 14923 - DNA, 2890 bp, DROSOPHILA
aaattccctttaatttttcagctgtcgagtctgcaataagaccttttcccgcaagcaccagttggatcagcatttgggcaccatgacccaccaacagactgtaatacaccacaaaaacgaacggacggggcgctattagtcgaaaacaatgcaatacaatttctgttagataattcattaatgtacatttaattatatataaaaattgtaaaataaaaaagagtacaaatggtcagaccggatgtgtaaaataatcggatttgatttattactatttggttaaagaacttgttcaaaaacacaaatattttttgtaatgttttttattacgtccatatattcgagaaaaaaattggaacacgattacaatctttgattttgtgcgtttatttggtagttttaacatcattttggccattaaatgagtgtgcgttttttattgtttcttttctttgtgctctgtcgaagactttgttaccgtttgtggaagctacaacatggaataataatcgaatggcacaggattaattaaatcttctttttttggacaagtaaatatgttttgtttttttaggtttataacttgtaacgttttacatcaaaatctaaaaacgtttggaagtcgggagggatgcggctcttcttctattccttagggaaacaaaaagtaaaaccaaatatgctagatattcgcataaaatggatttatgcgaatacctgtacttaaatgtacgtctaccttgttaaagaaaaggacgcggaattttagaattcttaccgatagctaattagtgtaatggctagataggcagcttcattgttcaatggctagctccgtgagtttctcttctttgcgtttatgaatattgctggacaggtgggtcatcaaatgggagattcgtttgaagtgcttctgacatacgtagcagctgtaaaatcaaagtgtgttgaaacgtgtaatacaaataatgtgcagagttggcagaaatcgaaatgcccactagtgattccgcgcatccacatggatcatcttgtgcttcctgagacatccggagcttacaaaactctttttgcacgtgtcgcactcgtagcggcgttcgttccgatggcggcgatggtgctcctggcgagcgcctgaagaggagaaccgacgtggacagtagacgcacacgtatggctgctcgcccgtgtggatacgcgtatggctagtcagttcctttcgagttgcaaagctcctttcacaattcctgaggagaaaaatcgtatcttaggtgcactagcccaaaggaggttaaggataatttacaaaaaaacacagtggaaattcttgatgcctgtgtgccggagcgtgtgctcttgaaagtttgacttattgttaatgatccttccgcaatcagggcatacatatggaccagtacctcctccaattgacttttgatggttcaaactagtcggtgctgagaccttttcagcacttggcattggaagatctttgacttcaggacatagaatggactcgtccaactcactctcaatttggttatcatcgatgtcttcgtatattattggatctgtggagcaatccttgctgtcgcactcaatcctttccagattctgtttctcggcaatgatgcagcgctggcggaacttaatggctgcctgcagattgtccaggcaagtcgtgcacatttggccggatatttctttcttgcagcttagctggaaagtataaatagcaaattaagtgccatgattaaggaatatttttagacatattacctccaccccagtaatggagtgaatttgacgaactagatgaccgtttcctggaccaaaaaggtctattggggcatctgatctagagcaaatgcggcaattcagaattcgcatctcgactttgatttgtttttgaataattgtttactgtttacgtttcgagcagcttatgcgaaatgtgtcgttaagctatttgcatggtcactctaacttttgcacgcataaacgctgtttagagtttttgcacagggattagtaccttatgaagtaacataaatacaaatatgttttataatctcatttaataagagtaccataatggtttactgcactttttaaatcatttaagtcacacaatggcattgccgcacttatcgattttgtcgataataaaaccagctgttgcatcacaatatatatacatacatatgtgtagtggatgcgtttacaaaacaattggttgtttatattcgaattaaactgaagttgggctaaacttcggttgattttcaactaacattatggcgctccagtgccggacctgcggcagcatcatctacaataaaatgcccaagaatctctttcatattgagaacgagaagatgctgcaagacataaatcttgtcactggcacaacagtatgtaagaaaaatggtttccatttgatttgtgcagcattttctgtgattgcagctccacaacgatccagagctgcccagcagcatatgcgcctgctgcacgcttgacttgaaccaagcgattttgttccgggagcggtgcatcctaacgcagaagcagctcgtccatcgtcgtagatctcccgaagcgaaggaaccggctgaagatgttgaggagatggcatcaccgccggattgtctgaacgatccattcggggaagtcgatgaatacattgtggaatccccagaagaagttttggatcatgatagtgatgctcatcatgatctggatgaggataattatattgattctgttgaagatgttgatgcgcttcaagatatggctgaagtagccgaagaggattctcaagatgtcgaatctctgatctcaagtgtacagaaagaacttgagagcatttgcaacgacgacagcaact

SEQ ID NO: 14924 - DNA, 642 bp, DROSOPHILA
atgcgaattctgaattgccgcatttgctctagatcagatgccccaatagacctttttggtccaggaaacggtcatctagttcgtcaaattcactccattactggggtggagctaagctgcaagaaagaaatatccggccaaatgtgcacgacttgcctggacaatctgcaggcagccattaagttccgccagcgctgcatcattgccgagaaacagaatctggaaaggattgagtgcgacagcaaggattgctccacagatccaataatatacgaagacatcgatgataaccaaattgagagtgagttggacgagtccattctatgtcctgaagtcaaagatcttccaatgccaagtgctgaaaaggtctcagcaccgactagtttgaaccatcaaaagtcaattggaggaggtactggtccatatgaactgactagccatacgcgtatccacacgggcgagcagccatacgtgtgcgtctactgtccacgtcggttctcctcttcaggcgctcgccaggagcaccatcgccgccatcggaacgaacgccgctacgagtgcgacacgtgcaaaaagagttttgtaagctccggatgtctcaggaagcacaagatgatccatgtggatgcgcggaatcactag

SEQ ID NO: 14925 - protein, 213 aa, DROSOPHILA
MRILNCRICSRSDAPIDLFGPGNGHLVRQIHSITGVELSCKKEISGQMCTTCLDNLQAAIKFRQRCIIAEKQNLERIECDSKDCSTDPIIYEDIDDNQIESELDESILCPEVKDLPMPSAEKVSAPTSLNHQKSIGGGTGPYELTSHTRIHTGEQPYVCVYCPRRFSSSGARQEHHRRHRNERRYECDTCKKSFVSSGCLRKHKMIHVDARNH

SEQ ID NO: 14926 - DNA, 8640 bp, DROSOPHILA
acacgcgcgtcgctcactaacactcactgccaccgatgggcgagtgtggaaaataaatacacatatgccgtcatacattcgatgcccctataagcgcgctgcgtctgtctgcgtgcgatgggttagagatcatttttagacaaatttgcgtacaatatttcctggcagttgcaagctcgcgattttgccattgacgagcgtgcacaaatgcacttaaatatgtatgaattttacgccagtgtgtgggtgcgcggaatgcatgtagtcactttttttatttattgcttttgttgctgcagtgagctcacgcgtagcgagttgcgcatcattctttctctgcttcgccactttcgccacgcacttacttaaaacgcactcgtattgtattccataaagacacgaaaaatgtttttatttttttcacttatcgcgccatcaacacgcacacgacgttcttttcttttcagcttgaaaattggaatgaaatgacgagaaagagcgcatatctgccagtgttgaaaagggctttagttcggtacggaattcagtacctaaaactggtacaaacaaggtaccttgccgatgatacaagttagctattggtttttattcattgttttaaatgcttcttaatatatttcgtacgtgtgttcattaaggcaatgtgtgtaaatcttagcttataaaaattatagcccaaacttgacttgaactttttaataaaaccaaaatgcaaacattgaggccaaagcctttttattaatttaagtcagcttagaagtagacgagccacaatccagatacgtacctatttattggaccgcaacactgatatccatacacgaacttagcagcactgtcccgggaccaatgcttttgcaacacttgatctggcgtgcctggcagaaatcaaaacaaacgcacagcacaaccacccacacagacatgcatgcatacatacatacggacagcacaaagagcagacaacaaaaccgcgttctgtgtttttcgtgaaatgtcgtttatttggtggcggttactcgcgttgacaaacaaaggcagggcaacgcacccaccgccctctgagatatcatacttggttagctgcatacattcgcaaatgtaagcgccaacaactaatgtttgcctaggacaaatccggacccaggaggtagaagagcaaaaccatcaggtagtagagcagtaatcctataaatgccatgttgtagtttggactttcctgtttcgtgcgccgcctagggacgcacttctggcgtcatgaactggcctcctccagaattggtgtcgccctcgccactccgccgttcttctccagaaccaggttgccaactacatcagcaccctcgctatccgaatcctgcataagtgggctgtcgagaattcgaagattttttaagtcttcatactgattggcaatatccaacgtaactgggtcaggtggaggttgaagtctgcttaactccagcaactgcagatggtagtagacaccctcgtcatctatggcataaaagtgggagaagtgggcgtctgtgaagaactgacgagcttcatttcccacaaatttaacgcaggccaggagttccggacggatggcattgccgcgcttattccgccacagttccgcagtccctcggttcaccggatgaaactcgtcggcaacgaatgtcacatctacatcgatgtccgctgcaatgggcgccgcatccacagcatcctcttgtgtaacactgtgctgcttatggcgtcgactgcgccgccgtttttgctcgcgctccaattgattgttgcgcatgtgcgtcacattccagaagcacagctgctccgcgcagctgatcaggagcaacttacatggcgagaatagcaattgccggatgcagtgctcgtggacctcttcaatgctgtagatcagttgaacttttctgttttcaacggcaaagagctgttgggaaatgtataattagcaggaaataattatgaaacgaatttgtaagacgtatgtatacctctaaagtgccattttcgaaacccatagccaacatggtaccatcatccgtggctaccaaatagctgatcttggccttctgggcgatctcttcttcgcaaatctgttcgtaccttagttggttacagctgaatattaaacggaatacctgtcgttggaaataattgataattgtttaatgatattatgtttagcaaacccacatcgatgatgttgttttcgtaggccagaaagagaagactgttctttagatcaaagccgacaatgtattcctccgaatcctttggtttcacgaatgcagatgggttagctatatccagatgctgttggtaaatattgaaatcaaatactgcacttttactcgcataaacttcaattaagaacactcacacagactccgtggtcggaaaacaaaatgatatactgtccttcctgcaaggacgcgtacttggtactaacatccatcatcaatggccactggtcattgggttgcagcggatctatcttttccagctggaatatcacagtcttctgggcactgtgtgccgacgccaccagaatgttgggactgacctgtttgaggtaatcaatgggctcctctataaactgctgaggtagcgctgtatcatgaataacatctattatcactccgtccacatagccaacgaaaatctgttcgtcgttaaaggcggatatggcatttatcttacagttactggcagcatgagtgggtgtgattgtggaccattcggaaattctagaaatggccggtttaattaggtgaatgcgctccttggagtccacagccagaagttgcgtccgctctctggtcatgtccatcagagaacgcagatagacattaggctccaagcaagcctttgtcatcacgcttatctcatctgcactgtgaacccaggcgatttccctgttttgatgtgaattcgagccgcttacagagcgcaatgtgtgcacatggaccacctgttttcccttagcgccgcacaaaacaatgtacttatagacaggatcaaacagctcgtatatatccacacactctatatgttcgctgacattgctgcgtagcacgggatcagagattttcagatcatacacaataagtccctcggacgtgcccagcagtaggtaacgtccgtcagtcgaacgctttccgcaggtgatgaaacttccttctggcagttgcactgcctccgattgcaaactaaccgaaagacctggcaaaaaattgagccgccatacgctgtacttaaaaatcagcaacacggtggcggtcttactcctttcgtcaaatacatctaaggccaacggcgtgtcgttttcgacattaaaaacatgtagttccagcgtattgctggaaccgttggtcaaatcccatacagtaagtgtgcaatttgaggtgcagaccacgtaatatcgctttaaaacctgaacgaaacaccgtattcccgactgcatcgttttcaaaacaggcacgtgcgacagtttgaactcctgatcttgttcgtcccaattcaaaatactcacatcaccattgatgaatgccacatgcagttggatgttggcctctggcaatccggcgtcttcatttaaatagaaagcaacaattttcagatttgcatagctccctataaagcgtttaaccacgctattgactagctgctgcttgctaccaccactgtggcgccttcctggacaatcgggccacagggaccaaagttttacgctgccgttgcagtgcaaggtgatcaagtgcttctgttggttaaataccgccatacgcagaatgtcactgctgtcgctctcgtcccttagcaaataggtgtcctctccctccagcgaaacatcggttagcaggatctgcccgctggccagcgctatcaagcaaaagtcgttgtgaaggtagacagcatggcgcccctcattatcacccaggtttataatctgacggtgctggtggaaacgaccgctgataaaaggaaaaagtgaaataataataataaagtaactttaatatatatacatttcattattactaaaaatgacagctctgtttgtttgattagtcaatagctggtaagtacttactggttagtaaaccaaacccgatcgtcaaagcgctgcacttgtttatgggcttcttcaaaaatcgcctcatcctcggccatcagggcaatcctaagcaggtccgtatactttgaacaaataagattttcctcaatctttggcaaaaaatccagaatagcgttgactaagcgctcatactttgggtcattgtctgcatgaaaaaaagattacattttttttttgtttcaaatgattcagaaatttacgtaccgcaaatatatggcttgtagaacttcagctgctgtagcgtgttcaagatcgatccactggcattccaagcagttgaatcgtgccgaatcttttgttctagaaaacggaaatctaaaaagaccatgcgaaagagagtcatccgttcggggtgctcaatgttttttagatgatgaccgatgtggctatagaagtattggtccaggtaaggcggtatcaagtcgtcggaatcgaatgtttttgggatactaacaaaaaggttaaaatcactcagtatacggcttactcgtggcttaaggttaatacattttagcaaaaattcaagatatcaagaaaagggctaggaacatacttatagtgatctacgatactccgatgaagtgcatattcgttttcaagcttgactttcaactccaagtatatgctgggtatacttatggttgactcttttggttgcttctccaccaatgaatatttatgaagtttgttaaccactaccattacatcggatttgataacatcaaaccatatcaacgataggagctgttcaacaggaagttgataacgattagtagatgtatgccgtaaagtgcagtgctcacttacaatagtgggtatgtgggctgatggagggaaaactgacagtctatcaaacatttttctatattcagcgggctccagaacgtttagagagctctcaatgatggtcgtcagcttatcacagtttacactacaaaaaaaaattatgtatttattcagtgtgaacactcataatccacatactgtttccagttgtcccaggtcgccagaccatcccgaatgctctcagcaataatgcttagtctgcggggattcgttgtcaaaacttcccggggcaaatcctgtggtcgacagtcgaggtactttagaagcaaagacttaacctcatccggcgtaagcgtcatcgaatgatgatccaatgaaatatgagttgtggtagctgccgaaagaaagtcagtgacctgcttgaaccgtgtggttagcaatatcttgcagctcaagttgaaagcattccaagccttggcattttgcacattaagcagaacaaggagacaattctcgtatggcttgctcttgagcagtcgtcgcagttccgcctgaatgctgtggattcgaagctttatgttactgctatgatcgctacgacttgtccagttgggatcgatctggtaaagtaatttctgcagcatctctagcacggtctccgggctattgcagttcttcaagttaagccagaagatcttaaagtccatcttgcattgcactttgtacgataggcacacatccaaggctacccaagtctttcccgatcccaagacgccatcaatcaatacatttttcgctgggcgaagttctagaagagcctgccttagcttcagatactgaaatataaaaagtattgtagtatggttagataacaattccacagagtaaaattgtttttcggtttcgtacgttggacttctttgattgttttttttttcgaatgggagattatcataccggttgcaggcggctcacattgtacttggcgaatacttggttgtcgttgtacagacgatctctctgctcgatgtacatcctggtcatcatgctgggctgccgttgctcagtcttgattggcgacattaagaatttgtagttgatcctgagaacttcctccacaaatttctggaccatttcctcctgtttagagagcagtgtccaaaacaagcgaagtgtgccgctgactgcatccttagacatgatgatgtggtcaatttcctccttggacaatattgatttcggcatatcctggacatccttgcagtcgaagttgtcgacgaatgcatcctcaaacacggacaaaatgtccttgtattggtattggtgctccccagtttcaaaatccatattcgtgttacctacatatgtaaatatttatatagtaactaaattttatagctatgttagaaataatttattggcattgggttattttttgtggtattttcattaattacaaaagaaaatgttatagtcgagttttccggctattagatacccgttactctgctggaaatttttatctcatagaaattcgaaaacaaaataaatagaaataaaaattaaaacggttcaaaagtgtggccgtgacagttttgagcagtttgtgggcgttagggtaggcgtggcaacatgggtgaataaacttgggctgcgtctgtatctctagaatctgtattcttaatatcaaccttctagcttttattgttcctaagctctccacgttcacactaacgcaaccagatcgagtgttctaataataaagctgaatcaaatccgaatccctgtcttctccttggtcgggcaatcacacaaatcataaatttggttggaccaaccaataaaaactcaggtgcaactcttagcgaacagaatcaagaaaatcgaaaaaaacaaatcaaaacaaaaaaatgttcatttcaaatgcacatatgtatgcatgtatatgtgtacatacatatggcggaatttttggcgccaagcttggcccactttatttgaatgcaccgtagacggcttctcgaggagagaaatgcgataccatggatctatgagatcccttatctgcaagctgagatcgactggatcatcggtaatttcacaactaatcgacaaggacgcgaacgagatcgcctctaaatagctaggaatacgtgagctggcggtgcaaccatcgaaaaaggcaattccggttgcatttttgttctcctccgctcgtcaatgtcgtagaaccaaaatcggatcgaattattaatcaccagttagataagcgcgtaaaggcagagagaagatacgtcactgagtttgccgtgtgaatgaacttgttatgtttgtgtgtaagtgctctcgcatgcaattgtttcagtcacacacacagtgccttggatttgtgattgacggggaggcacaaggcccaatggaagaattaaacaaatggacttgtagagcacagaaaacgaaagcactacaggtacataagctttcacctgcacgcatatttacttacgctcgccgtttatttttaacaaatcgtcgtccttattcgtattttgttgtatgtgtaagtattgcactttatccttaatatatagttgctccggcttgttcacattgttctagcacattctaagcgaaacactaaaggcttgaaaaaatataaataatgtactaatctatgctactcattgagtagtactcaaaaaataacaaaacggaatttattcgactgtgtgaccgttttacgcgagggaaataatatcgaattatatatagggttgtcaagtggttcaaaaatgattttaatcgtaatctgaattgtaattcgatattatattgcgtgatttaagatattgagaatttgtatattcttaataagaaatacaatttacattacgattaaattaatttttgaaccgacaacaaataatatataataataaattcttatttatatattaagaatttcttattatattttaatatatattatttgttattagttattaatttgttatatatatgccaccttatatatatatgccaaatatatatctcttttccaactagatctaagattataataataccatgattttcttgtacgaaatgaagtagtttatctaatgcttattttctaaaaaacggtttagcacttattactttatttaaagtgtgaccatattgagccgtatcgatatatcacagacaacaaaggtattcactgccaggtaagttttcactagccacttgcgaccacaccgacggtgaaaaggcgaaataataaattttaacaaattgccgcagtgtaaattaaaggtgcgtagcattttacattccctttcagcggtcaccggccgtcccgcccccgcaccgtccaatttaacattttttacggccagtaaaacgtgcaatcccacccaaaatcagacacgaaattcggagcagcgcatcagagacgcagacgagaaagtgacgacgcagcaaaacgaagcaacaaaaacgaaaatcggcgacgtacacattcaacttgaacaaatttaaggtaggcattgcaatttccccaccaccacacggtagagtcggataggtcgtgtccatttcaatgggaaacaccgactgacccggctgcggaaaataaagagataaaaaaagaaaggcgacaaaccagtggtaggaaaacaaaa

SEQ ID NO: 14927 - DNA, 4787 bp, DROSOPHILA
gagtagcatagattagtacattatttatattttttcaagcctttagtgtttcgcttagaatgtgctagaacaatgtgaacaagccggagcaactatatattaaggataaagtgcaatacttacacatacaacaaaatacgaataaggacgacgatttgttaaaaataaacggcgagcgtaacacgaatatggattttgaaactggggagcaccaataccaatacaaggacattttgtccgtgtttgaggatgcattcgtcgacaacttcgactgcaaggatgtccaggatatgccgaaatcaatattgtccaaggaggaaattgaccacatcatcatgtctaaggatgcagtcagcggcacacttcgcttgttttggacactgctctctaaacaggaggaaatggtccagaaatttgtggaggaagttctcaggatcaactacaaattcttaatgtcgccaatcaagactgagcaacggcagcccagcatgatgaccaggatgtacatcgagcagagagatcgtctgtacaacgacaaccaagtattcgccaagtacaatgtgagccgcctgcaaccgtatctgaagctaaggcaggctcttctagaacttcgcccagcgaaaaatgtattgattgatggcgtcttgggatcgggaaagacttgggtagccttggatgtgtgcctatcgtacaaagtgcaatgcaagatggactttaagatcttctggcttaacttgaagaactgcaatagcccggagaccgtgctagagatgctgcagaaattactttaccagatcgatcccaactggacaagtcgtagcgatcatagcagtaacataaagcttcgaatccacagcattcaggcggaactgcgacgactgctcaagagcaagccatacgagaattgtctccttgttctgcttaatgtgcaaaatgccaaggcttggaatgctttcaacttgagctgcaagatattgctaaccacacggttcaagcaggtcactgactttctttcggcagctaccacaactcatatttcattggatcatcattcgatgacgcttacgccggatgaggttaagtctttgcttctaaagtacctcgactgtcgaccacaggatttgccccgggaagttttgacaacgaatccccgcagactaagcattattgctgagagcattcgggatggtctggcgacctgggacaactggaaacatgtaaactgtgataagctgacgaccatcattgagagctctctaaacgttctggagcccgctgaatatagaaaaatgtttgatagactgtcagttttccctccatcagcccacatacccactattctcctatcgttgatatggtttgatgttatcaaatccgatgtaatggtagtggttaacaaacttcataaatattcattggtggagaagcaaccaaaagagtcaaccataagtatacccagcatatacttggagttgaaagtcaagcttgaaaacgaatatgcacttcatcggagtatcgtagatcactataatatcccaaaaacattcgattccgacgacttgataccgccttacctggaccaatacttctatagccacatcggtcatcatctaaaaaacattgagcaccccgaacggatgactctctttcgcatggtctttttagatttccgttttctagaacaaaagattcggcacgattcaactgcttggaatgccagtggatcgatcttgaacacgctacagcagctgaagttctacaagccatatatttgcgacaatgacccaaagtatgagcgcttagtcaacgctattctggattttttgccaaagattgaggaaaatcttatttgttcaaagtatacggacctgcttaggattgccctgatggccgaggatgaggcgatttttgaagaagcccataaacaagtgcagcgctttgacgatcgggtttggtttactaaccacggtcgtttccaccagcaccgtcagattataaacctgggtgataatgaggggcgccatgctgtctaccttcacaacgacttttgcttgatagcgctggccagcgggcagatcctgctaaccgatgtttcgctggagggagaggacacctatttgctaagggacgagagcgacagcagtgacattctgcgtatggcggtatttaaccaacagaagcacttgatcaccttgcactgcaacggcagcgtaaaactttggtccctgtggcccgattgtccaggaaggcgccacagtggtggtagcaagcagcagctagtcaatagcgtggttaaacgctttatagggagctatgcaaatctgaaaattgttgctttctatttaaatgaagacgccggattgccagaggccaacatccaactgcatgtggcattcatcaatggtgatgtgagtattttgaattgggacgaacaagatcaggagttcaaactgtcgcacgtgcctgttttgaaaacgatgcagtcgggaatacggtgtttcgttcaggttttaaagcgatattacgtggtctgcacctcaaattgcacacttactgtatgggatttgaccaacggttccagcaatacgctggaactacatgtttttaatgtcgaaaacgacacgccgttggccttagatgtatttgacgaaaggagtaagaccgccaccgtgttgctgatttttaagtacagcgtatggcggctcaattttttgccaggtctttcggttagtttgcaatcggaggcagtgcaactgccagaaggaagtttcatcacctgcggaaagcgttcgactgacggacgttacctactgctgggcacgtccgagggacttattgtgtatgatctgaaaatctctgatcccgtgctacgcagcaatgtcagcgaacatatagagtgtgtggatatatacgagctgtttgatcctgtctataagtacattgttttgtgcggcgctaagggaaaacaggtggtccatgtgcacacattgcgctctgtaagcggctcgaattcacatcaaaacagggaaatcgcctgggttcacagtgcagatgagataagcgtgatgacaaaggcttgcttggagcctaatgtctatctgcgttctctgatggacatgaccagagagcggacgcaacttctggctgtggactccaaggagcgcattcacctaattaaaccggccatttctagaatttccgaatggtccacaatcacacccactcatgctgccagtaactgtaagataaatgccatatccgcctttaacgacgaacagattttcgttggctatgtggacggagtgataatagatgttattcatgatacagcgctacctcagcagtttatagaggagcccattgattacctcaaacaggtcagtcccaacattctggtggcgtcggcacacagtgcccagaagactgtgatattccagctggaaaagatagatccgctgcaacccaatgaccagtggccattgatgatggatgttagtaccaagtacgcgtccttgcaggaaggacagtatatcattttgttttccgaccacggagtctgtcatctggatatagctaacccatctgcattcgtgaaaccaaaggattcggaggaatacattgtcggctttgatctaaagaacagtcttctctttctggcctacgaaaacaacatcatcgatgtattccgtttaatattcagctgtaaccaactaaggtacgaacagatttgcgaagaagagatcgcccagaaggccaagatcagctatttggtagccacggatgatggtaccatgttggctatgggtttcgaaaatggcactttagagctctttgccgttgaaaacagaaaagttcaactgatctacagcattgaagaggtccacgagcactgcatccggcaattgctattctcgccatgtaagttgctcctgatcagctgcgcggagcagctgtgcttctggaatgtgacgcacatgcgcaacaatcaattggagcgcgagcaaaaacggcggcgcagtcgacgccataagcagcacagtgttacacaagaggatgctgtggatgcggcgcccattgcagcggacatcgatgtagatgtgacattcgttgccgacgagtttcatccggtgaaccgagggactgcggaactgtggcggaataagcgcggcaatgccatccgtccggaactcctggcctgcgttaaatttgtgggaaatgaagctcgtcagttcttcacagacgcccacttctcccacttttatgccatagatgacgagggtgtctactaccatctgcagttgctggagttaagcagacttcaacctccacctgacccagttacgttggatattgccaatcagtatgaagacttaaaaaatcttcgaattctcgacagcccacttatgcaggattcggatagcgagggtgctgatgtagttggcaacctggttctggagaagaacggcggagtggcgagggcgacaccaattctggaggaggccagttcatgacgccagaagtgcgtccctaggcggcgcacgaaacaggaaagtccaaactacaacatggcatttataggattactgctctactacctgatggttttgctcttctacctcctgggtccggatttgtcctaggcaaacattagttgttggcgcttacatttgcgaatgtatgcagctaaccaagtatgatatctcagagggcggtgggtgcgttgccctgcctttgtttgtcaacgcgagtaaccgccaccaaataaacgacatttcacgaaaaacaca

SEQ ID NO: 14928 - protein, 1440 aa, DROSOPHILA
MDFETGEHQYQYKDILSVFEDAFVDNFDCKDVQDMPKSILSKEEIDHIIMSKDAVSGTLRLFWTLLSKQEEMVQKFVEEVLRINYKFLMSPIKTEQRQPSMMTRMYIEQRDRLYNDNQVFAKYNVSRLQPYLKLRQALLELRPAKNVLIDGVLGSGKTWVALDVCLSYKVQCKMDFKIFWLNLKNCNSPETVLEMLQKLLYQIDPNWTSRSDHSSNIKLRIHSIQAELRRLLKSKPYENCLLVLLNVQNAKAWNAFNLSCKILLTTRFKQVTDFLSAATTTHISLDHHSMTLTPDEVKSLLLKYLDCRPQDLPREVLTTNPRRLSIIAESIRDGLATWDNWKHVNCDKLTTIIESSLNVLEPAEYRKMFDRLSVFPPSAHIPTILLSLIWFDVIKSDVMVVVNKLHKYSLVEKQPKESTISIPSIYLELKVKLENEYALHRSIVDHYNIPKTFDSDDLIPPYLDQYFYSHIGHHLKNIEHPERMTLFRMVFLDFRFLEQKIRHDSTAWNASGSILNTLQQLKFYKPYICDNDPKYERLVNAILDFLPKIEENLICSKYTDLLRIALMAEDEAIFEEAHKQVQRFDDRVWFTNHGRFHQHRQIINLGDNEGRHAVYLHNDFCLIALASGQILLTDVSLEGEDTYLLRDESDSSDILRMAVFNQQKHLITLHCNGSVKLWSLWPDCPGRRHSGGSKQQLVNSVVKRFIGSYANLKIVAFYLNEDAGLPEANIQLHVAFINGDVSILNWDEQDQEFKLSHVPVLKTMQSGIRCFVQVLKRYYVVCTSNCTLTVWDLTNGSSNTLELHVFNVENDTPLALDVFDERSKTATVLLIFKYSVWRLNFLPGLSVSLQSEAVQLPEGSFITCGKRSTDGRYLLLGTSEGLIVYDLKISDPVLRSNVSEHIECVDIYELFDPVYKYIVLCGAKGKQVVHVHTLRSVSGSNSHQNREIAWVHSADEISVMTKACLEPNVYLRSLMDMTRERTQLLAVDSKERIHLIKPAISRISEWSTITPTHAASNCKINAISAFNDEQIFVGYVDGVIIDVIHDTALPQQFIEEPIDYLKQVSPNILVASAHSAQKTVIFQLEKIDPLQPNDQWPLMMDVSTKYASLQEGQYIILFSDHGVCHLDIANPSAFVKPKDSEEYIVGFDLKNSLLFLAYENNIIDVFRLIFSCNQLRYEQICEEEIAQKAKISYLVATDDGTMLAMGFENGTLELFAVENRKVQLIYSIEEVHEHCIRQLLFSPCKLLLISCAEQLCFWNVTHMRNNQLEREQKRRRSRRHKQHSVTQEDAVDAAPIAADIDVDVTFVADEFHPVNRGTAELWRNKRGNAIRPELLACVKFVGNEARQFFTDAHFSHFYAIDDEGVYYHLQLLELSRLQPPPDPVTLDIANQYEDLKNLRILDSPLMQDSDSEGADVVGNLVLEKNGGVARATPILEEASS

SEQ ID NO: 14929 - DNA, 12438 bp, DROSOPHILA
gtgttgatgctgtgcctggtgtcgctgctctttgtcatctgcacggttttgtgagaaaggatcatgctggaggtgtacgaggaacgatacggaaaggtagtgcccatgcaggatgcggctgttcagctgctgaatcgctaccggatgctggccagtggaaatgtgcacaattgaaggtgattgctttttggcactgaacggattgtgggtggacaatagcggcacttgccacagcagtaagtgtggaatatcctgtattcctgtagaatttcgtattttcatttaacgtttgtgatagtttttatattctgttgaaacaaagtgagcggacgacgaccatatcgataagcttaattatcaacctacgatggtacataatcaatacaacaaactgtaatcttccatttagaaccgttgaccgataccgatgttaagtgcattatcattattaatcccatagttgaacttaggtatgatgtagtgaaatccattcctggaaataccgggaacttacgagtagaagggtatagcccccatagtcacaacgatatacaattattacaaggcatgaacacatgtgtagattagttatggaacaacgatgcggatacttaatattgataatggattgtggaagaggaagcccacccagtgttattctaccttaacaagttacatgtgacttagactgttgttagataataacaatattatacatgttcatcatgacaaaccaaaatattccagtacatctagtagataaaccacaaacgaataacaaataacacaaaaccaaaatcgtagtaatcaaaattagcgttatactatattgttacgattgacttgacaccaagtaaatcaaaaacatgcagatattaatatttggaatagcctatacttatacacatatatatatatattttagtatacaaaattatattgaataaactttaagagactgaatatccagtagtttccttagagtgtcaaaaacggtgagtccaacacaaccaatttcatttatttgtagttctcttttattgaaagataaaaattttaattttttcattgtctcttttttgtaattatatatatttttttattgctatatatatctatatacacatgctaatgtatatttgaaaatttcaagtcaagacgttcaaaatgcattttccaaaaatacaatttgtttttaatgctttgtgttactaaagtagccgattttgtttagccacaaaatgattttcatgttcttttgtgtgtaaagtagaagacatttttaaattaaacgtaaagcgagaaaacatattaaaaataatggaatgttcgttcttacatactcgcgcaatagaaatacataaaataggtggcttttgttgagctactcgggcagctcccttaaataagtttttaactcaattttgcaaacaaaaagttcataaaattaactaaaaatggacggtattctgtgatagaagaaatttcaataatgccgtcagacagaaccaaagactaaaaaaaaaaacataagtgcaaaatgtagccaaccaattataaatcaaatcttagcatttacttgcgcaaaacaattggcagtgcatggaaaagtattttctgtctgttatgcgtggtgagccttttccgtgtctatttgattttcacttcgttctcatctattttttttttatcttttggtgtgtctgagtggtcgctgttgcgtgcctaaggcgatttaaaaacgatttatgtgcatattcttgcgaccggtttagataaagatctctgttcgcttcctgacttgatggccagtagttgagtgcaggacagcatcgtctggatcgtcagctccatcggcaccctgatcctcgtgcgtcaggtagtcgcctttgtgtcggtgcaaatagcgaccgataaggaagaacataaggatcagcagcaggaagagaatcacaagcagacctgaaagaaagttttgtatcactaatatgtttcagtgccagaaaatgattttacttacatgccaacagcacagagtcaacttcattgtatgccttgcgcaacttctcctcatccaccaagggtggtggcctagtctcgatttcaatgggcggatgcgtaactggctccactccgcagaaatcttcagtcaattgagctataacaacatacgattaggtttagattgtactactaactattctgtaattgaaaatacttactgcccaatgatttgacattcttgggaggattctgctggaacatcagcttcagtggatagatatcatcgaattgaactcgcgacacacaacccacaaagccatctgtcatagattcatttttgccaatgtacatgtactggatattgttgaattgagcatccgctgaggccttaatatcaaaattatactcgaccggctcgtagttgtcaaccttcaaaaccactgtggatccaccattcttgcgcataaagtgcatatcgtggtactgacccaggccaaaatgttttttggggaatatgatttcctgcctctcgaaaccgaaatcaaatacacaacgcaaatgacctgaaagaaaacgatttgaatatgaagtggttctcactaaaaaatgtatgccaatcaatttaccagaattcgatatttgaatagttaaatattcgccagttaggttggaagagaagccaagcaggaatcccttcggaatggtggtggtgaaaccgacgcgaatgttctcggcaattgtggagcggaaggaaccctcgaactcgtagcgaataatcgaactggagcgtaggttgacaccaatctctgcaataagtaaatagaaattgaataagatgcaattactgcactatccaattacccaccatctgcgcaaataggtcctttgaatgcgctccaacggcaatcgcagctgtagccatcgtatcgctcgatacaagtaccattgtttaggcatggatttgattcacagcgacccacgcaaccggtgctgatgccgtataatccacgcttggagtattccttcaagtcaaccatctttccgttcagcagcagtgcacgaatgcatcctacgtaaccatcgcggtactcagtagtggcgccaatcaccagatccgatgttaagtgaagtgcacgcactggacccggcggctctcgaacctcagccttgatagaaccatcaaccaccagacgagcctccttcctgttgcgctcgacactaaccgtgtgccagttgttgtcgttcaggtgatagcttgtgcccacattaacgcccagtggaccacttcccgcctgatactggaattgcaatttgttgccgccattgagacttagcttaatgtaatctgtaggtccggtagcatggaagatcacagagttctcttgtgtggtacggaattccagataaatatctccagagtgacccatatcgaatggtggtaagttaatagaagcatcggcaatgcggaaggtcaccacattactgaacagatcatcgccctcacagcgcagcggtcccagagtatagcgacccattttctcgtccaacggagttccagtgtcgccaaacttcacagctcgcacgggaaggtattccttctcccggatatcaccaccatcctccatccattccagactgttcgaatcgcagttgcaccactttgtgggatcgtgacacttgcccagaattccacattcgcacttacgagagccaggtagagctccagcccaatagtccatcggttgattgtggcgagatatccaccaagagaagggacggaaatttccggcctcagctggatacaaaattctattataactctgaatcaattcaaggaatcgcattactactcacatggcgagttgaagagtcgggaggagcggcaggagtagctcaggcgctgccagcagctatgagaccgattcaacagagcttcaatttgcagttggttggcatcgtacatgatggactgctcaaaggagccaggctcctgaaaaccatctactgttgtggtgtgctcttgactgtgactgagggtggtaatcacgcgtccatccgctgcaaaaacatcaatcaatgtcataagttttataaaattacacaatttagggtgtatctacacatgttttaaaccatataatatgtatgacatattacagaggatataataatttgattgatggtaatttttccattttcaatttaaggagtaaacaaagaaatgtaggagttctatacaattcaagtgatatccacttacagtagaactcgcaggtcactgggaaaggttctaggggaccactgccatccacatcgagattcaagttcacacgctgctgcacatgctggacattcttgagagccaagcaggacaatggattgtttgctaaataagaaaaaacaaataatatgtaaaaacaagatcgagttgaaaacatgtgagaactcacatgtatggcaaacagctccggcgtagccagtatgtccgcaatcacagaagaactccctggagttttggtgacaaagtcccttatgctggcaaggattcgggttgcagcgatcaatcatctggcaggcatcgacgacgacatcatcgccacagcaaacctcctcgcccttcacccagtcctgcggtaatttgtaatttccatccaccgaaattaagcgcatgcaaccgacaaatccatttttgtcctttccaccagcaatatagtactgtgctccagtggcaacctgcatgctctttgttgtggtcatcggtctctgatcaatatttaaaatcaagcgattcttttcgatggatataacgaacgaatgccatttgccatcattgaactgatcatcgtagttgtccagaatgattcgcgctttgtccttgactttaagatcaattttcactttgccaaactccaaaaagacctttagataaccacccgaatagaagtcgtgatgcagcattactccagtttcctcgtaagtacggaaatagaaggagacgttaagacgctgcgaattttcataacccttcaaacggacgaacgacgaacgggtagtgaaggtcaccggataaatcggaggcgaaggacacgcgtagatcgtgtttaccctagtgaagagatatccctctcccagttcagtgctgtctttcatcactcgaataaagttggtcgaattaaagtagatgttttctaagcagccggagaaattttgttggacaatcaagccctcttgtacgttgggcacaccacctagatacagctccctattaagattcagtcgtgtgaactcgccttggatgcgtcctcttacgatgacacgatccactgagaagattatgtccctttgattccttgagatcacaacgtcatgccacacattatcatccagcaggctgcccaccgataaggaggtcatcacccgcgatcccaaatccaaattcagcaccattttgttgtccttaagctgcagggcatagtaatccccttgtgtgccacgcgaatacatcatcactccgttggcaaaggccgtcttgaagcggaagcggatggactctttggtggaggtaatgggttcccgcctcagatcatagcgcaccaagccagtgccattaaagtataggttttcagagactgaaagaaaaggtttgggattagaaacaacacaatatcaatgaatccattcaaaatttactgtaatcgcagccgtagagctccacacgcatggaaatacgatcgtgccacctggtgggattgatcctcacccattgggcaataatgggcacctcgaagacgttgtaatggatagagttgccatcggagttgcccttgaacatctgtgatggatatcatacatatacattaatattaaaacaattaataaacaaaaaagggtagttcaaagccagattctaaagcattaatccatcgccatcctttaagccgggattagttgtgttttaagtgtagtcttagttctaggattagtcacagtacctgcggctcgctcgtaggattcacgtaggagcgccagaactcgccatcatccgaatattggacaatgtactccgtcacgaactcatccgtatgcatgcgtcccatggtggcgatcttgcgcaccatgcgcggatctcccaggtcgagtgttagaaagtggttataggtattctcgaccggtgtccaagcagcgttacctgcacaaggtgcatttaccaatctagttagtcgcagtgtcagagtgtggagaagggtgtggttttttttgtaacagaagtaatctacagaaccattagccaaatgagtaacaaacgcatgcgggacgaattaaatcataaaataaaaaccaagcacaaaagcaagcaaaagtgttaatgaatttatgtaaggataatccgctttcgcagattcagggttcacccaaccaccattggttttcacagagaaaaaaattaatatgtatcctcatcgaaatgaaatatgaacgggaatgcttaatggaaacatactagtttcttttctgtgcaataaaccaccaccaaaagcgatccattttctctaggattagcgatacacatttccaattgtatgtggtgatcaattgtttaccttgacattgccgcccggctctttatagtcggcaaactctagatcggttatgccatagctaatggtgtactcggtgacgtactcattgctatgtggtcgtccttgcagggcgatgtgcgtcacgttccgcaccacgcccaggtcaataatcagacgctggtcgaaatccgagttcttcgcggaccacgaggtgccagctggggttcgcaaatggtcatgggatgatgggcaataaaataaaaatgatacaatttaaaccaaaacaaaggcaacataaaataaacctaaagtgggggggggggggggcaaacaaacagcaaatgggagttctacgctctataattgcctaaaactaaggggtttaaaattacgctaaatctgcagcagggggtgttttcaattaataaaccataatttaggggcgatcgcgattgacagctgcaagtggtcgaagtccttcagcacaaggatcaacccctgcccaaaaagtgaaaaaggatttgggtagcccgagggttgagttgatggtgtcaacacaaaatgggagagttcgcaaatggttaggcataaacaattgcagtcgtgtgcttttgttttaattgctcagcgcgccaaattgcaagccggtgtgacaaaatagtgtgagaaagtccaaactgcacagatttctgagcgcacaatccattccccaatatttttataagccgcattcaagttgtctttgtccgacgttggcaacgtggcatatcagccagccatcgtgttcccatcgataaaactttcggcaattccaaaaataattcaaataaacgagccattcagtgctacccttgcggatggttatcctgttggcgcataaattcaaccaaaaccaatgtctggcccctgtctgagttccttcccgtttacgggttcctaaattttggtttatggccttttaagcatatttccggcttcgtttcgtagcgtttgtttatccagtgccaggcaaacaaacgattttttgttggggtgtgagcgctgcgcaacatgacaacacaaggattacaaactattccaaatttggcacacaaccattgagaaaatataaatgcatgtttattctagggataacgctatttttaggagctacgtttgcttggcttagattccttatagttcctatacatcatgatcgcttgtagggcttaagaagagccttttggcagtagctgatcacttcctcaagttccgaatcttcactcttcacgagaagttcctcaacttgcagaaacttgaactttccacgctcctgtggcaagcaattccggaatgcaatggccgcacagtagtcctcctgcagtaaatgctcctcgaaatgccaattgtccatgggttggtcgtggcaacgcagactagtaccgatcagaggggaaacatctgtctccaaactgcgagtagtgtccactgagaagctgatcttttgcagatctacagtgatgccaacacccagctccttgacgtacgcctccttgagacaccagtgacgcataaaggccttcacctgctcccgttcatcatgatgcggtcttccaatataactccattcctccgccgaaaatttgctcttcatcaggccaaagaattccgacagaggcttgccaccattgtactcgatcttcatgacatctgtgccgattccaaagtcgggatcactgctctctcctgcaatgcccgctagaagtaccaggcttccctgatgggagacattgaagctgagaggtggcccatcgtagtcctcccctttcacccagtaaggtttacccctcacatcccgggcgaacttcacttcggccgacggcaatccgctgcacgtgctcacatattttcgcatgaaaagacgaccaattagcgaggacagaaagtcatcgataaagtggaacttcataagccgagctcgttcctccggttgaattgaggccaccgcctggctcagttgaggtagtgtgggcctccagctgcccaggtcaaaggcccagcgggtgcagatgtgtttgctcatttcaatgcgttttgtaactatctaattgcttttataatcattgttttcagggcgttttcgctttgcaatgttgtttttaattcgctattgtgatgcagtatggccagaactggagagggtaaaaatcccccagcgattacgccttataaatatactgcaaatatactgctccaccaaatgcggggtgtacccattttcattttaaaaaattaagaaataatgactatctttaatttaaaaaaaaaaatgggatagctatatgtagcatttaaaaaaagcaatctaataacctgtatatatataaaaatgtgtacttaaaaaggttctattaaaataaaaacatattatcctatgaatttttggcgcagcatttcgaaataataattgctaataaaacaactgaaaggcaactaaactttcgaacgaataactttcaacaaaaaatcaatattactcaccgtttagtcgtgctttgtcgggtcctctttccgtcaaggatgatgtggccgtgaggacggctctttccatcagcggctggttgcaatcgtagtcggagaaatagtccgtgaaggcgtctgaaagagtgcaatatcgatttataaatatccggaattccatgacccatatatgtacgagtgtacattgttgggcgaaaaaatgaaacgcaaactgtcacggacgcaattaaaattgagatatgaagaatctgtttggatggcggccaataagctgaagtactccagccgggacataatcattggcctcctttttatgggcccataaagaaagccacatctataaggcagcaagaagtaaacaaattgactgaggagtaaatatttgctatttattttaagagttcttagttctctgttttccgggtaatttaagtcgtacaagatatattgaatttgcttgtaatgaataaatatcatataaatagaatctatacaattgaatctttaaatttcacatgaagtccaaggaaaattcctatgaattaagacaatcagcattaaattggacataaactgatgtaattagttgctttatttagaatattttactcttaaacatgtattaagagtactaggtactagttagaaatatttcttattaagatggttccactgttttaagaggcagattcttgtctcatatttgcaccataatattttccgttgacgagagtcttttagcccctaggatccgtgacaaaagcatgcggatgtgggggccaggtcgtgtcggaaatccagacagttgcccctgtctgccgcaacccccaagaaattgtttacaatgggtgcagcagtagctcctcctaggcaaacagcacactggcattttcttagcggagtgggggaaaacaacccttgcgaggtcattcggagttcgtgggcactttaagctgactttgagtcttgggtggagtggtacaaatcaacctgataagctcgaaaggaaaccgaggaaacacgcatgacaatcttctggtaaataacacaggaacatatgtacatacatatatagccagtttgaactactttttgctacataattgcccaatggtgattagaaagaaaacgaaatacatagaatttggctaatgttctaaatgaaacaaatatgacgaggtctgaaaggccatttccgtccatctgggggaaactcgaagtgcgaatgatgctattttcgaggcaataagaaccgaaataaattatggaaatcgaccaaagtctgggaggatatatgtcggctgtctgctttcgacgcttcaaggcaaattaattgcgcggcattgtttatttttagtcataaaaatgtttgcatatcatcgatagattgtttatttttcaagatatgtggaaatttgtggggaaaagcgcttaagtctgttgacatatggaaggataatgataaaatcacctgtttcacacagcatcatcaatcagcagatgcttcttatttgccgcatgcgcatttgaaaagccggaaaagaaggcaagcacaactggggatgcaaccggcaaaattttcgaattgctcccccgggaagcttcataaaagtccggaaatcaagaatctaaaaccccaatgcctttgctcaaaacgaacgagtaaaaacgggcgttgttaagcggcatttttgttttgccaccgctattcgtaagcaaccgtttgatcgctctcccgttctcaccaaaactctcgcgatcgctaagagcgagttaaaaagcgaacaacgggccaaaggaaaatggaagagcgagtcttcagctttggggaacacgcccaaaaagttggcttacaaacaatcgacgttttatgtcacatattgctgggaaaatcgagccgaaaggatctgaattcctgggttagtcaatgggtatcactggtttttacctgcttgcaccgatttaatgccattattgaccagcaataggaggcataacaatccaaactgaagcgaggaaaatgctgctttcgtattgctcctgggcggcctcatcttggaggctgttaattaaacactatcgcttggtagatttataaacacatctatattcgatttccgaagaagtttaacaccaaaatgcacttttccgctggaaaaaccaccgtgaaaagctgatgatttgtggcaacgcgtccgcggtgttaaaaacgttggactgcactttacgctccgctttaaatcgattttgaatttatgtaatttatccactgggtgtacggctccagcagatcacgcccacttcggaagagtttcgtttgaattaagaaaataattatcgcaacgcggatgacacacgaacagaatgtctcgctgccagtgtgaccgtgactcaaacgtggcaagataccgagggagtcaccaactgggtgcttgtcgcgtgagctaagctatcgtgtgattaagtatatgaagtatttacaaattatttcaactgctactatgaaattaaatttggtcactaataatagctttccgttaacatttatattaattcgtgatagaaatttttttgcatagttttaaagccatgtaatatcattgcaaaatgaatgatataagcaaagtatacaaatgtaatggcaaataagtcaaatcccctctaaaatattttttaaaaatctagttttcttatctatccagaaatttgaaataaaatacatattttacaaaaaattatttcgaataccaaatcgataggggcgtaaaacatcgatagtcgtagtagtatcattatcgatagttggtcacactgtttatccctcttttcgccaaaaatttgttggcgtgttgtcaatttcctaagcatttgatcggttttttcgttttgtgtgtaacccggagaggataaaacagcgacaatgtacggtggagacgaatacgcaaccaactcggtgagtgcagccagcgaggaatgattcattctcgggaaaccaatccccggactccgccgacaacataacccatcttttgttgccctcgcacaaatacaaaactcactgggatgattttaaagccgttttacgacttggcatagttggtgtttagatcatcataggtcattaagcactgataatccgtgggccactcctttgacacgttcctttgctatttggaaacgaatcctgtagtccgggggacaccccggcgccatgtggtatattattggtatcggtgtacattattaataagtcataataccttctacatttttgatttgcgtgcaattttagatggtgtgtacacacctttaaagaacacatgaatatattcta

SEQ ID NO: 14930 - DNA, 4906 bp, DROSOPHILA
ttattttcttaattcaaacgaaactcttccgaagtgggcgtgatctgctggagccgtacacccagtggataaattacataaattcaaaatcgatttaaagcggagcgtaaagtgcagtccaacgtttttaacaccgcggacgcgttgccacaaatcatcagcttttcacggtggtttttccagcggaaaagtgcattttggtgttaaacttcttcggaaatcgaatatagatgtgtttataaatctaccaagcgatagtgtttaattaacagcctccaagatgaggccgcccaggagcaatacgaaagcagcattttcctcgcttcagtttggattgttatgcctcctattgctggtcaataatggcattaaatcggtgcaagcagacgccttcacggactatttctccgactacgattgcaaccagccgctgatggaaagagccgtcctcacggccacatcatccttgacggaaagaggacccgacaaagcacgactaaacggtaacgctgcttggacaccggtcgagaatacctataaccactttctaacactcgacctgggagatccgcgcatggtgcgcaagatcgccaccatgggacgcatgcatacggatgagttcgtgacggagtacattgtccaatattcggatgatggcgagttctggcgctcctacgtgaatcctacgagcgagccgcagatgttcaagggcaactccgatggcaactctatccattacaacgtcttcgaggtgcccattattgcccaatgggtgaggatcaatcccaccaggtggcacgatcgtatttccatgcgtgtggagctctacggctgcgattacatctctgaaaacctatactttaatggcactggcttggtgcgctatgatctgaggcgggaacccattacctccaccaaagagtccatccgcttccgcttcaagacggcctttgccaacggagtgatgatgtattcgcgtggcacacaaggggattactatgccctgcagcttaaggacaacaaaatggtgctgaatttggatttgggatcgcgggtgatgacctccttatcggtgggcagcctgctggatgataatgtgtggcatgacgttgtgatctcaaggaatcaaagggacataatcttctcagtggatcgtgtcatcgtaagaggacgcatccaaggcgagttcacacgactgaatcttaatagggagctgtatctaggtggtgtgcccaacgtacaagagggcttgattgtccaacaaaatttctccggctgcttagaaaacatctactttaattcgaccaactttattcgagtgatgaaagacagcactgaactgggagagggatatctcttcactagggtaaacacgatctacgcgtgtccttcgcctccgatttatccggtgaccttcactacccgttcgtcgttcgtccgtttgaagggttatgaaaattcgcagcgtcttaacgtctccttctatttccgtacttacgaggaaactggagtaatgctgcatcacgacttctattcgggtggttatctaaaggtctttttggagtttggcaaagtgaaaattgatcttaaagtcaaggacaaagcgcgaatcattctggacaactacgatgatcagttcaatgatggcaaatggcattcgttcgttatatccatcgaaaagaatcgcttgattttaaatattgatcagagaccgatgaccacaacaaagagcatgcaggttgccactggagcacagtactatattgctggtggaaaggacaaaaatggatttgtcggttgcatgcgcttaatttcggtggatggaaattacaaattaccgcaggactgggtgaagggcgaggaggtttgctgtggcgatgatgtcgtcgtcgatgcctgccagatgattgatcgctgcaacccgaatccttgccagcataagggactttgtcaccaaaactccagggagttcttctgtgattgcggacatactggctacgccggagctgtttgccatacatcaaacaatccattgtcctgcttggctctcaagaatgtccagcatgtgcagcagcgtgtgaacttgaatctcgatgtggatggcagtggtcccctagaacctttcccagtgacctgcgagttctactcggatggacgcgtgattaccaccctcagtcacagtcaagagcacaccacaacagtagatggttttcaggagcctggctcctttgagcagtccatcatgtacgatgccaaccaactgcaaattgaagctctgttgaatcggtctcatagctgctggcagcgcctgagctactcctgccgctcctcccgactcttcaactcgccatctgaggccggaaatttccgtcccttctcttggtggatatctcgccacaatcaaccgatggactattgggctggagctctacctggctctcgtaagtgcgaatgtggaattctgggcaagtgtcacgatcccacaaagtggtgcaactgcgattcgaacagtctggaatggatggaggatggtggtgatatccgggagaaggaataccttcccgtgcgagctgtgaagtttggcgacactggaactccgttggacgagaaaatgggtcgctatactctgggaccgctgcgctgtgagggcgatgatctgttcagtaatgtggtgaccttccgcattgccgatgcttctattaacttaccaccattcgatatgggtcactctggagatatttatctggaattccgtaccacacaagagaactctgtgatcttccatgctaccggacctacagattacattaagctaagtctcaatggcggcaacaaattgcaattccagtatcaggcgggaagtggtccactgggcgttaatgtgggcacaagctatcacctgaacgacaacaactggcacacggttagtgtcgagcgcaacaggaaggaggctcgtctggtggttgatggttctatcaaggctgaggttcgagagccgccgggtccagtgcgtgcacttcacttaacatcggatctggtgattggcgccactactgagtaccgcgatggttacgtaggatgcattcgtgcactgctgctgaacggaaagatggttgacttgaaggaatactccaagcgtggattatacggcatcagcaccggttgcgtgggtcgctgtgaatcaaatccatgcctaaacaatggtacttgtatcgagcgatacgatggctacagctgcgattgccgttggagcgcattcaaaggacctatttgcgcagatgagattggtgtcaacctacgctccagttcgattattcgctacgagttcgagggttccttccgctccacaattgccgagaacattcgcgtcggtttcaccaccaccattccgaagggattcctgcttggcttctcttccaacctaactggcgaatatttaactattcaaatatcgaattctggtcatttgcgttgtgtatttgatttcggtttcgagaggcaggaaatcatattccccaaaaaacattttggcctgggtcagtaccacgatatgcactttatgcgcaagaatggtggatccacagtggttttgaaggttgacaactacgagccggtcgagtataattttgatattaaggcctcagcggatgctcaattcaacaatatccagtacatgtacattggcaaaaatgaatctatgacagatggctttgtgggttgtgtgtcgcgagttcaattcgatgatatctatccactgaagctgatgttccagcagaatcctcccaagaatgtcaaatcattgggcactcaattgactgaagatttctgcggagtggagccagttacgcatccgcccattgaaatcgagactaggccaccacccttggtggatgaggagaagttgcgcaaggcatacaatgaagttgactctgtgctgttggcatgtctgcttgtgattctcttcctgctgctgatccttatgttcttccttatcggtcgctatttgcaccgacacaaaggcgactacctgacgcacgaggatcagggtgccgatggagctgacgatccagacgatgctgtcctgcactcaactactggccatcaagtcaggaagcgaacagagatctttatctaaaccggtcgcaagaatatgcacataaatcgtttttaaatcgccttaggcacgcaacagcgaccactcagacacaccaaaagataaaaaaaaaatagatgagaacgaagtgaaaatcaaatagacacggaaaaggctcaccacgcataacagacagaaaatacttttccatgcactgccaattgttttgcgcaagtaaatgctaagatttgatttataattggttggctacattttgcacttatgtttttttttttagtctttggttctgtctgacggcattattgaaatttcttctatcacagaataccgtccatttttagttaattttatgaactttttgtttgcaaaattgagttaaaaacttatttaagggagctgcccgagtagctcaacaaaagccacctattttatgtatttctattgcgcgagtatgtaagaacgaacattccattatttttaatatgttttctcgctttacgtttaatttaaaaatgtcttctactttacacacaaaagaacatgaaaatcattttgtggctaaacaaaatcggctactttagtaacacaaagcattaaaaacaaattgtatttttggaaaatgcattttgaacgtcttgacttgaaattttcaaatatacattagcatgtgtatatagatatatatagcaataaaaaaatatatataattacaaaaaagagacaatgaaaaaattaaaatttttatctttcaataaaagagaactacaaataaatgaaattggttgtgttgga

SEQ ID NO: 14931 - protein, 1284 aa, DROSOPHILA
MRPPRSNTKAAFSSLQFGLLCLLLLVNNGIKSVQADAFTDYFSDYDCNQPLMERAVLTATSSLTERGPDKARLNGNAAWTPVENTYNHFLTLDLGDPRMVRKIATMGRMHTDEFVTEYIVQYSDDGEFWRSYVNPTSEPQMFKGNSDGNSIHYNVFEVPIIAQWVRINPTRWHDRISMRVELYGCDYISENLYFNGTGLVRYDLRREPITSTKESIRFRFKTAFANGVMMYSRGTQGDYYALQLKDNKMVLNLDLGSRVMTSLSVGSLLDDNVWHDVVISRNQRDIIFSVDRVIVRGRIQGEFTRLNLNRELYLGGVPNVQEGLIVQQNFSGCLENIYFNSTNFIRVMKDSTELGEGYLFTRVNTIYACPSPPIYPVTFTTRSSFVRLKGYENSQRLNVSFYFRTYEETGVMLHHDFYSGGYLKVFLEFGKVKIDLKVKDKARIILDNYDDQFNDGKWHSFVISIEKNRLILNIDQRPMTTTKSMQVATGAQYYIAGGKDKNGFVGCMRLISVDGNYKLPQDWVKGEEVCCGDDVVVDACQMIDRCNPNPCQHKGLCHQNSREFFCDCGHTGYAGAVCHTSNNPLSCLALKNVQHVQQRVNLNLDVDGSGPLEPFPVTCEFYSDGRVITTLSHSQEHTTTVDGFQEPGSFEQSIMYDANQLQIEALLNRSHSCWQRLSYSCRSSRLFNSPSEAGNFRPFSWWISRHNQPMDYWAGALPGSRKCECGILGKCHDPTKWCNCDSNSLEWMEDGGDIREKEYLPVRAVKFGDTGTPLDEKMGRYTLGPLRCEGDDLFSNVVTFRIADASINLPPFDMGHSGDIYLEFRTTQENSVIFHATGPTDYIKLSLNGGNKLQFQYQAGSGPLGVNVGTSYHLNDNNWHTVSVERNRKEARLVVDGSIKAEVREPPGPVRALHLTSDLVIGATTEYRDGYVGCIRALLLNGKMVDLKEYSKRGLYGISTGCVGRCESNPCLNNGTCIERYDGYSCDCRWSAFKGPICADEIGVNLRSSSIIRYEFEGSFRSTIAENIRVGFTTTIPKGFLLGFSSNLTGEYLTIQISNSGHLRCVFDFGFERQEIIFPKKHFGLGQYHDMHFMRKNGGSTVVLKVDNYEPVEYNFDIKASADAQFNNIQYMYIGKNESMTDGFVGCVSRVQFDDIYPLKLMFQQNPPKNVKSLGTQLTEDFCGVEPVTHPPIEIETRPPPLVDEEKLRKAYNEVDSVLLACLLVILFLLLILMFFLIGRYLHRHKGDYLTHEDQGADGADDPDDAVLHSTTGHQVRKRTEIFI

SEQ ID NO: 14932 - DNA, 4069 bp, DROSOPHILA
gcgtcaaggtggatctgggaataccctacgagctgtgggacaagcccccggtggaggtcacccaaatgaagacccagtgcgaaaacctactggaggagtacgaggaaaccatcagcgaatggtactttaagcaccaggatgagaagtcactgaagaagcatctctgcgaggaccatgtgctcaagaaaaaggccgaaagggaatgcctcaaggagcagcttgctcctccggaggctaaaaaggccaaaagggaaaaagccaagggcgacaaggaggagctgtgagccaaataatccaagtatatcctaggaatccctaccatattgtaattccatgtcgaaaaatgtagatgtagtgcagctgttgtcgatgcaatttttaaaagtaacacaaattttagtttttgaatgaactcaagcattgacaaactaaatgtagtagttacttaaattccaatgatcttactttttttcgaaatggaaatcattttaagttttaccacctatagaacaaagcgaaaagtgtttaattagcttaagtgaactcactatgtctctcaagctaatctgtataacttccacaacgactgagccacagaatgctactgaaagtttcgcctggggccattggcttattgatttcggccacgaattggggtcgacaattaaaagttgactgccctcaatgaggtggccagtcataacccccagccagaaattcaggtgttcatgccatgtccatgtcaataaatgagattttgcgcattttctaggaacctacggcactgaatggaagagagttatccttaaatacatgtacattttataactaacatttagtatttacgattaaatatagattatctgtgcatacacattttgattttactggggcacctaatatgtcgtttaaaaggtatctcgtcgcgaaacctttcaaagtttaaaaacaaattattttgaatatacccaatttgcattaaatgagtttgtttaattgtctgtaataaatacttcgcgtatatttcaaagtaaaaaatattattataattagtattggattttccatcattaggttctaattcgaaatcactacgggtatcttttagtcgtggagttttcccgcccaaacgagttttgtaaattcagaatctaattcgcagtggcgggcgaaagaacccctagttatccataagcttagagcttcatcacatcccaaggatcgtccatatagtgcaggatggctttgtcgtgcagtctttcgccaaaaacctccttaagcaggcgtagaacgcattcctcaatgaatgccacctgatcctgggggcagtagtcatcttgagcggaatgggccattgtaatggccactggaggaactggcaggcgctgtaagaaacgcttgaagtttgcaaagtacgtttccaactcttcggcgatgctgatgtggtggggcaagccattattatcggtggtgctgcccgaatcgaagatcaaatgccagtcgatttcatcgtctggatatttctcctgcagctgatcggccagtttcacaatcttggcgtacacttcgggcgtgaccacggtctcgtccggcttttccagtccctcgaaattgcgctcctcctccagatgccagaaaatcgtcttcagtgcatccaactgagtctgtcgcctctctgccgtggccaaataatctgctatagtagccgtgcccgacttcttcaccttctccacgctttcgaagtggaagatctcctttagctgattgtagcaatcggcatccttgtatatttccaagaaggggttggaggtgctgaaaaagtcgaggtctatgtccagcacgaatcccttggcgtccttctccgttaggaattcgttcggattgaggctttcgttgtctgcatcgtgaacctgcagctccacgctcttggcatcctgcagatcctccgtagtgcagtagttgccgtcggcaataaagtagtccaacggacagtccactccaatgcgatcgtccttttgtccaaccttaaagtcgtgcctgccagtgggcagctgctggcaccatgagttcttcagccacacgacgcggttgaaatgtcctaagagcaagtaatatagcaataagttattattttacactaatttctataagaaaatgcaattatagctaattaatgtcattagactcatcacagttaataagtttttggtttgaaatcctttaaatgtagaaaggaatctttttgacaacagtactcaatggatatttagcagttactaagagataatctttaaatattaagttcttagtaaaattagaccatagaacttttttatttgtccttttacattgttttctatttctagaaataaaataatagcatttaatattatatttctatataatatagttctcttcgattccccatagaaatcctcacctgcataaagtgtgggcatgatccagttctcgatgctaagctcatttaacatggtttccttttggtaggtggaactggcggcaatgtgccgtggaatgaccagatccggatgcgagtcgaagtggacaagggtgttgttctgcagcggaaggtggcgggtggcaaagcagcggtagatgaactccagcacatcgttgtggtagtcgacgataaagacggggatgcgctggaaatgccttgggctgatggtgccgccaatctggacgatgccctcgccatcatcctcctcctcatcaacgctctcctcgctatcctcgtcttcctcccgattctcctccttttcgtctgcagtcttttgtctctttgttggcggcgcctcttctcccccacccgccgcaacccactctcccgaagtcggctcccatttcttcgaactttcgggactttcacttggcgatagtttttttagagcagccgcggcactctcctggtccagcgtatccgattccatttccctcgggattactttgactgtacaactgggtccttagcacactgttcaattacttgcacggtaagcagacttaatttcttttgtatttaatattttgggggtctttgaccattaacagctgtttggcagtgtgaccagattgctgtctagcacaagtttcccgtattgctaaaaatggtagccctataataaggtcacattacataggacccaactatcgatgtatcgattaaagttgtgtccgtttaatttaaaagttttttctacacattttccatatattgtaccttattttgtcaattacttgagacgttgagtattttttgatataacttaaaataaatttgattttttaaagcattcgctttgaaatctagaatctagaatgtagaatctagaaaatgttaaaaatgttaaaaataacaaaatttattaaaaactaaaaaaaaaaatattttaatattatcaaaatagtacacctatttctatattcatatcactttgatagtggtaaacgaaaataagaagtaaggagagagtatctcatagtcgagacactagggagtaaccttcttcttgcgactctcgtgcaaccaaggaaagatttgaatttcaatttgcaagttcttgaaacaatttttcgaacagcagtgttcattaattaaacagcactttataagctcagccagcacacgagctctttgccatccgcaatccaaatgtctcacactcccctccagcaactcgccccccccccccacaagacccttttatcctcaaccttcggcccaccggccacccacatttcaaggttacttcagatttggagactttgcctccaatcaatattccgtgtgtatccgcagcttggacgctggcataatgcgattgccatcgagcgagtgatggggggcgggggtcggggggtgctgagcggcctctggagcttttagcccccaaaaagctggcccagcgttccgcccacgctgcgcagaagcttttcattcataagtttttattatatctgtacatatgtagtaggtatatatttgtatatctatgtgtatatatatacatttgcatttgcagcggagggaatcggacgcccacatggc

SEQ ID NO: 14933 - DNA, 1727 bp, DROSOPHILA
ttaatggtcaaagacccccaaaatattaaatacaaaagaaattaagtctgcttaccgtgcaagtaattgaacagtgtgctaaggacccagttgtacagtcaaagtaatcccgagggaaatggaatcggatacgctggaccaggagagtgccgcggctgctctaaaaaaactatcgccaagtgaaagtcccgaaagttcgaagaaatgggagccgacttcgggagagtgggttgcggcgggtgggggagaagaggcgccgccaacaaagagacaaaagactgcagacgaaaaggaggagaatcgggaggaagacgaggatagcgaggagagcgttgatgaggaggaggatgatggcgagggcatcgtccagattggcggcaccatcagcccaaggcatttccagcgcatccccgtctttatcgtcgactaccacaacgatgtgctggagttcatctaccgctgctttgccacccgccaccttccgctgcagaacaacacccttgtccacttcgactcgcatccggatctggtcattccacggcacattgccgccagttccacctaccaaaaggaaaccatgttaaatgagcttagcatcgagaactggatcatgcccacactttatgcaggacatttcaaccgcgtcgtgtggctgaagaactcatggtgccagcagctgcccactggcaggcacgactttaaggttggacaaaaggacgatcgcattggagtggactgtccgttggactactttattgccgacggcaactactgcactacggaggatctgcaggatgccaagagcgtggagctgcaggttcacgatgcagacaacgaaagcctcaatccgaacgaattcctaacggagaaggacgccaagggattcgtgctggacatagacctcgactttttcagcacctccaaccccttcttggaaatatacaaggatgccgattgctacaatcagctaaaggagatcttccacttcgaaagcgtggagaaggtgaagaagtcgggcacggctactatagcagattatttggccacggcagagaggcgacagactcagttggatgcactgaagacgattttctggcatctggaggaggagcgcaatttcgagggactggaaaagccggacgagaccgtggtcacgcccgaagtgtacgccaagattgtgaaactggccgatcagctgcaggagaaatatccagacgatgaaatcgactggcatttgatcttcgattcgggcagcaccaccgataataatggcttgccccaccacatcagcatcgccgaagagttggaaacgtactttgcaaacttcaagcgtttcttacagcgcctgccagttcctccagtggccattacaatggcccattccgctcaagatgactactgcccccaggatcaggtggcattcattgaggaatgcgttctacgcctgcttaaggaggtttttggcgaaagactgcacgacaaagccatcctgcactatatggacgatccttgggatgtgatgaagctctaagcttatggataactaggggttctttcgcccgccactgcgaattagattctgaatttacaaaactcgtttgggcgggaaaactccacgactaaaagatacccgtagtgatttcgaattagaacctaatgatggaaaatccaatactaattataataatattttttactttgaaatatacgcgaagtatttattacag

SEQ ID NO: 14934 - protein, 470 aa, DROSOPHILA
MESDTLDQESAAAALKKLSPSESPESSKKWEPTSGEWVAAGGGEEAPPTKRQKTADEKEENREEDEDSEESVDEEEDDGEGIVQIGGTISPRHFQRIPVFIVDYHNDVLEFIYRCFATRHLPLQNNTLVHFDSHPDLVIPRHIAASSTYQKETMLNELSIENWIMPTLYAGHFNRVVWLKNSWCQQLPTGRHDFKVGQKDDRIGVDCPLDYFIADGNYCTTEDLQDAKSVELQVHDADNESLNPNEFLTEKDAKGFVLDIDLDFFSTSNPFLEIYKDADCYNQLKEIFHFESVEKVKKSGTATIADYLATAERRQTQLDALKTIFWHLEEERNFEGLEKPDETVVTPEVYAKIVKLADQLQEKYPDDEIDWHLIFDSGSTTDNNGLPHHISIAEELETYFANFKRFLQRLPVPPVAITMAHSAQDDYCPQDQVAFIEECVLRLLKEVFGERLHDKAILHYMDDPWDVMKL

SEQ ID NO: 14935 - DNA, 4613 bp, DROSOPHILA
tggctgttataaaaagttaatagccgttcaagtcccccttccaaaccacttggaaactggtcctgctcctgcgcagtgaaagtatataggaaacggagcacataggcgaagctaccatccaaccgcacaccagaactgtgtaacccattccccgatcccgtagagaatttattgcatgggccgcgactgccgttggcttctgtccatctatctttggctgtgcttttcctgggattttccccaatgcgatggaatgggtactcagaccacagaggacctgcccacaatgccaccattggcagttacattttatggccaaagttcaccagaacccaactcgttccccagccccacgcattctggcgaccaagtggcgccatttttgccgcattgtcatcgatgggaggatgaagatggggatgggcaactgacagggattctagtttatgcttgcgaggacttttcaagaaataaactttttcctctgtcgacatcagcgaaaataatatcgcattcggaaaagtataaaaataaaatgaggacgcagattaaaactatcaagttgaacagttggagatagatttttctataaattgatttttattttcactttaaacatttctatcgagactggaatggacaacatatataaaaacacacttcacttcaattgttttataatttatcagtatgtatattaagattattcagtagaaaacttccttacatcgcaccagtgacgatgcgaaccgaacaaaaacttagtgagacagttcatcataattattaaattaattcactttctggcgtaataacaaaaatgctggctaactagctttgttgaccatttggcgcatgaaaatgggaaaaaagatttatgttgccaattcagtttcaagagccgagcctgatggattcatctcaactctaaagtatacaagatattacaaaaatttgctacgtttacggaattttcgtacttatatagattttgccatttttatttttatttttttttagatagattttcttgtgcttcttataaatgcctgcacacatgatatgcagagttgagaatggagtgaaactttcgacttgacttgctaaaacaaatatgaaacatcttctgttggctattactaagggaagtttgtcttgtggcttcttcgacggtttcttcgttttgtattgcgtggcattgtcatgaggcatacatcattgatcaaatttcttgttcttgctttgattaagtaacgacttgagtttgtattcgtgacctgacttcttaaacagacttctatttaaaaaacaaacagttacacataatggtagagcatgctacgctgaagtcttaaatctttcattttaactaaatttagttgctgcctagtcaggtgtgcgaatctgtttcctcgtgatttctgtgggtgtatgcttgtgtgtttgttattcgttacgatcccaataagtcgcgaattcgcctaatagaactttttcgcctgtgcttcgctgcggtttctgcaaggaataataagttagattgtttagtttcgaatccacgcttaaagattccatgaactcacttgaagacgttgtagatgaagactagcagcagttgcacaacagttacgcttaggaacaatgtgactccaacgcaattgcccgtgggacaattggccacctgcgctgctccctgtggcgctgccaatctgcaaggtaagggaatgcatattgagtatcaaggaggtacttaaaagatgacaataaagtataatagtctaaaactcataaacatgttcctctgaatcaaacttgttaaaactctaatttcataatgtggaatacgaaaaattagtataaatatggctgaaaaggttaaaattaattcgagctcagaataacttcgatgacaacagctttaggaaacttaaaatagactttgagcgtattcctcacctttggcccacgtgggtgatgccctgcttgacctgattcatgccatcgcgcatctcggcgatgagcgtttgtacatcatagccggtggattggatttgtgctgtgggcgcatgcttctgattcgtttgaatgttatcagtgcgcacattgatatcgccaaccagttgacgaatctcgcggatggaactgagcagcatgttctgattagtgagcagaagatctacatcgctcctgctgactgcgccaacgggcagctgttgctgtggcactccgccggcggcgggcggaggcagagcctgtccagcattacgtgagaccagcgacagcgtggtctcctggcggccaataatctcatccactttgcgggaaagttcgcgtaggtgatcggcaatttggctctgaccctgccagatctgacgcagctcacgctggttctccgactcgtagaactcctcccagtcctcctcgtctttgtgctgtgggattatacgaaagttgattatcaaaactagcgataagacatctttatcagctggctgcgtggcaattacctcgtcgggatggtccttcttgtactcctgcttctgtttctccagtttatcttggtattccttgtactcttgcgtaagcttctcctggttttccaccttgggctgctcctgaacttgtccagcggcatgcaacgacgtggtcaggaaatggaacacatcgtggtcatcggccagaccgcccgtggcggcggaaatgccaaagtagccgttcttgggcagattgacgccatccgctctcagacacagctcgtagtcatcgttgttgttggacattccgttgtggatcatgacggtaagcacgttgttgtagtactcgattcgcgcccgtgtagggaagggcttgttacggaaatccctgaggcaaccgctcaggagctgagtggttccatcttcggcatggtcatacagcttggtgccatcattgagcacggcactgatgtaaggattgttgtgcttgttgtcattatcgaaggaatcgaacatgatggccagaccattccagcggtccgaggatccgaacacaggcccattgtagtcacccttttccgtggtgtaccagaaggccaatccatcggctccgatcctgccacgtcccgtcacccggaacacgatctccacgtcccaccagtcgaagttcgtctgtgactttgtccagatggcacccttctgtgagcgcagcgatggcgccacgcgcacactttccgaactggcgatggcatctgaaatgaggagcaacaagttgtggctatagaaacacccgaaaccgtggtcaaaacgacatccaaacaaagtgcctgcgtgtacacttggccgcctcgcgccatctcgctcgcacccatggccgcagaccagcagcgagtgggccaaaacaactgacgtggagctgcgtcttccactcgtactcacttcccccgtactcccaaaacggcacggtgccgtctttctgtgccaaatacggcggcttgaacgagtacttgtactcgaagcgacggtgcacgcccacggctccaggactcagattgccggtcgcctcggagctgggattccacgccaggaagcacaaaatggccaggaatgtgggccgcatctttgcaattatatgttgacaactagtggtgggtgggcgacgatggtgcaaactgatgatatcgataaccagccggcaccgataggcggtggtatcgcactggatgttctaaaagcattgtataatttaaaatcaaatattattttatgtattgtctaccattaacaattaaggtaatataatataaattgattagaacatttatttaggccatccttcgtatataaatgttgaacttaaataaaaccagccatcctataacaattaacttcagcttagatcacaatttaaaattctataagataaaagtttttccatgcattctaagaaacaagaaccaagtgatctaaaaaatattcaggcagcgacaatacaatcgctatcgatttcggtagattttatatcgatatcgcaaatgcccaccaaattcaaaagatcttgttatcactttatgatgttgaggtggaaaaacatttattttgaaaatttaaagtgtttacgtcccgttagaaaataaacataaatatagcaaaatacgcgccattcgcatgtgcttacatagatacatgtttatcaatacgttattgtaaaattatttcgttagttgtttcaattgccttttgcgtgatatcaccaaagtagtattacatccatatctccaaaattcctttagcacagttagcacagtgtgtgtatatatgtttacatctttattctttgtttctgatttcctaccgtttgtagttttcgtagagcttacagctagaattattataggttttaatgcctcggtagcacatagtgtgggcttcataaaatattgttagttgctcagtttacacaagtgatagctttgtgtgcagatcggtgtgtgggggatagtcattaggggcgatcgtgccgcaagtttcgccattttacaaatgttagttacttattttgaatcacaatcactttcgtgttagttctgtgcgcgatcaaaagaaaaactcaaatcgattaaaacaaaatcaaagtct

SEQ ID NO: 14936 - DNA, 2039 bp, DROSOPHILA
tcaacatataattgcaaagatgcggcccacattcctggccattttgtgcttcctggcgtggaatcccagctccgaggcgaccggcaatctgagtcctggagccgtgggcgtgcaccgtcgcttcgagtacaagtactcgttcaagccgccgtatttggcacagaaagacggcaccgtgccgttttgggagtacgggggaaatgccatcgccagttcggaaagtgtgcgcgtggcgccatcgctgcgctcacagaagggtgccatctggacaaagtcacagacgaacttcgactggtgggacgtggagatcgtgttccgggtgacgggacgtggcaggatcggagccgatggattggccttctggtacaccacggaaaagggtgactacaatgggcctgtgttcggatcctcggaccgctggaatggtctggccatcatgttcgattccttcgataatgacaacaagcacaacaatccttacatcagtgccgtgctcaatgatggcaccaagctgtatgaccatgccgaagatggaaccactcagctcctgagcggttgcctcagggatttccgtaacaagcccttccctacacgggcgcgaatcgagtactacaacaacgtgcttaccgtcatgatccacaacggaatgtccaacaacaacgatgactacgagctgtgtctgagagcggatggcgtcaatctgcccaagaacggctactttggcatttccgccgccacgggcggtctggccgatgaccacgatgtgttccatttcctgaccacgtcgttgcatgccgctggacaagttcaggagcagcccaaggtggaaaaccaggagaagcttacgcaagagtacaaggaataccaagataaactggagaaacagaagcaggagtacaagaaggaccatcccgacgagcacaaagacgaggaggactgggaggagttctacgagtcggagaaccagcgtgagctgcgtcagatctggcagggtcagagccaaattgccgatcacctacgcgaactttcccgcaaagtggatgagattattggccgccaggagaccacgctgtcgctggtctcacgtaatgctggacaggctctgcctccgcccgccgccggcggagtgccacagcaacagctgcccgttggcgcagtcagcaggagcgatgtagatcttctgctcactaatcagaacatgctgctcagttccatccgcgagattcgtcaactggttggcgatatcaatgtgcgcactgataacattcaaacgaatcagaagcatgcgcccacagcacaaatccaatccaccggctatgatgtacaaacgctcatcgccgagatgcgcgatggcatgaatcaggtcaagcagggcatcacccacgtgggccaaagattggcagcgccacagggagcagcgcaggtggccaattgtcccacgggcaattgcgttggagtcacattgttcctaagcgtaactgttgtgcaactgctgctagtcttcatctacaacgtcttcaaaaaccgcagcgaagcacaggcgaaaaagttctattaggcgaattcgcgacttattgggatcgtaacgaataacaaacacacaagcatacacccacagaaatcacgaggaaacagattcgcacacctgactaggcagcaactaaatttagttaaaatgaaagatttaagacttcagcgtagcatgctctaccattatgtgtaactgtttgttttttaaatagaagtctgtttaagaagtcaggtcacgaatacaaactcaagtcgttacttaatcaaagcaagaacaagaaatttgatcaatgatgtatgcctcatgacaatgccacgcaatacaaaacgaagaaaccgtcgaagaagccacaagacaaacttcccttagtaatagccaacagaagatgtttcatatttgttttagcaagtcaagtcgaaagtttcactccattctcaactctgcatatcatgtgtgcaggcatttataagaagcacaagaaaatctatctaaaaaaaaataaaaataa

SEQ ID NO: 14937 - protein, 512 aa, DROSOPHILA
MRPTFLAILCFLAWNPSSEATGNLSPGAVGVHRRFEYKYSFKPPYLAQKDGTVPFWEYGGNAIASSESVRVAPSLRSQKGAIWTKSQTNFDWWDVEIVFRVTGRGRIGADGLAFWYTTEKGDYNGPVFGSSDRWNGLAIMFDSFDNDNKHNNPYISAVLNDGTKLYDHAEDGTTQLLSGCLRDFRNKPFPTRARIEYYNNVLTVMIHNGMSNNNDDYELCLRADGVNLPKNGYFGISAATGGLADDHDVFHFLTTSLHAAGQVQEQPKVENQEKLTQEYKEYQDKLEKQKQEYKKDHPDEHKDEEDWEEFYESENQRELRQIWQGQSQIADHLRELSRKVDEIIGRQETTLSLVSRNAGQALPPPAAGGVPQQQLPVGAVSRSDVDLLLTNQNMLLSSIREIRQLVGDINVRTDNIQTNQKHAPTAQIQSTGYDVQTLIAEMRDGMNQVKQGITHVGQRLAAPQGAAQVANCPTGNCVGVTLFLSVTVVQLLLVFIYNVFKNRSEAQAKKFY

SEQ ID NO: 14938 - DNA, 14283 bp, DROSOPHILA
caattttcctttgccttgccgccagatgcattggatgggttcgattaaagtacagagaaggagattccttgttagaagaatggaccgaataatgaacaaatccacgaactttgcgcgtaataatttatatttgtatattattaatcgatttataagctaaatacgtaggtaatgtgtattgtattatgtatatgtagacgttttaatgtaatgcatattttcacaagtgtttttctctttttcgttttcttgagtttaaggacacgcagcctatcagccgccttcgtttatttatgcttaggtttcgcttgcccatgttgcataatttttgctggctttgttttcgttttatttttattcttttaatacaaataaatgtaacgaaatttaactaattctcagcgtgatctctttgccaacgacttgttggacaagttctttgtggtcatccctcagttttgtgctacaaacagaaacggttaacagaaagagtatacggaactcgaataaaacttgtcgtttttacgatatcaaagggaaacatcctataaacaattgctttagacaggcgccctccgaacggaaggcgctcatatgtatgcgtattctataacataaagatacagacgtggtcacgaatccagaagttaaatgttacagtggagtccgaaccgagaagttaactaataaatagctatggttaagtgtacacataacataatattgtggtaggtagttaaaggtagtagtagtaggtaggctacgcagctgcccttctcctctccttctcacgtagtccgttcgattggttatcaattaattatatgtcggaagctggcgcaactcactaacattgcttgattgtgttgggttccttcgcttaggcttacaaaacttacttcataaattatatatgtaaataaattgttgtaaagtagttatatattcatgtatgtatataatcgtacgaaaaattgttgcgttcagtgtcaagtcagtttcagctttggatctggcccatttctggcagggattggctctgcccatggcttaaatgacatctggtctaaacaattcgctttagttcatccctatcgcgcgtcactggcgtcactcccttgctgactcctcacgccgtggcattgttcagtagctgcagtttgaccttgagctccgcgaatgtgggtcgcttggcgggatttaggtcccaggcctgccgcatcatttcgtaaatctccggtggacagccctcgggcgcttccattttgtagcccacctcaacgtgctttaccacatcggctaatggctgtacaatgaaaacttggttagtcacatctaaagttaatgccatcgatatctgcacttacaattctgggatagggcacgcgtccaaaggagtagatttcccatagcagtatgccaaagctccacatgtctgatttgttggaaaaacgctaaaatgacgagaataaagtacattagttgatatgcgcaacactttgctggtcagtcattttaattttaccccatttttaagtgcctcgggagccgtccattttatgggcagcttgccaacgtcaagattgtagcattcctcgcgtgccaaaccgaaatccgatactttagccacgcaatcctctgatataaggacattgcgagctgccagatcgcgatggacaacctttttggcttccagatactccataccagaggcagtgtcgctattgagtaacgttaattagtaaggattcaaaacaaaagctaacaatattgcttactaggcaaaaatgatttgatcctttttggttatgtgctgtcgtcctcgcgatcgcaggtaatcaaccagtgatcccttactcatatattccgtaaccagatacagatgcttgctggtgaagacaaggccgataaactttaccaaattgtcgtgctccagcgtgctaaagaagcatttaaagttggagttggtgagatctgtgaatcaaatgaatgatctgtggattaacttacgtcatgaccgaggcctcagccagaaacttctgcacggcgccctcgtccttcagcatcttgacggccaccttctcgttgcgtaatatgcccagcatcacgtcaccgaactcgcccttgccgatgctctcgcgcagctgcagctccgcttcagggatcacccagcccttgtccacgaaatctttggagttaatgcaaaactcttgtttgcccagctttggcaagcatttaatcagctgggtgcacagtccatccgcatccgcctcgtagtgctgcaagtatgaactggttaaatatggttcgtagatgtcttctggtgatacctaccgccactagctggcccaaattctcaaagtattcctcgtcgtcgatggtcagcttgttctctaggtacttgacccggtagtgctccaccttggactggaaacaaacgcagagcgtgtagtcgccggggaagtttgtggactcgcgaaccaggaacaaaccatcctcacgcggctgcagcagatgctccgcctcatcccgcgttatgctgccatggaaccatctaaggaagaagcacattgcttataatctgtacgttcagcgtggcatattaacttacggcatggcgttcagtttgacctcgcacctggaccgaccttgttgcggtgccaacgctgtgggcgagagggaagcatggttcatggcagtggtggatccgcttgaccacgcgctgctcgcattcaccccgctgcctgccgtgactccattaatatcgaagctgtgcagcgaggtggacatacccgccgatccgctaccactgacgccgacgactgccgctggctgggatgcctgtggcggttgcggtgctgtgtgcagtagcatattgctgccgtgctggctgccactcagcgccagactctttggcggcagcgctcgctcggcgccatgcatgcccatttgggctgcattcagggaggaggacattagacccgctccaccgggcggacagttggccagcagctgaagatgctgctgttgctgctgctgggcaacggcggccactgcggcagcggtaccggcaacggactgcgatcccgccggctgaacggcggcgacagtgggggcgggcgcaaacgtggacagtatgctgtgggacgcctgctgctgctgctgttgttgctgctggttcgtcgtctgttgctgctgctgcgtctggctgggggacttgggcgaatgattgctggcgctgctgattaaattatgactattaagcgcatgcgatgacaaatgcaatgcggctgccgcgcccgcctggatggggtgctgcaatggagagcaatgtcagtagagcaatttaatatatttaaatatagcccgtttcgcataccacattgttctcgcgatggtggtggtggtgcggcggtatgctgggcggcacaatgtgcggctgcgactggctgagctgctgttggtggagcagtacggcgccaaccgccgatccaggcgctgttcccgaggaacccgctcccaaaaccgcattcggctggggggcaggacgcttgttgtgccgcaacggtgcagtgggtggcatctggtgaccggtggtctgcaggaaccatggatcaccagccgtgctgcccgttgccgctgcagcggccaccgtcaccgagggctgcgagaatccgcgatggtgtccgacgaccgtggtttgtccgttctgcgtggcagtcgcgtggctgttcatagcctggccggtcgtcgtggttgccgtctgcttcctcagcaatccctgcttgatctcaacggtgatcagatcaccctcgccggacgcctttctcgagatcgcttccttctccttatggttttcctccggcttcggcttgggcttctggctcttctcgtggctagtcttcctggcttgtgcctcctcgtctgcaaacaaaaaaccaaaatgtgtacaaacattagtctttttcagtgttcagctttatcaattgatgatgttatttttataggctgataataggaggcaaaaaagcatctaatcttatcacaggtttgcacaggcacatttggacaatgttatctgcattaactatattatttactcgaatagcaatcagctggccaaatatgtaatttgttttatcacccgcacacaattatcaatgggattatatggatattttctccatttctgacataacttggcaatttgaatatcgaaattgtcacgatatcgatatcagacaaagtaatatccatttaaattcccttttgcagttgccaatataagcatttatcacttttgatatctgattcccatatttagatagacgcattcaccgccgattgagctgttttttgccgtataaccagccaaatcagttcccgtgatcggatgaaggccaaactcacgtttatttaatcagtcagtcaagtcagtggacaaataacaacgattgcataagcggcgacttggatgcgcaatgctaattgttggtcaacacactcaaaaacgcagttcagtgactcaaatggacacaaatggcatgttaatcgggtgaaccgcgcgaatccgctcgccaaatgtaaagcattcgcatgtgacgggcataattaaacccattttattgggcactttcaggctttgggctactactgtgtgcctggacacgactatgtatttaggatgagtcagttccatgtcgctttaattctacccgcgcatctgtacacgcaaagaaattgaaagaaaattggcttaaatcaaatgaaggattcgcatcactttcatccgtaaatgtctgtatttgtgaatttgaatttcaaatgaagtgcaataaaatcagtttgtgcgctaagtgctacatgctcttccaacctttttacttcacatgtaattgcgctgttttaggcagtgaagcctcttttcaagcgcttaatttcttaattttatgcaaatttcattagcgaatctcgctcgctgggcggaagcgcgttttgcatattaagttctcattctgggacgtgaatttatcgtgggagtggggcgaagccgaggcgtgggcattgttcaaatagcgacaggttgacggcagtggaggaggaggcacgcgcaggtcactttaccgctctcgaatgccacagaccttgcccgtaaattatttggagccacatccgccattcgcagcaacctgaagtttcggctatcgctccaaattggttttgcatgactgttcgaatacgagaatccaatctggaattgcagtcggtcatgcagtcgtggtcgtagtcatcgccattcgtcagcggcttcctgttcagcggagtcggagctttgaagtcacaccccgagacaatagtctttatatttgcgtactgtccgctttttgtttcaattgttcggccacaaatgtgaaattcagcgctgctgcgagaaaggtaaatcgaaatcgggtttcgcatcgatttggtactgcgaacaaagaaatccccaaacgcttttcagatttttgaacataaagaatcagaacacttaactgttttaataaaaagcctaatgccacttatcacaataattacgtaatatatttcgtaagctatatgtgaacatgaatgattttatcttttgaacatatatttaaaaatactttttgcacatttgttacatcatttttaccgcagtccgatagtggcatattttttaaacttgaacaatgtaccagggctttgcttctccagccgcgaccttgactccaaataagtgaaacagtcatccttatcccgagtaaatcctcgaagtgtgagtcagcggaagcaagaaatcgtattcttatgccaacaaatatataaagaacattaagaaaacctacgtggaacaacagatattgagagcttggttagtaactgaaactctatggagctaccattgattaaaccatccaattagactgcaccgagatggtgatcactacttccctttataagaaagtaaaaataccctctttataagtgtacaaccaccggatagggtattaatgtgaaaatcccggctataatcttacgtaaagccaatgcccactcaggctgtcatcgctgggagtgatccggagccattgattagtcaacgccggtgacaggccaattacagtgttcccccgcacctgacgacgtttacatcagcgactttgcatgtgcgtgctaggcaggtacataatatgtactcgctgatatcgacaggtgttgccacacacacacacacctgttggcttggccgtgtgttaataatgagctcagcgctgttcttgcaaaatactcaaacaaaatcaacacaaaaataattaataagcactttacttttaggctagccaagagttgtagacgccagtcgaacacaaaccacctcgggaattcgtaaacaaaaaaggtaaataaaagagtggggagtggtgtgccgaaacacgctcctcaaatataaatcaattgttctcgttctgaataaacatcggtatttgtgtattgtttaaaagactcaaaacggaataatcataaaaatgcaaaaagcccaaattaacgacaccgacctgccggacatgatgagtgcaaaaagcgcgtccaaaggttcgtgaacaaaaaaaaaatggggaaacaataaaattgaatgattcattggcaattggcagttcaacgcacacatggcgtgcgggtacgaatacttttgcaatgcactgtgcactgtgttgtaggtgttgagcaaaggcaaaagcaaaagtcaaatgaaatgcgcagtaatccgactgtcccgatgaggtaatattaattaggcaaagccgcgaaaatgcactgctcaaaatgtgtccgaaaaggagaactatttggatattgtacatcgactgagcaatagaaacaaaacattattgtgtgctcaatctataatctataagtaaaatacctcagctggttgtgctgcacttttttgcactataaagattcattcgcatttcactactccagttggaagtggttagtaacgcccaagtagtttacctaatccccagaaacaagcgaagttggctaacgaaagttctgtctgtcagaagttccacccttgggtggcaagagtgagtaatgaaattgtatctgtgtaagccggagatataggaaaggaaaacagtgcaacacctttgaagccaacgagcacatacatacgtgagaatcttttgtattgcttccttattgtttgagttagtgcacaacacatacaattcgcaaaaataacaaaggaacataaatactttcagagggatgatatatcttttgttcggcagtcataaaaataatagccaaattctcgcttttaagtagtgaaaacatttattataactatctcgtatgtatcttttctatgataactaacttatctcacctatgtatctatcctttatttcttttatttctaattgaaactatgtgcccaaaaatcaatgtctgaactgaaagatcacgaatgcaaaaataaacccaacacaaggtgcgatgttttatcacctgtgccttgccaatttccgtgaataattgcactacctcatggcgtggcattaacataaacaaatacatatagagaaatatgtatatggagcaaccaggggaccaagtttccgacattctcacaagcttttctttctttttggctgttggaggaggtctgaaagggggggctgcaacgacaggtaaatacacacggcagacaatcactcctgcacaaagtcagtcaacagttgccggcggttcctgggccattgtgttgtgttgtgttgtgccaccagttggaaagtgcaggcccgaagaaagaaaggaaggtaaccttagtcagtcagtcagtcgctggattgtgggccaaaaggggaagggaaatgggaaaatgggggaaaaatggcatgaatggaacgcgaggcgctcatgaatggcgtgtgatggttttcgccggtgcccagaaatttgcatatcgcatgcaaggcgatgagcagcagcagcggcagcaggaaaaccacaagcaggaagaaggaagccaagcctacacctgtgcagaaacaccgatacatgtatcagctaattacacggttagctgccccatgtggttgaccctgagcgaagcggagtgcagtttgtgcaccagaagaacccttctccttcttcgaatctacctccacggatcttggagcagccgcaattggacaccgccagttattgcccaacggttagaccataatccaatacccatgcccaatgtcgtggggcttgaaactaaatctgcggaccgcttgcaacaccagccgcaacaattgggagcagggctgaattgctgactggtatgagatatgaatttgtgcggcttgcacaaaacactatttcagatacttaaagggaaagaacgaccagagttctggaaacaaaaagcaactaatcaattagagtagttcagtttagaatatagatttgaagttgtatagtttgatctgtgttgatggtttgatatatgtagttacgtcttttttggattcgttataatatagatcttgttatctactaaccgaaccactcctccgaactggcaatgggtggcagcgagcgggacgtctgctgcccgttcttactagtccgctctctggaatttcccaggaatctgtctttggtttgctgtagctcagttttggctttggatgcctggaactttcgatgtgcgcaccgcaggaagttcagcagacgtgcgtcgatgggcggggaggattcgtgtttggccgatgttgcggatgttgtggttgtagtaggagtacttcttgctggaccaggtgcatacttgtcgcagaagtaaaactcacgccgacgaggaggagcataggcagcgctcaggctgctgcaaagcaggatgggcttgcgacgcgcacgggagattacctgaccaccagtgtgggtggcgtgggtggacgcttccttgtgggtgacactgctggcactacgcgttagtcccgagcccgagagcgtggccgccgcagctgcctccctgctctgcttgcaccagtagatgtccttgctgccaaagtagtagcgtcgccttgtgtcctgcgcaatcgaacctcgatgactccggcccacggatcgattggatcgcttgctggcactggacgccgtctggctgccactgctcgtctgcgagttatcactttcgttgttcgaattggatggagaggcggatgcggacgcgggtttcagcacccgttccaaggatgacgataccgtggcgtctgctccgctgggagaaggcgtgggcatgaggtacgagttggactggatgaacactccatcgcaggttatcttaattgttgtcaccatgttcccgcattgcgtttactttcgttgtcagtccgctttttaaatggtttctagtgcactaacttaagttctgattttgatggcgcaaaaacctctggttgaactttaattgtatgatccctacaaaagaccttttcaaattctagttaaaattctttccaatactttccaattaccatctaattatcaatatatacacatagtgaaatcaaaatgggagttggttctaatggatgccattgtgggtgcccagtagcagatagtacaaacataaaaattcgccatttcagcctgttgtagaactgaaatcgaggctaatgcccagtccgtagtggacaaagccgggcaaattgttttcgtttctaataatactaattaaggttctgtaagcgcttcgatttgccatcggccagcatgtggatacgtcgattctccatccacaatggacaactgggcggaatcgatagaaaagaccagggcagataattgttagcaaaaaaaaagcgcaaatggaaaatttctaaagagaaaattcaagctaaaaaaaacaaagaggaatggaataaaagcccggcctggatggaaaaggttgaaaactagatgatgaaaaaaaaaccgagctacgtacagaaattgacttcattgcgaggaataactaaataataataacaactctttgccatctatatgtttgtttttttttgtactggcttttggctagctttttcctcagcaagtcaattcgccacattaacggtttgtcagcggctcactgaaatagtcgacaatggcttggagtgctccacaaacagcgaaaaatgctggttgggccaaatgctggttcggcattccatgttggcttatttctctgggttgggaaaacacgaaccagccgcctgaattgaattggaattcactggagagctctggctacatattgtgcaaataatttgggcgtgggaacctcgcagtcgacgtcgactgcgcagtgagctaagcaaaactattgtctatcccctaaagacaggtgacaaatgttgggaaagttggcggggaaaagagatatttctgcactgatattgccatttagtttgtaagcagcaggattcaattatttgcccatcttatggatatacaaaggggcagaagggaagaggatatcagttggctttaagtttaatctttatcatagaattcccaaatatttgccaacattcactgcatcttcactttcttgaactttcctaggtaaatgtcaacttacaattaactattcaaatgagccagaattgggcacgtggaaagtgattgcttatcatgacccacaaaggaacggtggcggccaaatgaaattctccgcacgatggagtgtttctatttttcggagtgggaaaagcgttcggtcgcccaaagaagcgcaccgcacaagaaagacaacgcaactaattaaataaaacaataacagaattatgtatgacacaacgagtttgtgtcgccgctgacgaaatgcaaaatgaaaagccaacgccacaaagtcgaatcaaaataaaggccaaaaaagtctaaaccgttgactgagactgagacaaagtgggcaataagcgaggagaaaagccaaaataaaacagaagagctaaagacaatgggtcgggtttttgaacctggtcgagatgcgtaagtttgctggtccggatatcctcgaaatgagcgttggggattttggagctgcgtttcgaataggttttattaaaaccttgcggcaatacctgttgcatacataattttggcaagcggagagtgaaagtttctcgaatgaataccctcctcttttcaccaaaacggcagctctgacttggagcaaaaaaaacaaatgatcggcaatttaacttgagacaaagagcatttagcattcgctattgtttctgaccattccggccagtggcttaattaataaattaatttgtacaattactttaacgtgcctggcacgcattacaagaaaacgaaagagtccaaagccgagaaatgaaatgcgccattggctttcgagtgttaagtgtggtctttggggggctttggagggtttgggggcacatcttcggccagtttgggggttaagctcgtcttcacttgtgtgcagtgaatggcaaattgaataagtggatggaaaacacataaccgaagtgtacggggagccaagaaaaatatgagaaattgtttcacgcgtctgctgcagttgtatttgaagtctttttttctctatttctacatatatatttctttttttgtccactttcacttggtccagccagcttggagatacaaatttcagtgcgagattcatgcaggacgacggattagtttctcagctcagagagcgttggaaaaaactagttacagtttaaggctccggttttgcttttttcttcgttttttttttttttctttagttttttgttggccgattagaccggcgatgactaatgcgctggaaaattgaaaatgccccgacacgccagcctacaatgttttcgaatttgcagtctttatttttttccagtttttattttgtcaaagtcgagtgtctgcacgtcgccaaatccaaaattagcgtgcaaatcgattgtgcagagggtcttttaggccgagtgattcatgcaatttcgagatcagctgcgctcgatccgccgcagttgcatctgcgatctgcgatttgggatcggattaaaaagtgcagttagagagcgagcagaatggcagaataagcgaagaaattgcagtaatgggaacttgtcgactgggggaattcaatccacggagacctgagaaaacaattagcactctgtgattgaagttggcccgaagcaaacaaaaaaaaaaaaaaaaaaaaaaaaaaaagtggtaatcggtgaggggagggaagtgtacagtacagtaacatgctgccaaggcactttcattcgagactttcaaacaatcaaatatgcagccgcgacgcgatcgtcttcattagttgcacacgaaaaaattacatggtttggcgaagagcttgaatttgaatgattttagaaaggtgatcagatcaattaaaggccaccttgtgcaaaaatcattgggcaaccaaaacagccctttattaatttaaaattaattaattcggcattcgatatggggtcttgtgaaaatcctaatcagatttaaactaattgtagcagtctaactacataattaattgaaagctaagcctgactttgaccagtaagccctaaaatcaacttcagttttgaccgtgcatgccttgagcaattttgaattaatcatggacacactcgaaacacagattcatactaatgtccgatacatgtggccaaaacccataattaagcgaacatccccaacatggcaaataaaatcaaacaacaaacacacaaaggtcattgcgccaccaaatctcgagtatatacgtatgttcaagccatgctgatctttcagcgctttttgtttcactttcttcgcactttgataatgttttgcattaatcacttccttgaggcgaagccgaaaaatagctcccgcctgtataattaattattaaattattacaatagcgatatgaacaattcgcattcgcgcggtattacatcacgatagttcgccttttgtgccttttcgctgaacggatcggattatcaaaaaaaggccactttgcataccgtcataatttattgttattatgtattgcaaaaagccaattgcaatcgattcactcattggccaattcgcacacacgcgatgatgagctgcgcatgcgtggcaagcgattttatttttattttttcttttactattctctctatttactattcgatttttgaatcgaaacgcgaccgcgcgccttgcctgcaagttttcaactgaaaagcgatgcacgaagttgccgccgcgactgagtcacgataaataaaaccaaaaacacaaaatgaaacgaaagaaaaaaaaacacaaaatcaacctccgagtttcagtttcagagaaagagagcgccgcttgcgaagctcagtctcagattttcttcgtgtttttgtgagccggcttcttctctttatcgtgcatttattgcatgcgataagaccagtcgctcgcatgcgatcgcccacctgttgcacatttggccaccgactgacggttctccttttcgcagcgtcgcgctatggaagtcaaatcgaaacatgtgttgcccaactcattaggccgattttggccattcaagtagctgctgcggtctcgcttttggcctagctaaaagtaacccactctgcggtcgcctatatttacacgggaaaacttaattaaaagaaatttagtttatttaatcgcattattagcgatcccaagtaaaaactaaagaaaaattgtaagacttacatatataatttattatattatatatatcaaattgtactttctacataagcctaacatatttataccttaaattcattaaaatcattacgcacagtgcactttgtgatatcggagattcaagaggcaaaacgatcacagctttgtaaaaacacacatccagcaacattggaggcttgtgactcggatcgatttcctttctgtttcgtttatttggtctaattgccgccgctggccatgttaattaattcccccattattggtcgcacaaaccccgtgccccccgccacactccttttcccaacgacttgtatggcaaatagtttttctcttgcatgtttacttttcgtctccgtttccaggcaatttgttgccgctctcgaatcagttgtttgcaaaaatgtagacatcaaaatgtttattgtttctttcgcatccagcgcttgcagttccaattgcagttgcagttgcacagtt

SEQ ID NO: 14939 - DNA, 2591 bp, DROSOPHILA
caaggcgcgcggtcgcgtttcgattcaaaaatcgaatagtaaatagagagaatagtaaaagaaaaaataaaaataaaatcgcttgccacgcatgcgcagctcatcatcgcgtgtgtgcgaattggccaatgagtgaatcgattgcaattggctttttgcaatacataataacaataaattatgacgacgaggaggcacaagccaggaagactagccacgagaagagccagaagcccaagccgaagccggaggaaaaccataaggagaaggaagcgatctcgagaaaggcgtccggcgagggtgatctgatcaccgttgagatcaagcagggattgctgaggaagcagacggcaaccacgacgaccggccaggctatgaacagccacgcgactgccacgcagaacggacaaaccacggtcgtcggacaccatcgcggattctcgcagccctcggtgacggtggccgctgcagcggcaacgggcagcacggctggtgatccatggttcctgcagaccaccggtcaccagatgccacccactgcaccgttgcggcacaacaagcgtcctgccccccagccgaatgcggttttgggagcgggttcctcgggaacagcgcctggatcggcggttggcgccgtactgctccaccaacagcagctcagccagtcgcagccgcacattgtgccgcccagcataccgccgcaccaccaccaccatcgcgagaacaatgtgcaccccatccaggcgggcgcggcagccgcattgcatttgtcatcgcatgcgcttaatagtcataatttaatcagcagcgccagcaatcattcgcccaagtcccccagccagacgcagcagcagcaacagacgacgaaccagcagcaacaacagcagcagcagcaggcgtcccacagcatactgtccacgtttgcgcccgcccccactgtcgccgccgttcagccggcgggatcgcagtccgttgccggtaccgctgccgcagtggccgccgttgcccagcagcagcaacagcagcatcttcagctgctggccaactgtccgcccggtggagcgggtctaatgtcctcctccctgaatgcagcccaaatgggcatgcatggcgccgagcgagcgctgccgccaaagagtctggcgctgagtggcagccagcacggcagcaatatgctactgcacacagcaccgcaaccgccacaggcatcccagccagcggcagtcgtcggcgtcagtggtagcggatcggcgggtatgtccacctcgctgcacagcttcgatattaatggagtcacggcaggcagcggggtgaatgcgagcagcgcgtggtcaagcggatccaccactgccatgaaccatgcttccctctcgcccacagcgttggcaccgcaacaaggtcggtccaggtgcgaggtcaaactgaacgccatgccatggttccatggcagcataacgcgggatgaggcggagcatctgctgcagccgcgtgaggatggtttgttcctggttcgcgagtccacaaacttccccggcgactacacgctctgcgtttgtttccagtccaaggtggagcactaccgggtcaagtacctagagaacaagctgaccatcgacgacgaggaatactttgagaatttgggccagctagtggcgcactacgaggcggatgcggatggactgtgcacccagctgattaaatgcttgccaaagctgggcaaacaagagttttgcattaactccaaagatttcgtggacaagggctgggtgatccctgaagcggagctgcagctgcgcgagagcatcggcaagggcgagttcggtgacgtgatgctgggcatattacgcaacgagaaggtggccgtcaagatgctgaaggacgagggcgccgtgcagaagtttctggctgaggcctcggtcatgaccacgctggagcacgacaatttggtaaagtttatcggccttgtcttcaccagcaagcatctgtatctggttacggaatatatgagtaagggatcactggttgattacctgcgatcgcgaggacgacagcacataaccaaaaaggatcaaatcatttttgcctacgacactgcctctggtatggagtatctggaagccaaaaaggttgtccatcgcgatctggcagctcgcaatgtccttatatcagaggattgcgtggctaaagtatcggatttcggtttggcacgcgaggaatgctacaatcttgacgttggcaagctgcccataaaatggacggctcccgaggcacttaaaaatgggcgtttttccaacaaatcagacatgtggagctttggcatactgctatgggaaatctactcctttggacgcgtgccctatcccagaattccattagccgatgtggtaaagcacgttgaggtgggctacaaaatggaagcgcccgagggctgtccaccggagatttacgaaatgatgcggcaggcctgggacctaaatcccgccaagcgacccacattcgcggagctcaaggtcaaactgcagctactgaacaatgccacggcccatgggcagagccaatccctgccagaaatgggccagatccaaagctga

SEQ ID NO: 14940 - protein, 820 aa, DROSOPHILA
MSESIAIGFLQYIITINYDDEEAQARKTSHEKSQKPKPKPEENHKEKEAISRKASGEGDLITVEIKQGLLRKQTATTTTGQAMNSHATATQNGQTTVVGHHRGFSQPSVTVAAAAATGSTAGDPWFLQTTGHQMPPTAPLRHNKRPAPQPNAVLGAGSSGTAPGSAVGAVLLHQQQLSQSQPHIVPPSIPPHHHHHRENNVHPIQAGAAAALHLSSHALNSHNLISSASNHSPKSPSQTQQQQQTTNQQQQQQQQQASHSILSTFAPAPTVAAVQPAGSQSVAGTAAAVAAVAQQQQQQHLQLLANCPPGGAGLMSSSLNAAQMGMHGAERALPPKSLALSGSQHGSNMLLHTAPQPPQASQPAAVVGVSGSGSAGMSTSLHSFDINGVTAGSGVNASSAWSSGSTTAMNHASLSPTALAPQQGRSRCEVKLNAMPWFHGSITRDEAEHLLQPREDGLFLVRESTNFPGDYTLCVCFQSKVEHYRVKYLENKLTIDDEEYFENLGQLVAHYEADADGLCTQLIKCLPKLGKQEFCINSKDFVDKGWVIPEAELQLRESIGKGEFGDVMLGILRNEKVAVKMLKDEGAVQKFLAEASVMTTLEHDNLVKFIGLVFTSKHLYLVTEYMSKGSLVDYLRSRGRQHITKKDQIIFAYDTASGMEYLEAKKVVHRDLAARNVLISEDCVAKVSDFGLAREECYNLDVGKLPIKWTAPEALKNGRFSNKSDMWSFGILLWEIYSFGRVPYPRIPLADVVKHVEVGYKMEAPEGCPPEIYEMMRQAWDLNPAKRPTFAELKVKLQLLNNATAHGQSQSLPEMGQIQS

SEQ ID NO: 14941 - DNA, 3287 bp, DROSOPHILA
tagttgggaaattccaattgtcacccactcttcgtcttcaaagtccgatgtgggatcgtcatacgctggcttctccacgcttctgggttccatttccagcttcaccgtttcaatcatggtcagtgggtccaccgactttttgctctccatgtccgtttcgtccggttccggtagttcggaacaagtgatagtaacatcattttcgccacagtcctcatcctcagtctccagcttgacttccacatgctgctcagcacacagctccatcggcgcctcctgcagacagtcggttgacgttggagcagcaccgttctttagatgcttcattagaagttcgttggcggccatcgcctgcttcacatagcaataggcacccattaattttttggtgcatccactgcacaagcattgcggaaatttctgactaccagttgcatccagctgaaaggtaaatgtttcattttagtttgcatttttcgtagatttcgcttcttagaactttgtttacattgatttcggttagctcgcataaaatctccgaaagcaacttgtccggatactttttcgagggcgtggccagcttcagaaggttgtcggtgtccgtggagtcgcacgtgcgacaaatcaccggcagcttcatggcgaacaaatttgttttggccaattgaaagcttttttaattttaaatcaacaatcagaaaatcaacattattgatggtatgaccttgatgcgagagatggaaaataccgttcggtcattaaaaaaataccacgttgttaaaaaatacagcaattaattgggtgcgttcagcagagtccgctaattattttcaaagggaaatattacacaaatatttttaaaataaactgaagaaattgttaaattatgaaaaatataaatcaatatccaccagacaaacaattaatacaaatattacagaaccattagaaactgtgattaaaaaatcacgacttaaaatttactgctgacggtgaccaattgttgaatgtgaaatcaatagtgcacttttattacaataaatctacaatagagcgacgataatttgttatttaatctaaattggagcttaaattagtttgtggcgtgtgcacgtttagcatacgcgaaatccggcaaaccgaaacagagcctcgacccgattagatccaatcctctagtatttcttgatcgttttccgtatgagggcaaggcgctgtttgtgcgcctccgtgacagctgcccgcttgtagggacgcagttcgtccgtaccgaagccgggtatccacatgttgtacttccgctcaaagtgcagctgcacgtcgcgcacctcgatcttgttagactttcggtgcttggcgaaggcgctcgtcgacttgacggtgtcctcgacaaagtcgtcgatgatctgaagcagaagctcctcaacatcctcgtccagctgcgtggtggtatccacctctcggacgagctctgtgagacgcggtttggtaagcatctgtaattcggaagagagttaaactagaccctggcgtattccgtgtgcactccataaggcacgcatcttacgggagtgttctcggaaccggcggcggatgatgtgtgattggatgacttgctaccaccagatatggggcccgttcccgtacccaaaccggaaaccggtccgccgttctgcgaggatgagttgctgttgttggtcatcggactgtgctgggagggcgaggccatgggtgggtcgtggagcagtccgctggcggacgatgtggagttgtggttgtggtgcaggtggtgctcggcgacgccgttgctatcgaaagtggtaaagagatccgacattgcttttgggtttcttcagagtcaaatcaagtgggtggtaggtcggttggttggaagtgtttggggaaagtacagtaagttgggcggatttttggggagtgggtaagagtgcagaaccaaagccaaaagcgttagtgtacttgttgttgttgctgcttatgttgtgtgtcctcctgctttctcaactgcagtcggtgattgtgtgtgcgtgggtgtttggttgcaaagcgaaatgtaagtaaaagaatagagtggtcaatttcacgcgtgcggtcttaagaatccgtcgctttgtgtgtttactaaaactaaagtgttacttagcagttgctcttagcgcatgcaacacttacaattattgcggttttaacactttgatcttaaactattactttcctaaattactaaacaaaataaaaataagcggagcaactacagccaaatcaacagtatggccagttgcaggcgactctgaaatgcccgctggtgctataaagcaatttggtatatttacgtttaatttcagtatattttagttagacagccacactggcgtggagttcaaaacaaaacaaagacggcgtattttgcaaatatcacgtagataaggaatatattttactttgtaattgggaacaatagctgcgcaaaagaaacatgtcagcgagcgaagaaacaatagcggacagtcaggtctccgagaatgtggaggatgtggaattcgtagacatggcgttcacaaaggagttgcgtaaagccacaaaagatgtgcataatcttactgatgttctagtgaatgcaaagatcgcacttggttcgttaattacacgatattattagaagttattagatattcctcttcttccatagccctttctgatgacgaggtctggtatgatggactcctggccttctacgaactgtacaaattctttgagacccatctgccggagcgcctgctgcccaaagaattccacagaacagcggcatttgaaagggattttgcctatttctacggttccgattggaggaaggactacgaaattcgcccggcggtccagaaatatctcgagcatctggaaaagattgccgcacagaacgaactcttgctgttcgcctactcctatcagatgtacatggctttgatgtccggcggacaaatgttgcagaagaagcgtatgatcgctcgtaaaatgtggatcttttcaaagaacgatgacgaggagcagcagaagcaggccgacaaggaggcagagttggccaccgccagagctgccgatggctctgtagacaaagacgacttggaggccaggccaatgcctgcccaggttaccatttgcccgccgggatgtgaggccacatattttcctgagaaggtgcgtagctttttactttgttccttatatctattgtctttatatccactttcagatctctgtcttaaaggcca

SEQ ID NO: 14942 - DNA, 863 bp, DROSOPHILA
ctgttgatttggctgtagttgctccgcttatttttattttgtttagtaatttaggaaagtaatagtttaagatcaaagtgttaaaaccgcaataattatgtcggatctctttaccactttcgatagcaacggcgtcgccgagcaccacctgcaccacaaccacaactccacatcgtccgccagcggactgctccacgacccacccatggcctcgccctcccagcacagtccgatgaccaacaacagcaactcatcctcgcagaacggcggaccggtttccggtttgggtacgggaacgggccccatatctggtggtagcaagtcatccaatcacacatcatccgccgccggttccgagaacactcccatgcttaccaaaccgcgtctcacagagctcgtccgagaggtggataccaccacgcagctggacgaggatgttgaggagcttctgcttcagatcatcgacgactttgtcgaggacaccgtcaagtcgacgagcgccttcgccaagcaccgaaagtctaacaagatcgaggtgcgcgacgtgcagctgcactttgagcggaagtacaacatgtggatacccggcttcggtacggacgaactgcgtccctacaagcgggcagctgtcacggaggcgcacaaacagcgccttgccctcatacggaaaacgatcaagaaatactagaggattggatctaatcgggtcgaggctctgtttcggtttgccggatttcgcgtatgctaaacgtgcacacgccacaaactaatttaagctccaatttagattaaataacaaattatcgtcgctctattgtagatttattgtaataaaagtgcactattgatttcacattcaacaa

SEQ ID NO: 14943 - protein, 196 aa, DROSOPHILA
MSDLFTTFDSNGVAEHHLHHNHNSTSSASGLLHDPPMASPSQHSPMTNNSNSSSQNGGPVSGLGTGTGPISGGSKSSNHTSSAAGSENTPMLTKPRLTELVREVDTTTQLDEDVEELLLQIIDDFVEDTVKSTSAFAKHRKSNKIEVRDVQLHFERKYNMWIPGFGTDELRPYKRAAVTEAHKQRLALIRKTIKKY

SEQ ID NO: 14944 - DNA, 18996 bp, DROSOPHILA
gttccttaaacgtgatcaaaaatataactagagctactactaagcagcgagcacagcgtgcgatatatcaacaagtccagctggcaacatgttgccgcgcctgtggtgagttgtgcctctatgtcctttggcagcatgttgcggtcgcttggcgccggctggtggtcacaaaaagcgccgacgcttgccgtcagtgcttcgcgaagattgcgaggcgcgacacacatcgcggaacccgaactccatacggctgtgccgacactcaatcccgacctaagcccaattttttgttgcgtgaagttgacgaagtgtgttgtactgctgcaagtgcaagtccccgattgctagtgctattccgggatcacaaacgagcatccttcttcggcctcacgattgacgccttctaccactacctgcgccaggcgctgccgctggccaaggaggctgcgatccacctgaatgccagcaacgagatctccgctgtcggtgacggggtcaccatcacagggacacccggtgatcttctcaactacagcgggctggaattggatctcggactggatttggatcttaatctggacatggacctagccactactcccagcagcagcaccttggcgccagctgtaaccgtcaggacaccggggaacaggagcgtggtgagggtcagtgccgatgtgcccatctgggtggtgccgtgctattcggccatccttctgtgcgccgtggtcgggaacctgctggtggtgctaacgctcgtccagaatcgtcgcatgcgcaccatcacgaacgtttttctgctcaacctggccatctcggacatcctgctcggcgtattctgcatgccggtgaccctggtcggcactctgctaaggcatttcatattcggcgagctgctctgcaagctcatccagtttgctcagggtgagtggtggaagccagtaggccagttcatttatgtcttgtccgtgtccaaattaaaaggttatcccaaacttccaactgtgaattccgcatttattagtccctatccccgtgaccgagccccataatcgcttgtcaaatggccacgaaccagcacgacctcgagcggattcgccagcagatcgtgttggccaacattcaggagctgataaagaagatgacacgtcgctgcttcgacgtatgtatcgctatgccggaaatggagttgcgctccacggagcgcgactgcctggccaactgtatggatcgattcatggactcggttcaggtggtgtcgagccagtacttccgtcgccggcgtcgccatcagcaaattcgtttgtcccgttcgaccgcctcctccgcatcaccaccagcatccgcatccgcatccatgcccaaatccgcagcagcaaatgaatctgaatccgcatctagggcctccaatgacgaaaaggtcaaataatggttaagtctagacagatagccacgtgtggagtttattccaagtcgaaaacgaaggctgttccgtcgtagccccagatccccagtgtacttgggtgatggccacttgtccacattggtcatcatcccaaagctttcgaggatgatttcatacttcgagacctttgggaagggcaagaaggggtcgtctagctggaaatgaaagtggattttctgcaggcgtggccatcgatgatttcttgctattggttcttaacaaaatcctagtagagtcttaagtaaatgacgattggcagaaaataaagatgtcgttcagtgtacattcactatgctttgagattctctttaaagtcacccttttgaaatcacttagctaagcttaatattgtataatatacaaagtagtgtagtggggagaagataagttttaaatgaccatactgtatattttagattgtgcgcttgtgcacatcacttttccacttaggaaaactgagtctgccatcgattttacgcacaatttccgcgcttatttatggcctaaatcatatttcgttggcaagaacgcactatatctcgtctcccaatctgcatccgcctgagaatggccgtattttatgatggccgcccgcatttgcgtaacgacagtcagggtttccccgaccagcgagcaccgggttttgggttcctcaagggttcaaaagattaaataggcccacgcacacgacacacacacgcacacacacgcactcgcacactgtaaatatgcgggggaagctctttaaaaccatttcaactcaatgactgtgcccaaaactcatgtttggtccttgaaaagtccagtcagatgggtaaacattctcaccaggcattaatttgtgtctccagctcagataagggttggtgatgtgggtggcgatattcatcagctgagcccggttcagccatctgtgatatggttcgccttcggcgtgattccatgtcccgtcggcggcagtggaacagaatgaagcagaaatgtggccctgacacctgtcacaaatgctaatcggcatttcggtttcaaggagccgagcggcattaatttgcttatttaatcaaagtgcatgccatcggacattctaattattttcataacggtaaggagaggtcctcaacctgtttcacctcctaggactccttggaggcgcatccaaacggatgatgaagctcagtccaggccagtcatcctccattcccgcaagattaatccaggctgatccccatttccaatgcaaattgctcgcctgccgggagctctgcttctgctcagcattctggtcaatttccatatgtacgcagtgtcgatctgggagcctactcacccttctcacccagctcctgttaccctgttccttgctcctttggcgttgtagcactcaagtcgcagcctaagcagtctggaattgcttttaaccgtggcaatattgcgaaaatcactctgctatgcagcgtcacgtcgcgattttcttgtagtgttccgttccgaagcccctttcccccatcagctccatcagctccgctagctgctccacatcctttacgtcccctcgccgatccttctgacacccttccttgcattttcatgacttgtttcctgtttcctgcgtttccgtttcagacgtgctggtgatgttgtttgtcttgctgcaagtttgttttcggtactgccggaaccgctgttctctcctggcctccaacaccacccccccccctatccactgcccccggcatcctgacgtatcctggcgtaccctggcatatccatcttggccgcccccgcactaacttattaacaacataataacaatggctggcaaacaagttgagcgctcaggcacacacatgccaatttgttcagcaagcactcggcgctgtctcgagccccagaaaggcccagaaaaggagctggcattcagtttccaaggattccgcgcccccatcctcatccgcatccgcatccttgttcgcattcccattcctttccatctgttgcacggggcgtcgactcgtgggtcgtaaatctgaaaatgtcatccctggctgggctgaggcaccaatttatggccatcatcacgtcaaggtgcagcgatgtcctgacacgtccttcctggctccctgtcccacctggctccttccggagtgggcgtgaacgcgcccctggatttatgatcgtaattatgcatttgtggccagtggcatttgcattggactcctgccagtggcaaccaatcgccacccactgccattcgatttcatcatcttgcttgcaagagtaatgttggcattgtccattacttatgtaaatcgaaaccgaaggataagctcctgtaagtccatattggttatagtttctgcatattcgatctaccaagaatttcaacgaaattcacaagcgaggcagcaataacaagctcaaagttagtcggattatggggagctactaaaaatacatagttgttgacttttggctcagaattagaggtaataaaacacaaaccgatggtctttttttatggtccttttcttttcgcaagaaattcctcctcgaaaacgaacatcttagcaactaatattagcaactttgtatgttgcccataccaaaaagagtgtgaaaggaatgttttctgtttgatgaacactttaaggctaggacataatctcagataaactgttgtctaattaacttaatttgatatccaattaaagtaactatgtgtgctggtaagacaaagaaaaggtttctttgtggcgcttgaaaaggacatttgtgtgcggaaaagggtcaaattgacatccttagaccaaagtttatggctttgggctttagaattttctctattccactgctcgacctggttgcactttttgtaccccaggcgggacggccttgaaccctgacctgtggatgggccacccattgggcgcgtccaactcgtccaagtcgctgacagctcggcaaattaatgattaattgaattttccttggctctgttttgggtttttttttttttgttgtccattctattatttcttgttttcttggcaacacaaatacaaatcagcgccacacagacgtaatcattaattaggcgcgcagggagctaagtgtctcaagaaatgtgggcgcagtgcaattccagctagtttttcaagggccaaaggcactcgtaatgagcaaatttatgcacaaacacacagtttctacagtttctgatggagcttggcaaacattaaggggccaaatggcataagtagaaaaacgaattgaaataagaactaaccacgatgctctcgtttttcttatttcctatccccccatgtgggcggtacatgttattgacgcccaaagtgccgcccccatagacccatgccaccgtgccacgcgcccactctttttcttttgctggctccaaagtttgaacggcatctgcagagaaacgggcttatttgactgagaaggaggtaggaggtcggcgaaggacgcatttatttgaacttatgtacacaagtgcacatatatacatatatatatatacatacatactgcgctgtgtatgcctgccatattcatgttcatgttgttttcgccttttaatgagagttaactgagcgggggaactggaaactccgcggccaacgatgaatatgaatgcgccactcaacttaatcccactcaatcattatgtggcaatccgcccagttctttttgaccatgggtctgcaattgtcctctcggctcgtactcgtacacaagccccaacattatttgcaccgaacgtatctctgtaccgatctgaattcgtattgcatgtcgaactcgacactttatggtgctccgaaattgttttgtaagcgaaataatggcaagttatgacacccagtgttacacacaattgacatggttattgattttcaattatataaatatttgcaactaaggaaaaaagcctctgctgccactgctgccactgatgtcctgtggaaaaagcatttaaataccgtgttcatcggcaatctgtgtgcgcttctgtgtattttcaatttgcatacacctgcccatgaagaggcgaaagtgatgtgttaaatgaaaatatgctcctaataaacgtttttcatcggtttcccgtataattgttttctggctttcaacactacactgcacgaaatttaaggctaacgcgcgagtggggagcgtgtggcatgaaatcaatttcattcgttggttttaaagccccgtgtcccattgatttcgaggcaaaagcttatatttgtcaagatcataatcaaagctgtcggccattaaataaaatgctcaacgagagaaaagaaacccattaaaaactgagcgaattaaagcgatataaagcaccattttttgcgtgtgagtattatttgcgtggcgaaatgaaatatactcctgagctgaattaatgagacccggtaggcgggttgaagtgggtgggctttgcggacaggcatcttaagggcgcaaggacatcgggaacatggaacacggaacacggaacacggagcatggagcatgggcacaaagggaatacaaatgaaaggtgatttttcagctccctttggccttttgaggatttccatggggaaaccacaaagtgcggttgacagggcctaatgtgaaattaacatggcttatatgcaacgcatactgccctgttgcattcatgtcagccacacacacacacacacacatccatgcacccaaacaccgacagctcaaccgtccatctttgtgtagcgggtcaagttgccatcaagaacacggttgtgccactgcctctgttcatcctgtttaacagcccggtattggatcccgaataccagccaccaccctccgctccctacaacttgccgcaaatttccttggacccaatttattttgcaatttatcgctggataaaaagtgactgcgaaaagcatttcaaagcggaggcgcaggacattgaaaaaacagtgccatgacaacaattacggcgtgtttaagtagcccgtctgggtgaaagtcacgccgtgaactgccactttctccccttcgttggatggcataaaagatagattgtttatagttggtatcaaaaggaaaaaggcctggccaatgtcgcagattgaattgagtgctctggagggaatcggggtcaccaaatgctggcctcagagtccagaacgccagctctaagacttgtattattatggtattaaatggtcagggacaccagagtacaactttaaagtatcttggtataaagtaaagtatgcagttttaatcctaaacttggctcaaatgaccttatattccaccatttttaagtaacagtccagtagatttcaatgcatcacaattagaaatgaattcagccctgaaggctgaaaaataaacccaattaataatttaaagcttcggctgaacgattagcatgcattattaacactcacaaatatatgccataatatgtacttttatgtagagcactctcaaattgtgtcacattcagcacattcctttcagttcgtttaattaaagtgtccaataaattaacgctcgacaagaaggacaaacttaaatgcacttcaaatggcgcagaacccatcaagactttccatcaatttgcaaaagtgttggccaaaagtgaggctccccacctgggaactttgtttccgtgaactttgcaccggcacgcggtgaacgcgaaatgcattattcacttttatgtctttttcctcaactactgtccgggacaaaaaaatcagtttgcaactgaagaatcttacctcgactcgaactccaattgcgatgtccttgttgcccagctctcagctccttgatgatgcagcgcagcggcagttgggctctccgtaaatcgagcgacataaagcggtcacccaacattggccattcgatgggagtgtgacaaagctcccagctaaacttccccggccatgtcatgcatgcgaaatggagttctcgagaagcagctagtgaatctttaatggattcatcgattgcgaagcgaaggaagctgcaaaactttcggtttttaagccacgctcggtttggtagttggacactcgataaatttacccaatcaccagaaaaatatgcaacagcttttgggcttcattctactctagttttccaattaaaatgcaaagttctagagtttccaaaactcaatgctcctggacccccatcctcgccggcgtcgtcatccttgggaatggagatctcactcgatttggccatagagtgtgtaggacattttaatttgttgtgttttacaatttgcccccatacaaattcatgtcgattgaggctttttcgcctgagtccgctcagtttatggcacttttataactcacatgtatatatgtatatatgtatgtacagacaggcgaggacccccggggcggtaaaaagttgctcttttttttcgatggccttaacttggcgtatcaatatgtgggggggaaaacaatgggaagcaattttttcaaataatttcacaggcgaaatcaaaaggaagcagcccgggaagaacaagaacgcgcggcacatcgaccatctgatacctcttgtctatgctggtgcggtgtccattgtgggcgccacaagtggagggtagtgatctgttgataccatcgacattcatccgagaaaaaagcgtatccttgtgccttttcaatctggccatcttgccatccggccatccaagcatcggctgccatcgagcgtcgaaaaggccaaacttttgcacaaccgttttttattgttgactcaaatttggaattatttttatttgagcaccgtggagggacacacgcactgagtccataaaaatccactttcagttatgtggcagtgggtgtaagtggaaatgccgaaagatggacttattgtcattgagtatcatcgcatcgaatggggcgctaaatcaaaaacaacgaccagagggcaatccggaattggattggtttcgaaatctggaattcgcggtggggggaaattgaaaatgggccatattttggcaatcgatttgcatgcgccgcttaaagtcatttccaattcgataatcataatttatgaagctgttttgtattgcaattttcgcatataaattacattaaatatttacgtcagccgtgaaaaatacataaatagtgcgtctctggtgtgtccgccgattccgcgcgagtcctttgtatccgcatatcctgttcaaacaatactgcgctagagtcgaaatccaaatatttgcgcagcaaatgaaaagcatttaaatccggtcgcagaggttaaccgtagtagtttttaagccgcctggctgccgcaaccggcaaacttttcgatccactctcgcgactagcgagcaattagctgcggtcgcatttcattgtgctacccgctatttgcactaaactttacactcattaaacaggcgagaaattattgcagcgaagtgtccgggattaaagtgttgcatccccatcccgctgccagtcggatgatgatgaggcatgatgggtttctgccaggtggtcgcacttttaattggtattcaactttctcctttgaccctcacaactcgaaacatgctcgtaatttaccaaccaaaataagcgagtttcccagttccgttccaacttccttggtcacctcaaaagctgaaggcgagaagcctgttcgctaagctaagccgcactcaaaggttggctctgtgtttgccttacctttgcagttgagatgaagataaacagaaataaatgaaatgttacatttgtgtaccttgaaaatattcagaagccatgtttataaatgaaattatacatttatactatattttaatgcagtgcctgggaaaactctaagacattggtgttgcattaaaaataaagtgcttaaaagtatgcaacacagaattgatagtactgcattagcatgttgattcatctgaatattgagttacataccccacatgttgtacttatcagataattatttgatttacatgcttaaatcatatcagtgctagcttacccagaagccctaaattacttctatcccaagacattctctcagtgtacatgcggtgggtattcccaaaagtttaggaaaattgcccgtggcatttggcttgccagaaacggatgcctgtcgaagtgcagctagttcttttgggcaaaggccagttatacttttgcggttgttagcttaatttaatgtaactttcgacatggtcagatggagtcgaaaggtgagcggtgtatctggagaagatcgaaaagcaaataaccagctggaaaatgtttggccacaaccctctgagaatccacttggccttacgagtggatggatggttgatgggtggaaaccggagcacacgcacagcacaattagcagttatgaaaagttgaaagttcattttgtgcagcaacaaaacgaaaatgtgatgaaaagttcgcactgaccttttggaatttttcattgtgaacgaaggagctggccgaaaatgattttgccaaaaagccgtgggcgacaataaacagatgaagtctgaggcatgtttgcggtccacttaattgcaggccaagaagctcatgaaataccctggtagccacaaactggttgctccatctgcagaccaaacgaaattatgggattcattcgcagagggaatgtgcaacaaagcaactaaaatgtgagattttccatttgaaagcccacactttcgttcgatttgccacaatttgcagcatgtataaagttatatccgtactgccatgatatttctgcatggcagaaccatttcaagtttgtcactcgaacacgcacccaagtgcagaatgccggcatgtgaggatgcgaggatgcgaaaatgccaggacacgcggaggtggccggtggcttttcgatagcggaggatggtcaagccacgaggggcaccgaaacgggaacccggctcattgtcattttccgacccgagttggctttgagcacctgagaaccagtcgacccagtcgacccagtcgacccagtcgaccagtctacctgtctacctgtcgaccaaatgtggacacaggctccattcgagatggctgctcgtcaacagagccatcaaattgtcattttccgaacaaacgcgttggttttcactcgaaattggccgaaaaataaatgtccttgtaaatcactcgacttttatctttaaaatatgatttaaattcagcgaataaaatacccaatagctgataatttatgcccaatttattatgaattaaaaaaaaaaaaaagatatgaagatttgatattaaaatgcccaaaaataccatatatattaccaattttattgattaacatttgctcatttcagtcataaacaaatcctttgataaagccaataaaataatattttaaaaaattttaaaccaaacccaaatcataatattaatcttatgcacaccaaactaaatgttgaattggcaagacgagaatgctaatagtacataaatcacaacttatcactttgggaaacaaccattaaaaatgctatttaaaagcagacaaacagcgtaggatggctggtacatttttactgggattttgctctcctttggcaatctgtcatgtttttgaagtaggtcctcgtcctcgacagcatcgtctgccagataagaaatgcatatttaataattttattctttcactcagcaggggccctaggagcttagcttgttttatgactgcgacaaagtaatcctgtgcaaaaggtaggaagtgggaaatcactggttccaaaggggcagattatcagggatacaacagagatgtgctcgacttagctggcattatgagaagctcgtgtggaaaaattggccccaaccaacacacaacacaaaaatgggcgaagccaaagttctcgatgtcgatgttgtttcccttcaatcagcgattcaatttacgagtgccaaaattcgacacagttttccccttagccattttgccacttgccacttgccacttttcactgccggctgacacgccccatccggaatgccgcgaaaatgggcgtgcgaatattttgcctttcgctgaattcattgttggcccatggcccacgttgcggtccggtttctattttcagtatatccataaaattaacatttttgttgcggactctcaaaatcactgagctatggtcctcgtggtcctccagtttgcatttcccagcgaaaagggaaaggggcaagaggtaaagtggcaacggggtagagggtgcgtatatggcggcgccacgcgacggagctaaatttaattttgttaatgagctcggcccctttccgtttcatcatcccgccaatgggggcagccagccagccagccagcatggcgcagccacactctgccgtcctattattttgcattcgcaattctaaaagcctcaacccgtttgtgaggtggtccgtggttccagaatccacttgccaagtggagcgagtgtgtgtgcgtgtgttttggcctttattgcgctcttggtgcccgccaggattagactgtggataggcatcgggattgggattgggttggggatggggaatggggaatgggaatgggaataggggattgccattgggatggcgattagaacgacaatggaccattgccggaaacacttgaaaactgtttcgtgttggctggggactttgattaaaagcggcaccattgctatcatagcggcaagccgaaaagcagaaaacaaaaacaaaacaaaaaaaatgagggaaaataaacaagttggatctgacaaagacattaacattttaattgttccggcaacgcaatggagtcgtggaccaagcgtaacaattgccaatgagtgagctcgaataaaagtttatggggtggaggcgaagggcagtcgggaaaatggccattaatattggagccataaaagtcaaaacttttcgacgggtggcaaatgggaggcgtggattagcaatatatcccatgccgccaggaaattgaccctagtcattatttgccacagagatgattatgttaggcaataaacaaacttaagttttgaatctgctcgatttgtgaatgaaaacgccaaaaatatacatatataatctaatgtaaatattttagttatggattttgaatggcttggatttttgtattggttggtaacttctctgtttttccaattcattgcagctgcctcggtggccgtttcctcctggacactggtggccatctcttgcgagcgctactacgccatttgccacccgctgaggtcgcgcacctggcagacgatcaaccacgccaacaagatcatcgccatcatctggctgggcagtctggtgtgcatgacgcccatcgccgcctttagccagctgatgccgaccagccgaccaggtgagtgtgcgccaggataacactaattcaggaactaaccccctgtctggtcaggacttcgcaagtgccgcgagcagtggccggcggatagcctcaactacgagcgggcatacaacctgttcctggacctggccctgctggtccttcctctgctggctctgagcttcacctatctttttatcacccgcaccctgtacgtgagcatgcgcaacgagcgagccatgaactttggcagcagtgggccggaggtcaccacctcctcctctgccgctgtcgcagaagccggtagccagcgacgcgccaacggaagccattgtcagtccctcgacacgattgtgccacaccagcacaatcctcaccagcagcaccaccaccattcccagtactactatggtaaggggtttatgcttattttttgagatattcgtagattttttttgtcagccagctgggtcaaagggaattctgggttcagagggttcagtggcgtagcattaatagttgcgactgttgccgggggttggcagggggcgtcattcgggattagctcaactactgagcttatccgcggacccaaagcccccgaactgcgtcacacacaatttgcacggcaaagtttcccacgcacgaaaagattcgtgtgtctacgactcctgcctaaatcgcggaagtgaattgaatggctggctgggggatggggaaagggggctaaagcctggaggagcactctgtccaagtttttcaagcgtgtgtacgaagagacaatagcaagcgaaagctctcccggcgtttttactttcatttgcattcgcatcgccggctttaagagcaccacccatggctagatggccccttctcccatctacggcgtcctccatcctctccagctgcggatgctgtgaataatccccagattatgggcacaaaaattctaggcagcccaaggcaaagccggcgcaaatcaattctgctaattcgcctttaatgccgccttaaagcgtgctcccaatatatacatatctctatgtaaatttagaatatattgtagtatatgctcgtctgcagcagacatgcttgactgtaaatatagaacagtcccagtggagaggcctgctgaagaggaacctcctcggtgctccaccatggatgcgagttgataacgtgacgtgtatgataaatgcacacccacaaagcgaagtcaaccgtagagtccccgtggaaatcacagtgagcctaccgagcagcgaacttactttaatcttcgagaatattactctgcctctggtccaattaatgttgagaagaggagctcctgccacggaaagatggaagcactgaggcaatggagcagtggagcagtggagcagtgagtccctgggcgactcatttgcatgaaagggttggcgcctccaggtggtaagtcctttatgcgaaatggaaagtgtgcattagcaccttcacttgcgccgcactgaattatcgcagcactcgagaattcatcgagcgattcatttcctaggcaactgaccccgcttgacccatggaccaacacggacatgccagtccacccgctgctgaaaaaggtcaatttaaatgccgtaaattatgcacgagacgagcatttaagcgctcgttaaaggccgttatcccattgccaggattctccactggagcccgtcggacgcgtggcactcattttcacacatactcgcactccggtcgcctttctgtgtgacaataaatttgattaaatttttaactttttcgttccgtttaaggccatctcgtttgacataaccccgtcataaatttccaagccaaagagcatttatgtgtgttggctggatcgcaaatgtcccatcgccgaacaagctgaacattttcatggaaattgccatattattagcagcttcacatggcccccactattcgtgccaagaatccgcatgctatccatccccaaactgcgcgcttgatggcaatttaaattatgctcagctgaactactcgcccaaccgcaaacggcaataaaattgcgaggtatatggtctcattccgcacttaagtatccatttcccccttacatgtatcccaaatgattcccatcacatgctggtagctacaaatatagtatcctttccatgtaacatctacaatgtagcacaaattttgtgatatatggatataatcccttcattgcatcattaatatctacgtgtccttctcttgaaactcagccaaatgccattcctgctggcggtgaggaaggtgagcggagacacctccaccctgcactgatcctcatccgccagctggacgcagtggtcctgcagtagtgtggtcagtgcagccttcgtctggagcaggccaagtcgcattcccggacacattcgtggtccagctccgaagcccagaaaccgacagcccattggtggctgatttagaaagcgttctggacgaaactggttgggtgccggatacaatgcgggatctctgaaatcgaaaaagactgtagttcgtagacaatctgaagtctcactgaagtgtcactcacaaatgaatggcctgaaccggcaacaccagcacggtgcccaaatgcaccttaagttcgctgctcgctcctgatttctgatcaggaagggtgaatgtcttggtgcagcgcttctgcagagcctgcatggccggatgaagacgcagtgcctccaagagcgcagcttcgctatagcgaagttcacccagagccactggatcaatcagattgccagcgtggcgctgggccacttcatccaattcgatgtgtaaccgtcgctgtgcatcctcattgagggccaattcgtagagggcgaaggcgagtagcatcgccgaggtttcgtagccctccagtaggagagtggtggcatgtccagctagctcctcctttcccaagcctcttttgctttccgccagccattgcaagaggttgtcgccaccacttcgggcttccaccaattccctgaaccagtgctgcaggggcaggggtacgtatctgtataagtggatagtggatcaaaggttacacattggcgagttccacattaccaaccggtggccaatgagtctacccaatcgaggcgtgtgcaacagtgacatggtctccagcaaactccaaacgcttggctgaaagagcggagcgagccattccagccagcgacttggttcatgagccaccctcatgtgaatccccaggcaatgtgcatccagaccgaagatcgcggaggcaaccacttgtagcgtataacgcgtggccaagtccttggcctcgaagcgtccaaggggcacctgatcccggagcaactgacatgctctggccacatgcggcaaggtctgacgcactcggctgggtgtgaagagcggcaccaggtcggcccgcaagactcgccagcggtctccgttggcgatgaagggattgtggctagccaggacatcgcgctggtggtccacataaacggcgttgtccgcacagtcggcaaagttacggcccaccaggatctggcgcagcaactcctggtcacgcaccagaatggcgggttcgttaaacaggcgatagaaacccacatatttcaggcccggattccgactgtcaagaaaagttcattgcacgtggccttgaaggactcttaagattagtgtatcttacgtatagatttcctggtaaatctctccatatgagcggcggcccagggcaaagtccaacatattcccaaccaatggccagccaaaaggtgcctccagtcccaggcgacgccagtgattgccctgccatttccaaaacaggagcgtggcggccaataggataaatagcaccagtggcagcattatcgatgagcatctgaaaagcttgaaaggcacaatcccactcaacttgcattcccagttgagttgaatatctcaaagcagctgagagtgaaccacgttgcgtgattccatgattgcgcctcattagccacgtaattgctgtatatcaatcaactgacgggtatgtttcaatcacgcaagattcgagacagctagcattgggctttgaattaatttctataaccactatgactcaatatgttttcggataataatcttagtatttcaacttatatgcattgtacacatccattcagttttaatttatttagtgcatttcttctgttcaaaattttgttttttttttctgtgcttaacattcaatttgacaatcgtatccatttgcgagtcaaatcagatgtgttttgtggataccctgtaactttccatcttgcagattacggccactgtggcagcaagcggcgattgatcagcggaggaggaccctgcgaaggaaggaggcatctatactgcatgcggagcgcatccgtgaagtccctgcgccatcagcagatcaacggaggaggtggaaccctaagtggaactggagctggaaatggcgagtgctgcagccgggtgcacaggatgcgccaacagatgcagctgcagcagcaaggctacgtgagcgacaatgaatcccggcgcaagtcattgtcgcagcccagtctgcgtatcacggaagcgggactgcggaggtgagtgcttcagggtattctcatccacatatgaccgaccgattcgtgtgtcgattttcgctttcacggtaccttgcagatccaacgaaaccaagagtctggagagcaagaagcgtgtggtcaagatgctgttcgtcctagtgctggagttcttcatctgctggacgccgctgtatgtgatcaacacgatgaccatgctccttgggccgacggtgtacgagtacgtgggctatacctccatcagtttcctccagctgctggcctactcatccagctgctgcaatccgatcacctactgcttcatgaacgccagcttccggcgcgccttcgtggacacctttaaggggatgcgggtgtgcgagcgcctgtgcgctccctgctgcttctggcggcgacgctccaagaacgagacgaatctttcggtggccggtaactccattgcgctggccaactcggtcatgtccagccacacgatcctcgagagtccgcgactctgagccagccgccgccgacggcagatggccgagtcggagtcactttaggttagcaatgggtacggatcgggagcgctaatatgtgatgatgcaatgtaactgcaatagaaactgtggttgtcaacgacattccgccgcgttctgaatgtgtgtggaagtggccagatggataggtgggtggatggaggaggtgccatggcaattgcccctccaaattgctcttcatcttaccgataagtattttaatatatgcgtatgtgtgtatgcttagagttgcgctaaagcgctttattccgtgtgtgttattcgactttgacctcgcgttccatgtgtttacaccttaaggtgggtgcaaccagtcatgccaatctaaattgagatcgccacacgctatggggaatggaaagtgctcagctggattaagatttttaaacaaacaataggctaagaaatcagcacaatggtttcacgacatggtcacagtatgtcgtgagccaacaaaatgacttccaaatggggggcgctccataaaattgttttaatttatggaaaatggtatatgtgttggaaggatttgttggttcaaatctggagttgggtcaaaagttggtaaacaactcatttgtcacacatgtcgtatgagtgatatttacgcaagctatccgaccattgtgctgcactttctaattttatttccacactttacgttccaaagatcaatcccaaaagtaaaaggtattctgatcacggtgcagtgaaaggtttcaatgaatcaagaagcatttgacagcaagctgattttacagggtacacagggaagtcccactctcaaaaggattcccatcattcaaaaatggttgtcagacggagcttatggagtggcagacactccgaggtccaaaactaaattaagaaacccaatcgggtgccaaaatccaattttaagtagacgaaagtagctggaaatgccaatcggatatattcgggcgggattagcattgtg

SEQ ID NO: 14945 - DNA, 2250 bp, DROSOPHILA
atgttgccgcgcctgtgcgccgacgcttgccgtcagtgcttcgcgaagattgcgaggcgcgacacacatcgcggaacccgaactccatacggctgtgccgacactcaatcccgacctaagcccaattttttgttgcgtgaagttgacgaagtgtgttgtactgctgcaagtgcaagtccccgattgctagtgctattccgggatcacaaacgagcatccttcttcggcctcacgattgacgccttctaccactacctgcgccaggcgctgccgctggccaaggaggctgcgatccacctgaatgccagcaacgagatctccgctgtcggtgacggggtcaccatcacagggacacccggtgatcttctcaactacagcgggctggaattggatctcggactggatttggatcttaatctggacatggacctagccactactcccagcagcagcaccttggcgccagctgtaaccgtcaggacaccggggaacaggagcgtggtgagggtcagtgccgatgtgcccatctgggtggtgccgtgctattcggccatccttctgtgcgccgtggtcgggaacctgctggtggtgctaacgctcgtccagaatcgtcgcatgcgcaccatcacgaacgtttttctgctcaacctggccatctcggacatcctgctcggcgtattctgcatgccggtgaccctggtcggcactctgctaaggcatttcatattcggcgagctgctctgcaagctcatccagtttgctcaggtccctatccccgtgaccgagccccataatcgcttgtcaaatggccacgaaccagcacgacctcgagcggattcgccagcagatcgtgttggccaacattcaggagctgataaagaagatgacacgtcgctgcttcgacgtatgtatcgctatgccggaaatggagttgcgctccacggagcgcgactgcctggccaactgtatggatcgattcatggactcggttcagctgcctcggtggccgtttcctcctggacactggtggccatctcttgcgagcgctactacgccatttgccacccgctgaggtcgcgcacctggcagacgatcaaccacgccaacaagatcatcgccatcatctggctgggcagtctggtgtgcatgacgcccatcgccgcctttagccagctgatgccgaccagccgaccaggacttcgcaagtgccgcgagcagtggccggcggatagcctcaactacgagcgggcatacaacctgttcctggacctggccctgctggtccttcctctgctggctctgagcttcacctatctttttatcacccgcaccctgtacgtgagcatgcgcaacgagcgagccatgaactttggcagcagtgggccggaggtcaccacctcctcctctgccgctgtcgcagaagccggtagccagcgacgcgccaacggaagccattgtcagtccctcgacacgattgtgccacaccagcacaatcctcaccagcagcaccaccaccattcccagtactactatgattacggccactgtggcagcaagcggcgattgatcagcggaggaggaccctgcgaaggaaggaggcatctatactgcatgcggagcgcatccgtgaagtccctgcgccatcagcagatcaacggaggaggtggaaccctaagtggaactggagctggaaatggcgagtgctgcagccgggtgcacaggatgcgccaacagatgcagctgcagcagcaaggctacgtgagcgacaatgaatcccggcgcaagtcattgtcgcagcccagtctgcgtatcacggaagcgggactgcggagatccaacgaaaccaagagtctggagagcaagaagcgtgtggtcaagatgctgttcgtcctagtgctggagttcttcatctgctggacgccgctgtatgtgatcaacacgatgaccatgctccttgggccgacggtgtacgagtacgtgggctatacctccatcagtttcctccagctgctggcctactcatccagctgctgcaatccgatcacctactgcttcatgaacgccagcttccggcgcgccttcgtggacacctttaaggggatgcgggtgtgcgagcgcctgtgcgctccctgctgcttctggcggcgacgctccaagaacgagacgaatctttcggtggccggtaactccattgcgctggccaactcggtcatgtccagccacacgatcctcgagagtccgcgactctga

SEQ ID NO: 14946 - protein, 749 aa, DROSOPHILA
MLPRLCADACRQCFAKIARRDTHRGTRTPYGCADTQSRPKPNFLLREVDEVCCTAASASPRLLVLFRDHKRASFFGLTIDAFYHYLRQALPLAKEAAIHLNASNEISAVGDGVTITGTPGDLLNYSGLELDLGLDLDLNLDMDLATTPSSSTLAPAVTVRTPGNRSVVRVSADVPIWVVPCYSAILLCAVVGNLLVVLTLVQNRRMRTITNVFLLNLAISDILLGVFCMPVTLVGTLLRHFIFGELLCKLIQFAQVPIPVTEPHNRLSNGHEPARPRADSPADRVGQHSGADKEDDTSLLRRMYRYAGNGVALHGARLPGQLYGSIHGLGSAASVAVSSWTLVAISCERYYAICHPLRSRTWQTINHANKIIAIIWLGSLVCMTPIAAFSQLMPTSRPGLRKCREQWPADSLNYERAYNLFLDLALLVLPLLALSFTYLFITRTLYVSMRNERAMNFGSSGPEVTTSSSAAVAEAGSQRRANGSHCQSLDTIVPHQHNPHQQHHHHSQYYYDYGHCGSKRRLISGGGPCEGRRHLYCMRSASVKSLRHQQINGGGGTLSGTGAGNGECCSRVHRMRQQMQLQQQGYVSDNESRRKSLSQPSLRITEAGLRRSNETKSLESKKRVVKMLFVLVLEFFICWTPLYVINTMTMLLGPTVYEYVGYTSISFLQLLAYSSSCCNPITYCFMNASFRRAFVDTFKGMRVCERLCAPCCFWRRRSKNETNLSVAGNSIALANSVMSSHTILESPRL

SEQ ID NO: 14947 - DNA, 14308 bp, DROSOPHILA
gtcccaaagattgtgctggcgttattctctacaccgccgagaaagccaccaaggtggcgctcgatgccattcagatcctaggtggcaatggctacattaacgagaatcccactggtcgcatcctgcgagatgctaaactatacgagattggcgcaggaacctccgagatcagacgctggctgattggtcgccagctcaaccaggagtacaagtgaagagagagcgccatctctttttccaatgtggcaataacgtggaccaactctactacctgacagactaaatgttgcatttattttttgaagatttgtaaaatctgtatgttttatcaatgtctatatgtatatgtatgtgccttaataaaagaagtaaaactttatatgttaaaatattgttttttttttattaatttacaaaaaatacacaatttaaatatgcaactgcatacacgactcgcacacgtacgtatatacaaagagaaataaaaggtattgattacatcgaagaaaattcacaactatagaacatagactgactgaaaaccaagagttttcttacgttagaaaataatatttcatgtttagtgcacagtaataaattgcatcgaaaataacaacaaagtgaagaaccaaatttgtttgtgttacgcttattagaggttaattgtaatttcgttgaatttaaacagaaacttgcctgaataagttcgcacatctcgtataaatatatatgggcaatttaatggcaaataaacacgtagaacacagatatacgaaaacattgaaacttgattagcaagattaggttgttaattttatgctgattatatggtatgggtagaggcatatagatgtagtttcgctagtggctaattacaattaatattaaattatttctattagtatgtttatgggtgtgtaaatgttaaaagcacttttggcaatcatgaaccaagctagaacatttacttaagcaactagaattgcttcaattggaacgcttaatccaatcgaaaactgtgcttttccgtcttcgtctccgatcgggattccgttgttgtagtgaaggacttgcgctccatcacacgctgggtcatcgaggtgagtcgctccgagccttggtcaacaatgctgatcttaccgccatcggtattaagggtcatctgcgagaaacttgactctaatggcttgaccgctccaagttcactgctgctgctggtggtattattggctgacttgtcgaagttacgcgtctcatatctgcaatttatcaagaggattagcaaatgcgatcaatagggtatgggttaaagcgcacctggacgtgtatccctcgtagttttgacctggatagccatttccgcccgtaagttgtactacgccgccctgaccgaacgtcttgtcatggagatcctgcacacacgccgccagattccggtttacagtgggcttctttggcaccgccggtggggatgagtttagcgttttaatgctggacgactcataactttgctggtagtttgtgttagtgggtgtgcctgtggtggtgggtgcagagattaggccattgctgccgccaggactacctggatagggcctgggcacggcattggctgttagcttgggattagggcggaaactgtgacccgacgtggcggtttgcatgttagaaatggttgtagacagtggtggcggtggtggtgggaagtcaccattgggatcatccatcggcggatagttggacggcggtggagacaccgctcctgggtgatggaagtgctgcggctgcggactggcatggttgtagtgatgcttctgctgctgcccaccggacaagtagcttggcgaactgggcatttcgctggaaccatagtaaccgctgcgacccaaagtctgttatgattagaggttagaggagagaaaagaaatactgctggttagatcggttacgtgttagatttgctaccccacaccagatattagaactagactactttaaacaaattggtgcttcaatttagcaattcatctcaatgccaatttcttttgctggtgctttcaaagactaatacaaaatataacaatgtggaaaagtgataaacatgtttcatacattgttctggcttctataggcgtactcggtgtcactttcgtctgtggtgaatccctgagcgttcttcgcgtagcgctgcgcatggcgtacattcttcagaagctgacgcgcctcctccagttccttttccttacgcagcacggcggatcgagcgttgatctcctgtgccataccgtcgaccatcgatgtgttgatcttaagcgaatgttcctcctctgcttccaggccctgttgggcagagtgcaccaggttgtctgtggacttgatcactgcattgccagcggcctggagacgacgtccggcctcagagtttggattggacttcaccttgcaggcaattagtagctgagccgtagaagcggccacctgcttggctgtggaaataagcatctcctcggtgcccactccgcgcaccaggttctgagcagcctccaccaggctgtgagtggcagcggccacaagacgagcggccgaaatgagaccctccgaccactgaccatcgtcggagctcgttagcggacgacgggccaccttgcccgtgtcgatgagctcacgctgagcagcgtttgcagcacgcaccaaggcagcggatgctcccattatgcccttggcagcctccaagatcatttcgtcaaacttcatgttttcgtcgagttcaatctatgtggtaaagaaatcaaaagtgaaatattattacatggtgacttgaggcgaaaaagaatgaaacgatcaccaatggaatttagttaagttcttgagctgagtgttttagtagattggcgagggtcacagtaataatatgtttgattcctgggtgaacttttgaatgaaacaaccaagaatatcaaacatatctcactggaaccatcaattagttcgttttgaagggcaagttaaggataaatcaagcaccgcttatatattaggatgagttttcagttaattcactatagttagttatcattcaccatttaaactaggtttaagtatgtaaggaatagcaaacaaagacccaccttgacatcggcctggcgacgaggacgcagtgaagccaatttcttggcggcggcatcgatggaggcagcagcgcccagcagctcgttctcagcaatgactgtgggatcctcgggatcgatccaatcggagcccttcagcagcctggccatggccaccagatcggtgacgcacttggccacgcgacgcgacaaatgcatgcgatcgtcggcactgcaattgtgcaggataccactgagcagatcgcggtacgattctccgacagcagttcctgcctccagagtacgtgatctcagttcctccgtttcggcacagttccaggccacggagcggcaaacgataagcatttcagagatggcacggcgtcccagattggctgcagatacaatatcagcttgcagattagaggttccggcagcaacagccttggccgtggcggccgtcacattcatggtcactcggatcagatcctcgggtcccacctgggtgttgccaactggtgggggagagtgcatggcctggaggaataataattaaggttttacattaaattccatagaaattcttttataaacttacccgaatctcctgcgagatggcttctacggtggcctccattgcacgagttccgcgagtgtgctcatcctcgacagccttcacagtctttagtagtgaggacacattcagcaccataacctattcgtttgcgaatgtaaagaagttttttttttgggagcagagcagagatgtttgtgattaatgtttttggtcagtaaagaagtgatttgaagagagttgcttacagataggagaatgactacgattacaagctactctaccactacatatgatattctactactactactacaacattctaattggctttggcactcttacaaattaatataaaactaaaatatagaaaaatgatatttcattgattttttattatacgcataagtaataagaattagttttaaaaatgacttggtaacattgaaaagagataaatgggaacttctaggcgccaggtaagcgttttcaaattaaaaattaaaagtttgctgttttaaaagtcagcatttcaagagaacttttgcattctcattgctcttcccagcacttaaaagttctcttacaatcaaattgaattcaatttctcgagtggcgaaaattatgtttcattgtgcaatggagtaatgcaagtagaatttcgtcccagaatttcaattggccatgatgtcgatgctgctgctgccgaggaggatgtggctgccacttcgcatttcggactgtgggttagtttttgaatggccattgtgggcagctgtttggcaaacatcttgaagcgtctgctcggcgtatttttcgattcgatttttggtttattttttcgatttgtacatacatatgtatatgcggatgaatggagattttggtttgatatcgatttgatagcagattgttttccacagcgagcgcagcgcatgaagagaaggaggagcgtggagcggtttgaattcgatttgcatttttgtacagttcatgagtgtatttttttttttttttattttttgttcggtttgtgtgttgtgggaaaaaaagaagagcagatacgtcgaaggcacaacgaattagcaaaacgaaaaaatacatcaatttatggattttcccattcggttttctttttacaaacgttggaagtggtgggtggtaaggtggggtggttggacaattgtttcggaagggtgggtgtttggataggtgggtggttggggtgcctcggtggttgggagagcgcagtaagcagcagcagagccggaagggatggtactggcatgaccacggtgttagagagctggacaagaagggtggttgagtagccggcaagaaatctattgtttgctgccgatgccgccagagaattaatgcaagtagtgggcttttcatgggtgcgttcggttaaacattgataacattaataacattaaaaaaaacgacaacacatagctgaagctttaaagggagcaggatgcatgggaaacgccatttaaatcttttgcattccaaaattcagacagcagcagtggtccaaatatacacagatacatttatgaggttgatttttttttagcgggtgttgggattcctctttttatttttgagtgtatgagtagatgagtgccaaagccatttgatgtttattgaattttcaatatgccacaaacaacatttacgtatgcgcgttacatattttgcgtggaaaagaaaaaatgattataaaaataaagatgaatccttaaaaatccgtccgtattccaaaaatgcagtcctattttacttatagtctttggtcccttttgaaactttatgataaaccaattggtataatttaggagcacaaaccataaccacttgaagtcagttacaattttgtgagtgaggataagaaactaaagcagtataattcccttaactgcattattgaaagctacatgtttcagatagtttgaaatcagttaagggaatcaccctgcagatactaaaagccacaacaacgaaagcttattagcaagagtttaaaaactacgtaagatcaagaaagagagagagtaatagagaaagatagggggtataaaatgggacaggtgcggcttaccctggcgctctctttaagatcctgcatggagggatcgttgatggacttgccggaggccaacttagtgcagttaatcaaatcaccaagtgcagaggctacatccttgacggcattgatgaccatgacctgggaatcgggttgggtagagcccagcgagcatgctcctcgctttactgcctcagccaattgagctaaattataagcatttagtgtattagtaagctagtatcgtaatattttctttaaattgcactcacttatggttgacacagcattctgagctgcgttggctagctggtcttgagttccagcagctccagtcaccagaaccttggtgtcctccaccaaagcctttgccgtttgaagtatgtgctcgcggtggtcggcaaagcttccatcaccatccgaatgcaaagttccggcggtagcgaacataatggttgtatccaagtctccaatgatgccggataccgtgtgggctgcattaatgcacgcctgagttccacgcgatcccgcttgcaaagccgccagcacctgggccaccttttcggacacctctcgagcgctgcgtgcaatttctttttgggcgcccgcatcgttgggtcgtgctccgccggccgacgactgaatcatagagctcaccgatcggcccaaatcaataactgtggtgcgaatacgcattgccacatccggcgaagaagtggtggtacttgctccaacggagtcctgagtcaattgttgatagttttgtgtcatgtccacggcgagttgaggtagagccgatggttcaacgctgctcttagcgttcatctcgttggccagactggcgatttcctttgctcgcgccaccattcgcgtctgataatcaacaaaggtgtccgagtatgaggcgttcagcagggactgccgcttatcggttaaacgggtgatggaacggttcacctgctccatcaatccagtcacgatgcccgtttctgcattgatcttctccacggtttgctgcagctcctgaatggcctcccttgtgccatcgattgcatcatccagtcggggatgggcatgagtggcacgaggattgccagccgattccttggccgattggaccagagtaatggcactttccaccaccgaacgggtctgctgaattagcgacatttgctgttggctgtgaacaatgtgggtgcaagctccaattgctccattaaccattggcaccacataacgcgagatttcgcccactgcgtgaccaagttgttcggcattgttcttgccagccatacgtataggttccagtttgtcaataagctcggaagcagagttcatcgtctggccactgaatccatgcaagttgttatcccgtcgctgactgagaccctgtgcattaacggcaagggcacaactgtccaattcgcgggtgcatgtgcccaaagtgtggagcacctgttcgcactgtgcctgtccaggagccttgtcgcgaatgttgtccaccaatcgctttaccgactccgacaccggggtggagtgcatagagagctgttgccacactggtggattatcgggcgttagggccaatgacttggcggccttgaccatctccacaacaccatcgattacaccgcgacccgcttggatgactggctcctgggctttcctgccttccgcagatatcttggccggcactgaactgaactctgaactcgaagcatactgacgcacagccttgacagcttccaataaaggatccaccagacgctctcgacttcctccagccgactgctcctcaatagccttgatatcctgcaccaagtccgaagtagccgtggccacttgcttagcaagcacaataaactcgttcttggccacagggtttgatgtgttcatcgaggcctgacggcaaatggagcacagataactggtgtgctttgcaatcaccgtgagggcagaaatcatttgcggcttagtagattgctggctgctcacaatgtcacagtgctgacggattccctggtaggcccaagtaagctgggcttggtcgatgattcctggtcttcctgcgacacttgaaggatgcgaaactccaatcaaataggcagcctgcgatgagctctcgatcaatccctgaatggagtcgttaacgttattcaccgattgactaaactccacatgctgcgactgcttggcattgttgatcatctcggagatagcgtagccaaggtttcttgactttccagtggcttgttctacgcaatcgaagtatcccaactcgttgataggttcatggggataatccaacatgagacgcaaggcttcaatgttgcgcatagcgttgtcgcactccttttgtccgggagcggattggatgctggcatcaaccaactgattgatactttcggtcacacctcgggcagcggcatgcagcaggttcttcgcattaggttgacctggatcggcggcaatcgacttggccgtcgagaggagagagcatgattgagtggagacatgtcgcagggactcgatcatatgtgagcgcacctcctcttcctgcgtttgaccggccatttccatgctgacggacaatagatcccgatagttggcagcaaagttttggctactctcggctagcaaagctggtgaagaatacgacaccacaatctcaccaccggcgctgctcaactgctctgccacttgtttaagttccgattgcagagtggcatatggacggcttgaaggtgggaattcactcattgataggatttcacttaattcgctgacattccgcaaagccacatccacttctcgctgtccgggaatgcagtcaacagtggcggatagggctccggtgacctctcgtccagcttgggtcaacgcttccgggttagatgctccctgcaacgtgcgttgagcttgctcaatgagccgtgccgagctggttaccacatcatcagcacagtctatgatagctggattctgtgttgtggccgccactccgtgtacgcttctggtgaaatcacccaatgccagggcagtgtcccgtccagcagctccagcgtaactgcgctggttgtgcagcacagaggagagcagttggctcaaggcgattcccacgttctttgccgattttcttagctcatcggctgtattctccacggtttgtcccggcaatggacgcaactgcccggcgatagcagcctggcgtgtatcatccaacacgtcgtgcagtttgcgcacctcctctagggctgactccagttcctgaccaccacaggcatcacgagcacgctgtgctaccgaatgtagctccgagacacattgtcccaagtgcaaggcacccttagatagttgggtagcagatggaatatcagtgacagtgggctgtagagccctcgacgatttcgacacctgcagagcaggttcaatgaactgctcagcagcctcgatgagatttagctgtgcattgggatcatcgggttgcgcacgggttgttttcaaggatgtgactagtcgtggtatagtgtccgccactcgcttgcaatcctgcagaagggtttccttagtctgatggtcttggctatgctggaccgcgttctgggccgccgagatgcactgggtagctgctgaggctgcttgcttcgaacagaattccagtcgctggataagtccacgtttcattgcaggcgtgttagccgcagtagtggtgatctcccgaagttcctccgctgccttacgcaaagcgttttggttatccgaatcatgagggttggatgagcagagacgagcggcctctaccaacttagcagtggcatccgccagctgcttggcggcggataacagatgacgcttcatgtctgcatcctgttgctgatccgcctcccccttgatgctctggataagttgagcagtggtttgtccaagggtacgtgcatggcgcaccatctcctggggatcgtgagtagataccagaatatcagtgccgattatcacgttctccacaggactcaattcggtgctggtgcgattggcatgctccctggagctcagctttacgtgctccaacatatcagtgaggctcttggacacatcacgagcagctgccaggagatcggccttcagcttaggatcattgctggcttcattgcagacttcgcacaaagagttgacggctctggccacatttttggcagccgcttctagttgctcacgacaggcagcattgtggagcgttggtgccacaactttggcacaagccaccaattgactggtagccagggcacactgactggcagctccaataacacggttcctggcctgttcatcgtcacagcttgcggcaatgttcttagcacgcagcacaagggcagcagtggtgttggccaccgccttggccaaggccagaagcatgtcgtgaaggtcacggttctcgggcacctcttcttcggcaattgtgctgagtacatgagttgtagcttcacccacacgactggctgcgttgatcagatgctgtggcggctccttgctttctggctcggctgccttgaggagatcactgaaggcactgcacaaattgcgggcggcctccagcagttggtcaccacttgtgtcgttctccattaaggctgcaataaggcgcacttccttggtcacctccggaattgtttgtgcgatctgggagaccgatgccgaaatggcctctgtatccacttcatccggatgagaggcggttataatttgggcagtggcagcgctcatggtggccacatgactgctaaccgcctgtttggaagtgtctagggtgttctcacgccattcaatagagcgcaaatcactgcccagctcttggatgggtgcctgtaaagaaacgaaactgggtattagataacttacactttagaaaagtcaattatcttaccttggtgcgcagctcttcgtcagcgcgaattaagacatcctggccagcggatatgtaacccagcagagctcgctgtggctccgtcagatttacagaactaatgcgaacttccttagtctaaagtaacatattttaaatgaaaaattagtatttgttttggaaggaactctctccagcgaaatgcatactttgtaaaacattggatgaccactggctttattttgagattgcagcatgtcaggagaaaggattagagaaatgattcatgttagttttggtttagatggatgggattatggtattgtggatcagatttagttgtaagctagtgttaaacgtatgtgcagtggcaacttaagtaaaatgcgtgtgaaataaataaatggcttagtgtaaataagtggagaaattgaagaatgcttggtggttttgggctgagcatggaggtgtggtttactcaccgtgggcggctggtgggcatggttcacctggccgacgaaggcaccgtactgcacggtctgcacttcattctccatataagagcgctcgcctatgtttcgattcgttcggcgtaattcagaggggattggtaaaagaaataaaaatataaattagcatttacaataaagcaatacaaaaataaataagcaaaaagctaatacattgcatctaagaatagacgtagagtctctaaacctagagtaaatttttataggtttagtctccaaagatatttttgagtttttatccttatgaatgattaaagataaatgaaaaacttgtttagaaaccatcttcagaatgtacttcattaatccaacgtacaaattgaataaaaacattgacatttaaacaaataataatcagctcaagctaaagtgctatataaaacttaattataacttaccgtcataaggacgcataatgcctggatgagccaagctctccacatttagttgctccatgcgattcgtttcgtgttgcaagaaggtggctctataatataaatagagaaatgatttcggatttatattactcacactaagcagctacacttacttggatggtgccactgactcttccaccattgtggatccctcatcgccttcgattccgaaatgatccttggtttgcttcttcttaagaataatatcgatgtagccagcaataagctggacaatctgctcggcctccgtcgtctgcaccgagtagtattgattggcgtagtcgccaaagtccagagtgaaggtgtttggcgaggcgccccaacggcgtactgttgtcaagggccacgagatcaagatctctttggtgtgctcgtctaggcgcagcaccgaatctttggtcactccgagtagacggggaacaagcttgtttttgccattcatcttctccttgaccagaaagaaggtaacgccgtaggtgggcaattcccgggcggtcttggtgtacaggactttggcgtcgatttcggatagatccacatgctttcggtgctcagaaaagattttcttctcgattcccttggtgcgcacataagactgaggcaggaagtccttcaaactatagatacaattttgtttaaatgaagtaatggacattggacaaatctctaactcactctagaaatccggtcttgtgcttggcctcattatgcggtccaaattgaatatgcacttggatgccagcaaactcgcaagctaaagaattgataattattaaaaggcgtttcttaggggcatacaattaagagacccacctttgtcttgggtgacaggatgggttccatccagaatggcatccctggcttggacatatagcaaattcaattgcacggggtcccgcgaatcgatattctgatccgagaagaaaaatcgccgacggagcaaaacagtttctgcctcatctattccctgctcccgcaatgtgcgactcacatccacccagttcactggaaataaaaccccattttaatgttttactttttacagactaaaactagtaacttactttcatcgtccgtctttagtttcttgcgcaaactctccattttggcatcgcgatccttctccataatcttacgcttaagggtaagcgttccaaacttgttgtccggcagattctcattctgcgcctcattgtcctcgcgcaccaatccatattcctcatgattggtgatgccgatctttgtgcagatgaccaccataagctgcgacaccggctgggagtcatccaccagaatggtctttacagcgccatccaacatacgaacacgtagggttcgtgtcttgcggcgatactccagcgtatcctggttgtgcagtatgtagtagcccagggtgcgtcccggttccaaccaaaccccctgctggttctgctcatcagagataaacagtccatattcgctggctataagaaaaataaaaagaaatcattgatttaaaaatggaattggttgagaaattagtcttcacatacgttgtccttgcactgcctcggcgaacttatcgcgaatgaccttgcaggcatcgaagactgtggtgttgggctggaactgtatggtcttggtcacccgaccaccctccagttgaatgcgcagcgatagtgtggacatcctggcgtcgtctccgctgcttcacttcgacttccgctgctccttttcttttacttctctctactccgcttcgtcgtcgtttccttgggtaaacttccaaggaagtgaaaaatgcaatgggcactggaaaaataaggtttaagagaacttctggttaatttttagcaactaatcaagtacacagcgataatttatattaagggatagatttttatttttggtacaaaaaataagcttaaatttcaacgaatttcctcattttatacaattttgagcttatgtttttaagataaagggagtcaaatgagctagcagaaagtgcagtttatgacattgattaagttcacttggagtgaatattctttggtgttgttagtccacatttgaatatactaatttcgtaatgaattacacttaagaggacaaactaaaagtggaaaacagacaccagagaagccgaaacccggaaccatcgaccgagaccgaaaccacccccaaagcgcaaggatatcatccggcaaagcgagcaaaggggcgatggcggtggcagccaccacccaaattgcagacggccgataaaattgctgatgaaaatcttctccagaagcactcgcgcacacacacaagggcattagatgttcacacacacaaacacaaataggcagtggagagggcaacgcaggacacttgagttcaggccaaatcaaagccagaaaacccaggcccattgtagtgtatccttatggggtagaaaagtaagcccactttggtgacttctccaactctctctgcatgctccgttctcttgatgattaggctttggattttaagccaagttcccttcataatgccacattctccatccccaaaaggcaggagtaattgattttctgtcgcccgctttttgatcctgccgacgttaagacacaaaagctgcttaagtgtgtcagtgttctggtggaaaaaacgctaccattattgtttgctctagcatgtgaaa

SEQ ID NO: 14948 - DNA, 8511 bp, DROSOPHILA
atgtccacactatcgctgcgcattcaactggagggtggtcgggtgaccaagaccatacagttccagcccaacaccacagtcttcgatgcctgcaaggtcattcgcgataagttcgccgaggcagtgcaaggacaacccagcgaatatggactgtttatctctgatgagcagaaccagcagggggtttggttggaaccgggacgcaccctgggctactacatactgcacaaccaggatacgctggagtatcgccgcaagacacgaaccctacgtgttcgtatgttggatggcgctgtaaagaccattctggtggatgactcccagccggtgtcgcagcttatggtggtcatctgcacaaagatcggcatcaccaatcatgaggaatatggattggtgcgcgaggacaatgaggcgcagaatgagaatctgccggacaacaagtttggaacgcttacccttaagcgtaagattatggagaaggatcgcgatgccaaaatggagagtttgcgcaagaaactaaagacggacgatgaaatgaactgggtggatgtgagtcgcacattgcgggagcagggaatagatgaggcagaaactgttttgctccgtcggcgatttttcttctcggatcagaatatcgattcgcgggaccccgtgcaattgaatttgctatatgtccaagccagggatgccattctggatggaacccatcctgtcacccaagacaaagcttgcgagtttgctggcatccaagtgcatattcaatttggaccgcataatgaggccaagcacaagaccggatttctagatttgaaggacttcctgcctcagtcttatgtgcgcaccaagggaatcgagaagaaaatcttttctgagcaccgaaagcatgtggatctatccgaaatcgacgccaaagtcctgtacaccaagaccgcccgggaattgcccacctacggcgttaccttctttctggtcaaggagaagatgaatggcaaaaacaagcttgttccccgtctactcggagtgaccaaagattcggtgctgcgcctagacgagcacaccaaagagatcttgatctcgtggcccttgacaacagtacgccgttggggcgcctcgccaaacaccttcactctggactttggcgactacgccaatcaatactactcggtgcagacgacggaggccgagcagattgtccagcttattgctggctacatcgatattattcttaagaagaagcaaaccaaggatcatttcggaatcgaaggcgatgagggatccacaatggtggaagagtcagtggcaccatccaaagccaccttcttgcaacacgaaacgaatcgcatggagcaactaaatgtggagagcttggctcatccaggcattatgcgtccttatgacggcgagcgctcttatatggagaatgaagtgcagaccgtgcagtacggtgccttcgtcggccaggtgaaccatgcccaccagccgcccacgactaaggaagttcgcattagttctgtaaatctgacggagccacagcgagctctgctgggttacatatccgctggccaggatgtcttaattcgcgctgacgaagagctgcgcaccaaggcacccatccaagagctgggcagtgatttgcgctctattgaatggcgtgagaacaccctagacacttccaaacaggcggttagcagtcatgtggccaccatgagcgctgccactgcccaaattataaccgcctctcatccggatgaagtggatacagaggccatttcggcatcggtctcccagatcgcacaaacaattccggaggtgaccaaggaagtgcgccttattgcagccttaatggagaacgacacaagtggtgaccaactgctggaggccgcccgcaatttgtgcagtgccttcagtgatctcctcaaggcagccgagccagaaagcaaggagccgccacagcatctgatcaacgcagccagtcgtgtgggtgaagctacaactcatgtactcagcacaattgccgaagaagaggtgcccgagaaccgtgaccttcacgacatgcttctggccttggccaaggcggtggccaacaccactgctgcccttgtgctgcgtgctaagaacattgccgcaagctgtgacgatgaacaggccaggaaccgtgttattggagctgccagtcagtgtgccctggctaccagtcaattggtggcttgtgccaaagttgtggcaccaacgctccacaatgctgcctgtcgtgagcaactagaagcggctgccaaaaatgtggccagagccgtcaactctttgtgcgaagtctgcaatgaagccagcaatgatcctaagctgaaggccgatctcctggcagctgctcgtgatgtgtccaagagcctcactgatatgttggagcacgtaaagctgagctccagggagcatgccaatcgcaccagcaccgaattgagtcctgtggagaacgtgataatcggcactgatattctggtatctactcacgatccccaggagatggtgcgccatgcacgtacccttggacaaaccactgctcaacttatccagagcatcaagggggaggcggatcagcaacaggatgcagacatgaagcgtcatctgttatccgccgccaagcagctggcggatgccactgctaagttggtagaggccgctcgtctctgctcatccaaccctcatgattcggataaccaaaacgctttgcgtaaggcagcggaggaacttcgggagatcaccactactgcggctaacacgcctgcaatgaaacgtggacttatccagcgactggaattctgttcgaagcaagcagcctcagcagctacccagtgcatctcggcggcccagaacgcggtccagcatagccaagaccatcagactaaggaaacccttctgcaggattgcaagcgagtggcggacactataccacgactagtcacatccttgaaaacaacccgtgcgcaacccgatgatcccaatgcacagctaaatctcatcgaggctgctgagcagttcattgaacctgctctgcaggtgtcgaaatcgtcgagggctctacagcccactgtcactgatattccatctgctacccaactatctaagggtgccttgcacttgggacaatgtgtctcggagctacattcggtagcacagcgtgctcgtgatgcctgtggtggtcaggaactggagtcagccctagaggaggtgcgcaaactgcacgacgtgttggatgatacacgccaggctgctatcgccgggcagttgcgtccattgccgggacaaaccgtggagaatacagccgatgagctaagaaaatcggcaaagaacgtgggaatcgccttgagccaactgctctcctctgtgctgcacaaccagcgcagttacgctggagctgctggacgggacactgccctggcattgggtgatttcaccagaagcgtacacggagtggcggccacaacacagaatccagctatcatagactgtgctgatgatgtggtaaccagctcggcacggctcattgagcaagctcaacgcacgttgcagggagcatctaacccggaagcgttgacccaagctggacgagaggtcaccggagccctatccgccactgttgactgcattcccggacagcgagaagtggatgtggctttgcggaatgtcagcgaattaagtgaaatcctatcaatgagtgaattcccaccttcaagccgtccatatgccactctgcaatcggaacttaaacaagtggcagagcagttgagcagcgccggtggtgagattgtggtgtcgtattcttcaccagctttgctagccgagagtagccaaaactttgctgccaactatcgggatctattgtccgtcagcatggaaatggccggtcaaacgcaggaagaggaggtgcgctcacatatgatcgagtccctgcgacatgtctccactcaatcatgctctctcctctcgacggccaagtcgattgccgccgatccaggtcaacctaatgcgaagaacctgctgcatgccgctgcccgaggtgtgaccgaaagtatcaatcagttggttgatgccagcatccaatccgctcccggacaaaaggagtgcgacaacgctatgcgcaacattgaagccttgcgtctcatgttggattatccccatgaacctatcaacgagttgggatacttcgattgcgtagaacaagccactggaaagtcaagaaaccttggctacgctatctccgagatgatcaacaatgccaagcagtcgcagcatgtggagtttagtcaatcggtgaataacgttaacgactccattcagggattgatcgagagctcatcgcaggctgcctatttgattggagtttcgcatccttcaagtgtcgcaggaagaccaggaatcatcgaccaagcccagcttacttgggcctaccagggaatccgtcagcactgtgacattgtgagcagccagcaatctactaagccgcaaatgatttctgccctcacggtgattgcaaagcacaccagttatctgtgctccatttgccgtcaggcctcgatgaacacatcaaaccctgtggccaagaacgagtttattgtgcttgctaagcaagtggccacggctacttcggacttggtgcaggatatcaaggctattgaggagcagtcggctggaggaagtcgagagcgtctggtggatcctttattggaagctgtcaaggctgtgcgtcagtatgcttcgagttcagagttcagttcagtgccggccaagatatctgcggaaggcaggaaagcccaggagccagtcatccaagcgggtcgcggtgtaatcgatggtgttgtggagatggtcaaggccgccaagtcattggccctaacgcccgataatccaccagtgtggcaacagctctctatgcactccaccccggtgtcggagtcggtaaagcgattggtggacaacattcgcgacaaggctcctggacaggcacagtgcgaacaggtgctccacactttgggcacatgcacccgcgaattggacagttgtgcccttgccgttaatgcacagggtctcagtcagcgacgggataacaacttgcatggattcagtggccagacgatgaactctgcttccgagcttattgacaaactggaacctatacgtatggctggcaagaacaatgccgaacaacttggtcacgcagtgggcgaaatctcgcgttatgtggtgccaatggttaatggagcaattggagcttgcacccacattgttcacagccaacagcaaatgtcgctaattcagcagacccgttcggtggtggaaagtgccattactctggtccaatcggccaaggaatcggctggcaatcctcgtgccactcatgcccatccccgactggatgatgcaatcgatggcacaagggaggccattcaggagctgcagcaaaccgtggagaagatcaatgcagaaacgggcatcgtgactggattgatggagcaggtgaaccgttccatcacccgtttaaccgataagcggcagtccctgctgaacgcctcatactcggacacctttgttgattatcagacgcgaatggtggcgcgagcaaaggaaatcgccagtctggccaacgagatgaacgctaagagcagcgttgaaccatcggctctacctcaactcgccgtggacatgacacaaaactatcaacaattgactcaggactccgttggagcaagtaccaccacttcttcgccggatgtggcaatgcgtattcgcaccacagttattgatttgggccgatcggtgagctctatgattcagtcgtcggccggcggagcacgacccaacgatgcgggcgcccaaaaagaaattgcacgcagcgctcgagaggtgtccgaaaaggtggcccaggtgctggcggctttgcaagcgggatcgcgtggaactcaggcgtgcattaatgcagcccacacggtatccggcatcattggagacttggatacaaccattatgttcgctaccgccggaactttgcattcggatggtgatggaagctttgccgaccaccgcgagcacatacttcaaacggcaaaggctttggtggaggacaccaaggttctggtgactggagctgctggaactcaagaccagctagccaacgcagctcagaatgctgtgtcaaccataactcaattggctgaggcagtaaagcgaggagcatgctcgctgggctctacccaacccgattcccaggtcatggtcatcaatgccgtcaaggatgtagcctctgcacttggtgatttgattaactgcactaagttggcctccggcaagtccatcaacgatccctccatgcaggatcttaaagagagcgccagggttatggtgctgaatgtgtcctcactactaaagactgtgaaggctgtcgaggatgagcacactcgcggaactcgtgcaatggaggccaccgtagaagccatctcgcaggagattcgggccatgcactctcccccaccagttggcaacacccaggtgggacccgaggatctgatccgagtgaccatgaatgtgacggccgccacggccaaggctgttgctgccggaacctctaatctgcaagctgatattgtatctgcagccaatctgggacgccgtgccatctctgaaatgcttatcgtttgccgctccgtggcctggaactgtgccgaaacggaggaactgagatcacgtactctggaggcaggaactgctgtcggagaatcgtaccgcgatctgctcagtggtatcctgcacaattgcagtgccgacgatcgcatgcatttgtcgcgtcgcgtggccaagtgcgtcaccgatctggtggccatggccaggctgctgaagggctccgattggatcgatcccgaggatcccacagtcattgctgagaacgagctgctgggcgctgctgcctccatcgatgccgccgccaagaaattggcttcactgcgtcctcgtcgccaggccgatgtcaagattgaactcgacgaaaacatgaagtttgacgaaatgatcttggaggctgccaagggcataatgggagcatccgctgccttggtgcgtgctgcaaacgctgctcagcgtgagctcatcgacacgggcaaggtggcccgtcgtccgctaacgagctccgacgatggtcagtggtcggagggtctcatttcggccgctcgtcttgtggccgctgccactcacagcctggtggaggctgctcagaacctggtgcgcggagtgggcaccgaggagatgcttatttccacagccaagcaggtggccgcttctacggctcagctactaattgcctgcaaggtgaagtccaatccaaactctgaggccggacgtcgtctccaggccgctggcaatgcagtgatcaagtccacagacaacctggtgcactctgcccaacagggcctggaagcagaggaggaacattcgcttaagatcaacacatcgatggtcgacggtatggcacaggagatcaacgctcgatccgccgtgctgcgtaaggaaaaggaactggaggaggcgcgtcagcttctgaagaatgtacgccatgcgcagcgctacgcgaagaacgctcagggattcaccacagacgaaagtgacaccgagtacgcctatagaagccagaacaatactttgggtcgcagcggttactatggttccagcgaaatgcccagttcgccaagctacttgtccggtgggcagcagcagaagcatcactacaaccatgccagtccgcagccgcagcacttccatcacccaggagcggtgtctccaccgccgtccaactatccgccgatggatgatcccaatggtgacttcccaccaccaccgccaccactgtctacaaccatttctaacatgcaaaccgccacgtcgggtcacagtttccgccctaatcccaagctaacagccaatgccgtgcccaggccctatccaggtagtcctggcggcagcaatggcctaatctctgcacccaccaccacaggcacacccactaacacaaactaccagcaaagttatgagtcgtccagcattaaaacgctaaactcatccccaccggcggtgccaaagaagcccactgtaaaccggaatctggcggcgtgtgtgcaggatctccatgacaagacgttcggtcagggcggcgtagtacaacttacgggcggaaatggctatccaggtcaaaactacgagggatacacgtccagatatgagacgcgtaacttcgacaagtcagccaataataccaccagcagcagcagtgaacttggagcggtcaagccattagagtcaagtttctcgcagatgacccttaataccgatggcggtaagatcagcattgttgaccaaggctcggagcgactcacctcgatgacccagcgtgtgatggagcgcaagtccttcactacaacaacggaatcccgatcggagacgaagacggaaaagcacagttttcgattggattaa

SEQ ID NO: 14949 - protein, 2836 aa, DROSOPHILA
MSTLSLRIQLEGGRVTKTIQFQPNTTVFDACKVIRDKFAEAVQGQPSEYGLFISDEQNQQGVWLEPGRTLGYYILHNQDTLEYRRKTRTLRVRMLDGAVKTILVDDSQPVSQLMVVICTKIGITNHEEYGLVREDNEAQNENLPDNKFGTLTLKRKIMEKDRDAKMESLRKKLKTDDEMNWVDVSRTLREQGIDEAETVLLRRRFFFSDQNIDSRDPVQLNLLYVQARDAILDGTHPVTQDKACEFAGIQVHIQFGPHNEAKHKTGFLDLKDFLPQSYVRTKGIEKKIFSEHRKHVDLSEIDAKVLYTKTARELPTYGVTFFLVKEKMNGKNKLVPRLLGVTKDSVLRLDEHTKEILISWPLTTVRRWGASPNTFTLDFGDYANQYYSVQTTEAEQIVQLIAGYIDIILKKKQTKDHFGIEGDEGSTMVEESVAPSKATFLQHETNRMEQLNVESLAHPGIMRPYDGERSYMENEVQTVQYGAFVGQVNHAHQPPTTKEVRISSVNLTEPQRALLGYISAGQDVLIRADEELRTKAPIQELGSDLRSIEWRENTLDTSKQAVSSHVATMSAATAQIITASHPDEVDTEAISASVSQIAQTIPEVTKEVRLIAALMENDTSGDQLLEAARNLCSAFSDLLKAAEPESKEPPQHLINAASRVGEATTHVLSTIAEEEVPENRDLHDMLLALAKAVANTTAALVLRAKNIAASCDDEQARNRVIGAASQCALATSQLVACAKVVAPTLHNAACREQLEAAAKNVARAVNSLCEVCNEASNDPKLKADLLAAARDVSKSLTDMLEHVKLSSREHANRTSTELSPVENVIIGTDILVSTHDPQEMVRHARTLGQTTAQLIQSIKGEADQQQDADMKRHLLSAAKQLADATAKLVEAARLCSSNPHDSDNQNALRKAAEELREITTTAANTPAMKRGLIQRLEFCSKQAASAATQCISAAQNAVQHSQDHQTKETLLQDCKRVADTIPRLVTSLKTTRAQPDDPNAQLNLIEAAEQFIEPALQVSKSSRALQPTVTDIPSATQLSKGALHLGQCVSELHSVAQRARDACGGQELESALEEVRKLHDVLDDTRQAAIAGQLRPLPGQTVENTADELRKSAKNVGIALSQLLSSVLHNQRSYAGAAGRDTALALGDFTRSVHGVAATTQNPAIIDCADDVVTSSARLIEQAQRTLQGASNPEALTQAGREVTGALSATVDCIPGQREVDVALRNVSELSEILSMSEFPPSSRPYATLQSELKQVAEQLSSAGGEIVVSYSSPALLAESSQNFAANYRDLLSVSMEMAGQTQEEEVRSHMIESLRHVSTQSCSLLSTAKSIAADPGQPNAKNLLHAAARGVTESINQLVDASIQSAPGQKECDNAMRNIEALRLMLDYPHEPINELGYFDCVEQATGKSRNLGYAISEMINNAKQSQHVEFSQSVNNVNDSIQGLIESSSQAAYLIGVSHPSSVAGRPGIIDQAQLTWAYQGIRQHCDIVSSQQSTKPQMISALTVIAKHTSYLCSICRQASMNTSNPVAKNEFIVLAKQVATATSDLVQDIKAIEEQSAGGSRERLVDPLLEAVKAVRQYASSSEFSSVPAKISAEGRKAQEPVIQAGRGVIDGVVEMVKAAKSLALTPDNPPVWQQLSMHSTPVSESVKRLVDNIRDKAPGQAQCEQVLHTLGTCTRELDSCALAVNAQGLSQRRDNNLHGFSGQTMNSASELIDKLEPIRMAGKNNAEQLGHAVGEISRYVVPMVNGAIGACTHIVHSQQQMSLIQQTRSVVESAITLVQSAKESAGNPRATHAHPRLDDAIDGTREAIQELQQTVEKINAETGIVTGLMEQVNRSITRLTDKRQSLLNASYSDTFVDYQTRMVARAKEIASLANEMNAKSSVEPSALPQLAVDMTQNYQQLTQDSVGASTTTSSPDVAMRIRTTVIDLGRSVSSMIQSSAGGARPNDAGAQKEIARSAREVSEKVAQVLAALQAGSRGTQACINAAHTVSGIIGDLDTTIMFATAGTLHSDGDGSFADHREHILQTAKALVEDTKVLVTGAAGTQDQLANAAQNAVSTITQLAEAVKRGACSLGSTQPDSQVMVINAVKDVASALGDLINCTKLASGKSINDPSMQDLKESARVMVLNVSSLLKTVKAVEDEHTRGTRAMEATVEAISQEIRAMHSPPPVGNTQVGPEDLIRVTMNVTAATAKAVAAGTSNLQADIVSAANLGRRAISEMLIVCRSVAWNCAETEELRSRTLEAGTAVGESYRDLLSGILHNCSADDRMHLSRRVAKCVTDLVAMARLLKGSDWIDPEDPTVIAENELLGAAASIDAAAKKLASLRPRRQADVKIELDENMKFDEMILEAAKGIMGASAALVRAANAAQRELIDTGKVARRPLTSSDDGQWSEGLISAARLVAAATHSLVEAAQNLVRGVGTEEMLISTAKQVAASTAQLLIACKVKSNPNSEAGRRLQAAGNAVIKSTDNLVHSAQQGLEAEEEHSLKINTSMVDGMAQEINARSAVLRKEKELEEARQLLKNVRHAQRYAKNAQGFTTDESDTEYAYRSQNNTLGRSGYYGSSEMPSSPSYLSGGQQQKHHYNHASPQPQHFHHPGAVSPPPSNYPPMDDPNGDFPPPPPPLSTTISNMQTATSGHSFRPNPKLTANAVPRPYPGSPGGSNGLISAPTTTGTPTNTNYQQSYESSSIKTLNSSPPAVPKKPTVNRNLAACVQDLHDKTFGQGGVVQLTGGNGYPGQNYEGYTSRYETRNFDKSANNTTSSSSELGAVKPLESSFSQMTLNTDGGKISIVDQGSERLTSMTQRVMERKSFTTTTESRSETKTEKHSFRLD

SEQ ID NO: 14950 - DNA, 5337 bp, DROSOPHILA
aatcttactgatgttctagtgaatgcaaagatcgcacttggttcgttaattacacgatattattagaagttattagatattcctcttcttccatagccctttctgatgacgaggtctggtatgatggactcctggccttctacgaactgtacaaattctttgagacccatctgccggagcgcctgctgcccaaagaattccacagaacagcggcatttgaaagggattttgcctatttctacggttccgattggaggaaggactacgaaattcgcccggcggtccagaaatatctcgagcatctggaaaagattgccgcacagaacgaactcttgctgttcgcctactcctatcagatgtacatggctttgatgtccggcggacaaatgttgcagaagaagcgtatgatcgctcgtaaaatgtggatcttttcaaagaacgatgacgaggagcagcagaagcaggccgacaaggaggcagagttggccaccgccagagctgccgatggctctgtagacaaagacgacttggaggccaggccaatgcctgcccaggttaccatttgcccgccgggatgtgaggccacatattttcctgagaaggtgcgtagctttttactttgttccttatatctattgtctttatatccactttcagatctctgtcttaaaggccaaactaaggcgcgttttcaacaatcactacggagcttttgacgatgatttgcgtgctgcttttattgaggaaagtcgcaacgtatttcgcttaaatatagaagtagtacggaccatcaaaggtgtgaatcgtgccaatcttaggaagctggccctcgcactaatctttgtttcaagtattgtagtggccgtgaaatttgctctcaagtaagaaaagtaggaaatacaaatgtaagctctcttgagcaagttagaattgtgatcacacatttatttagtcgtttgttaaatagtaaataacctgaaatttgtctgaagtaaagtatttattgggaatgtccgttggcaaaattatcaagcagtcctcgtctatttatccatggcatgacacgctctatattggccctataacgttcgttgctaaacattgcctccctcagggatttgccattctcttcatttcccaaaaagctatcagtggtaaagtcatcggttgtcttgttaagacacatcgacaaggtagtgagcacagttccagcagcttgaagaaaaacatgtcagtcagaggaatttaaaaacctcaaatccttctgtaaattaccaaaaatggggtgctgtatcagaatggcgtgcagttcctttagcgagggaataaatccgttgtagttcaacagcttggcgtgctccttcatgttttgatgataccatcggataaggtagtcaaactgatcgactttgatgtccagttgagtggagctcattatgaagtaatacagatcctgggcaggatttccatacttcgtgacttggtgatccaacaggagggtttccttgacgcgaccatctgattcgtattggaacatgatgttatttatccaggcatcaccatgattgagcacattaaacgcttgttcatttattttggcatcttcaagtattctgtcgacatacgtatccaagatctctggctgcaaaatatgattttgttaagttagttacaaggaataaagtaaagtgacttaccattttgtgcaagtactcatccacaccgtcaaacttgctcacttcttctataaaggatttcttagtgttaacaaacatacccttaaatataggtgccgtttgctctgtaaaaatgccattattgtatttgggcgaatagggtccatttagttccttgtacttcagagaggctgcatgccactgggccaatttctttaacgtgcacttggaatgctccaagtccattccaatcatgcgatcgaccatcttgaagccactcggctgcaggttctccaaaagcaggtactccttgctgacgtccttgctgagccggaaggacttcggactaaaagtgactggtaggccaacatccttatagaaacgctcgaaggcgggcacatatgtgctgtaaacctctatctcttttggaaacaggttaaagtcggagaagttgattgcgtcattgtcgctgtggactttcaggatgtacgagaaggtcttcacgctattgtctgtagatgtgagaagattggttataatattaaatatttcagaatttaaagtagtttaccttttaactgcgcctcgatttcgaccttcagcagcttggaagcaaagttgtcgccaggtttcgtcgccaactttgaagtactgcttaagatcttttcgaaatttggttccgcggataaaatgatttccttgaaatcgtcaatatttagccagtccgggatctgatccgtattctccggctgtggctgctgtggcttcaaagctgccagcagttcgggtggcaatgggtcagtgctagataagtattataagtgatattcatctttcgctaaaatgtaacttcgaatatatttacctgacctccaagaagcctctattatccaaccaaggcagaatgcgttcgatgtattcttgacaacgtttgttggcatacaaactacccctgaaactaaccccatcagcagagtccgacataaaattatcgaatgtggccgactgagtggggtccaagagaaccaatggcagcacggagatggttgggaatagcacccatccgccgtatttgatgagcgttcggtgcaattccctcagcgatggctttcggccagtgaatcccaaaatgcccaagtgcttaaccagtgcttcttggtaatgcctgatgaaaaagtcaaaatggctcagcttgtaatcaatttgaaccgaggaaatgatgaagtagagcagatccatggcaggagagccgtatttgggattctggaaatcgacaaagaccatatcctccaagtccccgctggagttcatcttgaacagaagattattcatccagcaatcgccatggtttagcgcattaaactcgttgggatcgacgataccaagtttcatgaactccatagttaggccagctagagctttttcctaataatgttgattagaatactaataactagagaggactatttgtatttataattacttacaagcttctcccgatattcttctccgttcttgaacttatccagattggccataaacgacgttctaaaggatgccaacatgccctccatgaatgcaataatagcttccttgttgtttcccatcacgccgtttacgaatatgtcgggatagggtccatgcacctggaccattgtcgctcccgctgcatggaactgtgctagtctggtcaatgcgaacttggtttgctccaggttcaggcactccagtcggtttatgtttttgaaaccattctgaccgagatcgtgcatcagcaccgtattagccaccttgggctccttggtggcgtccagtttgaatgctcgcggagcgaatttgatgtccagacccttggccttatagagctcctccattttcggtagaatctcagtgtaggctgcgttctcgctggtaaagaagttggccatgctcatcatttgttccatttgcggagtatcgtgtggcactttcatcatgaaggagaccagcttagtgctcttgtctaaaaaggaataataaagttaaatcacgtagttaaaattccagacatcttatgcataataaaagcgctattgagtcggtcagtaagctaaatatcagcattgtcattggggaaagcaaatcaatcgctaaacatttattgccaactgaccataatgataagagtacaggtactacatctgatagcttatcgtcgacctacacgaaggtaaacacccacccacccagtttatttcttcctttacgagattgtcccaaattggtgctataaatagtagtgcgcagttaactcaccagtgagctccacatctatgctgatcctgagcattagagtggcatagttttctcccggtgccatcgctggcttcacccggaagcccactatcttggagaactgatccacatcggcggcgagtaattcctcaaattgcgtttgattcagccacttgggcaccaaatcactgtgatccacctcgggttccggtttgttgggtggagctgggggttcagggttcacctgcgcctttggtgcttgcttcgaagttttcacttcattgctctgcttttccttggaatttctcaatcccatattatcgttctagctgcttgaatatatcgaaatagtagacttctatggcgatttgcgtccgttccgctgggcgatcgacgctgaactggtttgcggcacacgaatgggctcccaagttatgcagttctaatcactagtggtttgtttcgataacaaattggcattaaacaaacgtttgttatttcatcacttttcagaagtttacgcgtttttataactaatcgttaagagcgatagccgtgaacttaagtctatcaataccataagaataattgggttgataggtgtaactagcagctggtggtctttatcagtttctctcttcttgattagaagaattgattgttgccatcagccggaaatttatctttttgtccaatctaagcccaaaggaaatgcgtagactaaatagatatttgtatatatgtataaataaaacagtgtatacatttatttgtaacttttccataaagtaattttttaaaaattgtcaacaaatcatttatgcttcataataacacatttttgctaactccttcaaggatcgaggagacccctcctattaagccaaggcataatcttttccacgtgggctttgtaacgctcgttgccaagaagtttggttctaaaggcttcggattccggcgtctcgacaaagaataattccggattgaaaccttcatcggttaggcaaacagttagtgtgctgatgactgtgccgacagctgtaatttaaaatagtcgtgagtgaaatacttatcatgttacctaatatcacgtaccgaatgccggatgctctatcaatatagcgtgcagttcacttagtgaaggcacgaatccgttgtatttcaataatttcgtgtgctctaccaagttttcgtggtaaaagcggataagattgtcaaactcatcgaccttgatgtccagttccgcagaactgattaggaagtagtaaagatcctgagccggattgccgtacttcgcattctggtgatccagcaaataggtttccttgagccgaccttccgcgtcgtattggaacatgatgttgtttatccaggcatcgccatg

SEQ ID NO: 14951 - DNA, 2747 bp, DROSOPHILA
cccagcggaacggacgcaaatcgccatagaagtctactatttcgatatattcaagcagctagaacgataatatgggattgagaaattccaaggaaaagcagagcaatgaagtgaaaacttcgaagcaagcaccaaaggcgcaggtgaaccctgaacccccagctccacccaacaaaccggaacccgaggtggatcacagtgatttggtgcccaagtggctgaatcaaacgcaatttgaggaattactcgccgccgatgtggatcagttctccaagatagtgggcttccgggtgaagccagcgatggcaccgggagaaaactatgccactctaatgctcaggatcagcatagatgtggagctcactgacaagagcactaagctggtctccttcatgatgaaagtgccacacgatactccgcaaatggaacaaatgatgagcatggccaacttctttaccagcgagaacgcagcctacactgagattctaccgaaaatggaggagctctataaggccaagggtctggacatcaaattcgctccgcgagcattcaaactggacgccaccaaggagcccaaggtggctaatacggtgctgatgcacgatctcggtcagaatggtttcaaaaacataaaccgactggagtgcctgaacctggagcaaaccaagttcgcattgaccagactagcacagttccatgcagcgggagcgacaatggtccaggtgcatggaccctatcccgacatattcgtaaacggcgtgatgggaaacaacaaggaagctattattgcattcatggagggcatgttggcatcctttagaacgtcgtttatggccaatctggataagttcaagaacggagaagaatatcgggagaagcttgaaaaagctctagctggcctaactatggagttcatgaaacttggtatcgtcgatcccaacgagtttaatgcgctaaaccatggcgattgctggatgaataatcttctgttcaagatgaactccagcggggacttggaggatatggtctttgtcgatttccagaatcccaaatacggctctcctgccatggatctgctctacttcatcatttcctcggttcaaattgattacaagctgagccattttgactttttcatcaggcattaccaagaagcactggttaagcacttgggcattttgggattcactggccgaaagccatcgctgagggaattgcaccgaacgctcatcaaatacggcggatgggtgctattcccaaccatctccgtgctgccattggttctcttggaccccactcagtcggccacattcgataattttatgtcggactctgctgatggggttagtttcaggggtagtttgtatgccaacaaacgttgtcaagaatacatcgaacgcattctgccttggttggataatagaggcttcttggaggtcagcactgacccattgccacccgaactgctggcagctttgaagccacagcagccacagccggagaatacggatcagatcccggactggctaaatattgacgatttcaaggaaatcattttatccgcggaaccaaatttcgaaaagatcttaagcagtacttcaaagttggcgacgaaacctggcgacaactttgcttccaagctgctgaaggtcgaaatcgaggcgcagttaaaagacaatagcgtgaagaccttctcgtacatcctgaaagtccacagcgacaatgacgcaatcaacttctccgactttaacctgtttccaaaagagatagaggtttacagcacatatgtgcccgccttcgagcgtttctataaggatgttggcctaccagtcacttttagtccgaagtccttccggctcagcaaggacgtcagcaaggagtacctgcttttggagaacctgcagccgagtggcttcaagatggtcgatcgcatgattggaatggacttggagcattccaagtgcacgttaaagaaattggcccagtggcatgcagcctctctgaagtacaaggaactaaatggaccctattcgcccaaatacaataatggcatttttacagagcaaacggcacctatatttaagggtatgtttgttaacactaagaaatcctttatagaagaagtgagcaagtttgacggtgtggatgagtacttgcacaaaatgccagagatcttggatacgtatgtcgacagaatacttgaagatgccaaaataaatgaacaagcgtttaatgtgctcaatcatggtgatgcctggataaataacatcatgttccaatacgaatcagatggtcgcgtcaaggaaaccctcctgttggatcaccaagtcacgaagtatggaaatcctgcccaggatctgtattacttcataatgagctccactcaactggacatcaaagtcgatcagtttgactaccttatccgatggtatcatcaaaacatgaaggagcacgccaagctgttgaactacaacggatttattccctcgctaaaggaactgcacgccattctgatacagcaccccatttttgctgctggaactgtgctcactaccttgtcgatgtgtcttaacaagacaaccgatgactttaccactgatagctttttgggaaatgaagagaatggcaaatccctgagggaggcaatgtttagcaacgaacgttatagggccaatatagagcgtgtcatgccatggataaatagacgaggactgcttgataattttgccaacggacattcccaataa

SEQ ID NO: 14952 - protein, 891 aa, DROSOPHILA
MGLRNSKEKQSNEVKTSKQAPKAQVNPEPPAPPNKPEPEVDHSDLVPKWLNQTQFEELLAADVDQFSKIVGFRVKPAMAPGENYATLMLRISIDVELTDKSTKLVSFMMKVPHDTPQMEQMMSMANFFTSENAAYTEILPKMEELYKAKGLDIKFAPRAFKLDATKEPKVANTVLMHDLGQNGFKNINRLECLNLEQTKFALTRLAQFHAAGATMVQVHGPYPDIFVNGVMGNNKEAIIAFMEGMLASFRTSFMANLDKFKNGEEYREKLEKALAGLTMEFMKLGIVDPNEFNALNHGDCWMNNLLFKMNSSGDLEDMVFVDFQNPKYGSPAMDLLYFIISSVQIDYKLSHFDFFIRHYQEALVKHLGILGFTGRKPSLRELHRTLIKYGGWVLFPTISVLPLVLLDPTQSATFDNFMSDSADGVSFRGSLYANKRCQEYIERILPWLDNRGFLEVSTDPLPPELLAALKPQQPQPENTDQIPDWLNIDDFKEIILSAEPNFEKILSSTSKLATKPGDNFASKLLKVEIEAQLKDNSVKTFSYILKVHSDNDAINFSDFNLFPKEIEVYSTYVPAFERFYKDVGLPVTFSPKSFRLSKDVSKEYLLLENLQPSGFKMVDRMIGMDLEHSKCTLKKLAQWHAASLKYKELNGPYSPKYNNGIFTEQTAPIFKGMFVNTKKSFIEEVSKFDGVDEYLHKMPEILDTYVDRILEDAKINEQAFNVLNHGDAWINNIMFQYESDGRVKETLLLDHQVTKYGNPAQDLYYFIMSSTQLDIKVDQFDYLIRWYHQNMKEHAKLLNYNGFIPSLKELHAILIQHPIFAAGTVLTTLSMCLNKTTDDFTTDSFLGNEENGKSLREAMFSNERYRANIERVMPWINRRGLLDNFANGHSQ

SEQ ID NO: 14953 - DNA, 3803 bp, DROSOPHILA
ttctgctccatcagcagcggaacatgataaatggagttcaaatcgtggatgcatatcacctgatccggccccacatgacaaaagttgctgatcttctccttgacctccagtccaatgggtttctccgatcggcagacaatcaaatcgggactcaggccacatcctctcagttctctgaccgaactttgtgtgggcttggtcttgggttctccggtagcctttggcaacggaaccagcgacacatgggccaaacagaagttctctctctttacgcggaactgaaactgacggaaggcctctacgaaaggcatgccttcgatgtcaccaatcgttcctcccaattccacgatgcacacctgtggctttgaagatccctgaacgggtgtctgggccacgcgctccacccattcctgaatggcatcagtgatgtgtgggacaactgcaagggacagaatgttaaatcaaccaatcttcccaatctcaaaggttttctagttataaaggataataatgggatatgatctggtttgctcactcaccttgaaccgttttgcccaagtactcgccagtgcgctccttctcaatgaccaacttgtaaatttttccggtggttatgttgttgtcccgatgcagggtaacatccaaaaaccgttcatagtttcccagatccagatccacctcggcgccatcgtccaaaacgtaaacctcgcctgcgaaaaaaattataacaattaattcgtggtttcagcataatgtggaccacccttcttagtaaaaatgaaaagaactgaaaatcattttaatgttacatttttatttccagggtatttgtgcttaggcgtaaatggcgcactcccagctttccttggagtggcgctcaactagaaatcaatcaaatagcatggcatggacacgaactaagtataatgcttacgatctaggctagtgggcgtatgtacagtcttgagcttaatctaggcattctgagctgttccactacttggactcctcaagatcttctttgtagagttccttgaagatgagcttttgtatcttggtgcgtatgcgcagcttctgggctgcggtcagctgcttcatgtacggatgtaggctgagcaagtagtggtagtcatcgtcctctggtacgagcggagtgtccattgtcgaggaaccattaaaattgctatcctcggagagacgcgggcgcttcagcttaagggcgggtatcagtccattggcgtaggagtgttgagtgaagctcaggtgatctccgtttcctcctacagcagaggtgggtccgaaatcctcatttcggtctttggccgcaagatgtgctgctgccagagtggccagcggatggtgtgctttgttgtatagaggcggtggcgacacagatctcttgccgcccattggcgctccattcgaggatacagatgacgcggatgtggtcgttgccggcgccagaacagctgctgagcccggttgttgtacttgtgcggatgtggtggtcaccattggcggtggagaacagtgtgcggctggtggttccactagcacttgtagtgagggtgccactggagatgtcatttgctgtggcggaggtggctttctgctcaagtcctccgcctccttttccagctccatcaactgagcgcggagtaatcctgccttaattaaagcgtgctgatgtgcctcttcttgggctcgcaaagctccggtggccagtggtgtggtgctaacttgattcatttgatgcgcagccggtggcgtgggcatcgtttcctccatggtggcttcgctagcctctccgtccgcctccatttcctcctcgtcgtaatcctcgtcgctgtcctgcagacgacgtattagaccgtttgttaaatccggctccaccactgtcttttcacagtcctcgctttgctggctgaagtaaaatgactgatcctgttcgttctttggcaaacgatgacgcatgtgatcagctaaaaaaaagtaattcccatttataaaagtaagtaatcacatgactcgaactcacttaaaaacaacaatgcatagtagtgcagccacttggactcaaaggtggccggatccaccataaaatcaccgttatccgcccgcggtatccttttgtactccacacggaaattgtctcgaagtcccttccatttggccttgagaacgatctctgggagagagagtgggataacgatagaaatcgctttgttcgcgcttggagtcattgtcagtgttgccaacttggctttttgttcgccaaatctgattcgaataggaaactttttaatttagctaccttttactttttacgaactttttaattaaatttaaaatatatttctttatgtgcttttaaagtttttaaaagacaaacaaacacagacactcacaatttggtaatctcatgtaaagctaatactgtttacataaaaatttaatttaattcatatttatatttatttacactattaaaattaactttttaacttttttttttttggttggcaacactgttctgggaactcttttcatccacatgctccacttacttggcagtttgtgcgctccgctcagctcgtcccacatctgctcgaggaaggccttgttgcagtggaaattgcggttccagatggccgggcgctcctcgatgtcgtgaataaactgctccacattgagcacaatggtggacttttttggcgccatcttagcgctctcaaagtgattgagtgagttttatatattttatttcgcacttttgtctctattttgcgggcacactttatttaataagtaactcctgctgtctcacttgtccgctcagctaacggtgaattgcaattgcatgctccaacggcacacacacgcactcacgcacaccactatacaaactcactgagagaaatgagaggaacgaagagcattagtcggcttcttgaccactcactaaagccatcccgctcccacccacccacgagttagttgcgatccccgaccatcaatgagcagccagtactctccaaactgttaacacaataacttcattaagattccttccttgggcttaggcccaaaatcgagctgggcgacaggaaatgccgcactgctcgctctgctccccatcgtccatcttctccctccctcgcattctgctccccagccagaagcaaatgaagaagaggacgcggcaggaaagaagcagcgaaatcaaattataaacacgccagggcggaggagagggcacgggcagacaggaacagacggcgatgagcgacgaccgagagaccaaccagccaacggttactccacgagcctgcctgccagccactctgccccgctgcaccccgctcccactaccgataacgctgccggttccgctgactctgtctctccctgctcaccgcccgccctcaatgcactggatacacttgggaaaacaggtcaatgatttaggtatttcatttcagaaatcgtcattttcaaaattactttataacttaagaataacataataatcaataatttatatgtagcacttggcagcaaaagaaaatgaaaactgtcaaatctaatcaatttaatattttttttggaaatattactgataagaaagtttacttgttactccttcccacaactaattaccaatacagtattcccaccctcatatttctccgagtgcatcgtctggccccagtgcatcggtgtggatgtggacatgtggtgattgtgtgtgtgagtcaggcgcaggcggcggcattcagtcagtcatgcaaaaatgtttgccg

SEQ ID NO: 14954 - DNA, 1368 bp, DROSOPHILA
aaataaagtgtgcccgcaaaatagagacaaaagtgcgaaataaaatatataaaactcactcaatcactttgagagcgctaagatggcgccaaaaaagtccaccattgtgctcaatgtggagcagtttattcacgacatcgaggagcgcccggccatctggaaccgcaatttccactgcaacaaggccttcctcgagcagatgtgggacgagctgagcggagcgcacaaactgccaaagatcgttctcaaggccaaatggaagggacttcgagacaatttccgtgtggagtacaaaaggataccgcgggcggataacggtgattttatggtggatccggccacctttgagtccaagtggctgcactactatgcattgttgtttttaactgatcacatgcgtcatcgtttgccaaagaacgaacaggatcagtcattttacttcagccagcaaagcgaggactgtgaaaagacagtggtggagccggatttaacaaacggtctaatacgtcgtctgcaggacagcgacgaggattacgacgaggaggaaatggaggcggacggagaggctagcgaagccaccatggaggaaacgatgcccacgccaccggctgcgcatcaaatgaatcaagttagcaccacaccactggccaccggagctttgcgagcccaagaagaggcacatcagcacgctttaattaaggcaggattactccgcgctcagttgatggagctggaaaaggaggcggaggacttgagcagaaagccacctccgccacagcaaatgacatctccagtggcaccctcactacaagtgctagtggaaccaccagccgcacactgttctccaccgccaatggtgaccaccacatccgcacaagtacaacaaccgggctcagcagctgttctggcgccggcaacgaccacatccgcgtcatctgtatcctcgaatggagcgccaatgggcggcaagagatctgtgtcgccaccgcctctatacaacaaagcacaccatccgctggccactctggcagcagcacatcttgcggccaaagaccgaaatgaggatttcggacccacctctgctgtaggaggaaacggagatcacctgagcttcactcaacactcctacgccaatggactgatacccgcccttaagctgaagcgcccgcgtctctccgaggatagcaattttaatggttcctcgacaatggacactccgctcgtaccagaggacgatgactaccactacttgctcagcctacatccgtacatgaagcagctgaccgcagcccagaagctgcgcatacgcaccaagatacaaaagctcatcttcaaggaactctacaaagaagatcttgaggagtccaa

SEQ ID NO: 14955 - protein, 428 aa, DROSOPHILA
MAPKKSTIVLNVEQFIHDIEERPAIWNRNFHCNKAFLEQMWDELSGAHKLPKIVLKAKWKGLRDNFRVEYKRIPRADNGDFMVDPATFESKWLHYYALLFLTDHMRHRLPKNEQDQSFYFSQQSEDCEKTVVEPDLTNGLIRRLQDSDEDYDEEEMEADGEASEATMEETMPTPPAAHQMNQVSTTPLATGALRAQEEAHQHALIKAGLLRAQLMELEKEAEDLSRKPPPPQQMTSPVAPSLQVLVEPPAAHCSPPPMVTTTSAQVQQPGSAAVLAPATTTSASSVSSNGAPMGGKRSVSPPPLYNKAHHPLATLAAAHLAAKDRNEDFGPTSAVGGNGDHLSFTQHSYANGLIPALKLKRPRLSEDSNFNGSSTMDTPLVPEDDDYHYLLSLHPYMKQLTAAQKLRIRTKIQKLIFKELYKEDLEES

SEQ ID NO: 14956 - DNA, 5010 bp, DROSOPHILA
ggacccgaatgacaaacaatccgttttaaagagtatagcgcccgctgcctacaagatcccgactttttcctctatctaatgttctataatgtagtttactttaggaaggccccacagtattactacggcctcaagtaattttgaataaatcatttctactttcgccagacgaactcttcgacttgaatacaaaagttaatatttcgctgatagatttctgcacatgcttgcaataattcattagtaatttagctgacaggtggggtcaataggtcatcagccggcacaagactctctcagactgatacgattattatgaataatgcgacaattaaatcaaatacacaagtaatcaaaccaaacttgctttgtaaagatgtccgtggaagcaggactttgtctagaaatatttcgttaattttttaagggtgaaatacatttctaagcctggccaaaaagtatacttcaattattcgaatattgtattttgaaattcaaattttgaatatgtcacacaataacatgaagagctcactcattttaaaaacaccctttatgagatgttaaacaataaaatttattacggttttatgtttacaaaacttaaatctaaggtacacgaataaaaagctctgcttgtgccaagcatttaaaatcacaatgtgcaatagcgaggacatccagggggttcccctcgcactggcgggcctcctcggacggaagggaatatggggatacggatacggatacggttacgggtacgggaacgggtacgggtacgggaacgggtacggatacggggtacgattcggttgacagtcgctgtgcgaggtgctgcataattgatgagtaagggtttcgtgccagctgaagctccgcccatttggggtttaataatttcgcccaccgtccgcctgtttgtttgcccatatatatatatttatatatatatatatatgtgtgtgtgtgtggatatgaatggatgtcctgacggcagttgagtccttgccgaaggaaattaccgggactcgtgtttgaacaacaaacagcgacggcgaacaagagcggaaaatgtaaattacagcgcttaattggacgcctaagcgccagctaggcatttaacgatttaaccttcgatttaccaccgcagaactctaattaaaaaccccggaaaatggaggtccttgacaatgcagcgaggacaacgaggggcaacagcactgctgcggcttgtgccctccacttgccagccgcattttccgcatcgacgagtggaatcgagcccatgttgtgaatcggaatttctatgtagttcttgtacaaggtgcgatcgttcagcggctggatgggtcggaaattgttcttcagatgatcatcgttggctgtcagcagacggaaggcattcaactgcaagggaagagtatagtgtaaaacataaaaaacaaggttcacttaaatatttatttacctgcttctccgtgatgtcaatgggcgttgtgaaatcaatccaggtgacctcctcactgcaaggcggtgtggtcagagaaccagtgtagctaaagtaactctccacggacttcgagatgtactcgcccagtggaagtggattggtcatattaacgctcttgcctttgcggtcaatctgggagagcaagttggtgaagccctcatagccaccagttgatttgtcgcccacctaatggaatatatttctgtataaggatctatgttcttaaactccaaaagtcagcactcacctgaaagaagaaggccatcacggcgatgccgtgatccttgtccagggcgctggcaaagtccggatactctagattccgcaataccacgtgcaactcggcgggataggcacgattgttgatcaaatcctcactgccaatcgtatcgttctcgccccagtgaaagtggaactgttcgaactgatagcccagaggagttttctccgccaaaggaccaccacgcacacttgggatctcgtcctcgttgtagctcatcttcaccagcaccgtgtgaccgttgttcgtcatttgaagattgtcgggcaccactttgaaattgaaaaactccagcttgggaaacttcttctccacggcgctgacctggtcgatgtttatgggactctggtgctttccactgcagcgggcgtaatcctcgctccagtgctcgggtccatgtctgccctcgtagccaaaatcttgggccaagaccaaagaagctaaaaatgtattaaataaattcattaaaatggcaaattcatctcctcgaatgtgcgtcaaaatatataatagatattcttcaatgggggcaaacaaacagagacagttaatcgagccagccaggtgctaattaaacgataatgtcggtgacatttcgtgacatcgagtgggtgtgtaatcagtgatacctgtttaagcaatctatcagctatttttggtcacagcgaaagctataaatatgcgatttgtgtgtcctatacattttgcacactttttattcattgacaagcagttcagacagttctaaaatctagacagccctaattggccattcaattagcattaatcgggtaacaattaagcgtgtaaagtttatttcagtttgcatagggaagggcgcagcagtcaattgtaaatacaatctttaatttgttaaattttttatacaataaccgaccgattattggctaatttgtgggccaccgaaaatgatagcaaatttagccgaacacctataccaaaattatctctcattaacaagttgcctaatttttgccaaatttaagttaattacgatacaaattctattagcagcgcatttagtatggtattcccaactaagctcacaccgttgttaagcaaagtgaatcttaataggataattaaaaaaaaacatcgaaaaaattcccttgtgattgcctaacgacagcgggtatcatgtggtctggtcatgtctcattctggtttgatcatcgtggacacgggtgacgaatagccaagacacccgaatggcaggtggaaggttgaagatcaatcacgtgaccagcttgtaggtaactataaataaatatacaattcccattgcagaactactctggatcctcgatctatctctagatagtgataccatcgtaaaagcttcatactgtgatttaataaaaaaaaattttactgatttataaccaagataatcgagttgctttgtaatgatgtataactagtctaacttgtaggtagtagtataacctggtactagtaaactagtaaatggtttttatttatatttatctgcatataataaattttacttctttacgcactattgtttggttaaaccttattctttttttttgctcccttattttaaactaatatgttactacatatcttaacataaaggttgcccttctggttttctctgcaggtaaagtggacgaaataaaacaaaaaccctccacttgaaacggtgcttgatcaaataagagcgttttaatttccttgtagtgcgacaaagtcctggacaattgtttaaatatttgctgcacttagctgagtaaacactttgccgcaagagatgagagcacacaaagagcttaattgcaatccccgtatcttgattaacgcacttttggtcaacagttccccattatcgggttacacctttatagtatatacatgtttatgtacttatgtttgtatgtaaataaaactatatagcatatattgtagtttagctcaccacaaatcaagatcggagcaatgacaattgcgaacggggtgttgcgacacctcctcatggtttcaccttgccgcggactcacttttcacggaacacacttgcccttatcgggaattactgggcactgtcaccagtcgcgactaatttacgaactgtaactatttgcggcactggggcacacaaatctagtggctttcgaacggttttaagctgacagtggagacactgtcttactatccgtgctcacccgccgaacgcggtcacacaactgcggttagggaatcggcgacaccgcaacttatatagcctcgtcgagggtttgtggtgcttctgtgttattttccgttttttttttttccattttttttatatatatatattttcgtagctgccaatcgagttggaagcccagtggtcggcggaactttcctatccactcgagagatagagaagcgacctatttgggcgccaagccaagggaaaccaaacccaaccaaaccaagccaccaaaacgccagccacaatccggtgtcgatgggaatttaaaaggttaaccatccggatgactttaggttgccctaaccttgccattgaattgaagcatttgggttactttgacttacttgtgaaaatattccactcaactggatactagaataaatagtactgtcttgagtgaaatcgcaactgagaaatcccccagtaatgagtttttactatccatgtcttataataacaaactttttatgggctacactgtttaattaacagtacggcaattaatagtgcctcttaagtgcttcactttaactataaagtttttttttagcgctataaaataattaaagagcttgctggtattaagcaaattattgggtagtaacctgtttagaaaaataatttattcgtatagctcagagtaaagcatgatcatatttgatggggatttttaactttctgttcctagcgacgcacccttgggtgtactactacactatcgccgtaagcttttgaagtttccgttagtttagttcaaccttatgtcatagtgtctctttgatagcttctatatgccggggaatctaaggtatcacagggtatgcccgatgcgaggtccgaaaaaccagcgattaatttatagccgagtgactaatggtgtgcgtgccggacttaaccgtcgatgagtaactgccaaattagatgactgcgataaagatggtaatccatggcggggaagaccgaaagacgcgactggaaagt

SEQ ID NO: 14957 - DNA, 1368 bp, DROSOPHILA
ccgcgttcggcgggtgagcacggatagtaagacagtgtctccactgtcagcttaaaaccgttcgaaagccactagatttgtgtgccccagtgccgcaaatagttacagttcgtaaattagtcgcgactggtgacagtgcccagtaattcccgataagggcaagtgtgttccgtgaaaagtgagtccgcggcaaggtgaaaccatgaggaggtgtcgcaacaccccgttcgcaattgtcattgctccgatcttgatttgtgcttctttggtcttggcccaagattttggctacgagggcagacatggacccgagcactggagcgaggattacgcccgctgcagtggaaagcaccagagtcccataaacatcgaccaggtcagcgccgtggagaagaagtttcccaagctggagtttttcaatttcaaagtggtgcccgacaatcttcaaatgacgaacaacggtcacacggtgctggtgaagatgagctacaacgaggacgagatcccaagtgtgcgtggtggtcctttggcggagaaaactcctctgggctatcagttcgaacagttccactttcactggggcgagaacgatacgattggcagtgaggatttgatcaacaatcgtgcctatcccgccgagttgcacgtggtattgcggaatctagagtatccggactttgccagcgccctggacaaggatcacggcatcgccgtgatggccttcttctttcaggtgggcgacaaatcaactggtggctatgagggcttcaccaacttgctctcccagattgaccgcaaaggcaagagcgttaatatgaccaatccacttccactgggcgagtacatctcgaagtccgtggagagttactttagctacactggttctctgaccacaccgccttgcagtgaggaggtcacctggattgatttcacaacgcccattgacatcacggagaagcagttgaatgccttccgtctgctgacagccaacgatgatcatctgaagaacaatttccgacccatccagccgctgaacgatcgcaccttgtacaagaactacatagaaattccgattcacaacatgggctcgattccactcgtcgatgcggaaaatgcggctggcaagtggagggcacaagccgcagcagtgctgttgcccctcgttgtcctcgctgcattgtcaaggacctccattttccggggtttttaattagagttctgcggtggtaaatcgaaggttaaatcgttaaatgcctagctggcgcttaggcgtccaattaagcgctgtaatttacattttccgctcttgttcgccgtcgctgtttgttgttcaaacacgagtcccggtaatttccttcggcaaggact

SEQ ID NO: 14958 - protein, 335 aa, DROSOPHILA
MRRCRNTPFAIVIAPILICASLVLAQDFGYEGRHGPEHWSEDYARCSGKHQSPINIDQVSAVEKKFPKLEFFNFKVVPDNLQMTNNGHTVLVKMSYNEDEIPSVRGGPLAEKTPLGYQFEQFHFHWGENDTIGSEDLINNRAYPAELHVVLRNLEYPDFASALDKDHGIAVMAFFFQVGDKSTGGYEGFTNLLSQIDRKGKSVNMTNPLPLGEYISKSVESYFSYTGSLTTPPCSEEVTWIDFTTPIDITEKQLNAFRLLTANDDHLKNNFRPIQPLNDRTLYKNYIEIPIHNMGSIPLVDAENAAGKWRAQAAAVLLPLVVLAALSRTSIFRGF

SEQ ID NO: 14959 - DNA, 5264 bp, DROSOPHILA
cgctaaacatttattgccaactgaccataatgataagagtacaggtactacatctgatagcttatcgtcgacctacacgaaggtaaacacccacccacccagtttatttcttcctttacgagattgtcccaaattggtgctataaatagtagtgcgcagttaactcaccagtgagctccacatctatgctgatcctgagcattagagtggcatagttttctcccggtgccatcgctggcttcacccggaagcccactatcttggagaactgatccacatcggcggcgagtaattcctcaaattgcgtttgattcagccacttgggcaccaaatcactgtgatccacctcgggttccggtttgttgggtggagctgggggttcagggttcacctgcgcctttggtgcttgcttcgaagttttcacttcattgctctgcttttccttggaatttctcaatcccatattatcgttctagctgcttgaatatatcgaaatagtagacttctatggcgatttgcgtccgttccgctgggcgatcgacgctgaactggtttgcggcacacgaatgggctcccaagttatgcagttctaatcactagtggtttgtttcgataacaaattggcattaaacaaacgtttgttatttcatcacttttcagaagtttacgcgtttttataactaatcgttaagagcgatagccgtgaacttaagtctatcaataccataagaataattgggttgataggtgtaactagcagctggtggtctttatcagtttctctcttcttgattagaagaattgattgttgccatcagccggaaatttatctttttgtccaatctaagcccaaaggaaatgcgtagactaaatagatatttgtatatatgtataaataaaacagtgtatacatttatttgtaacttttccataaagtaattttttaaaaattgtcaacaaatcatttatgcttcataataacacatttttgctaactccttcaaggatcgaggagacccctcctattaagccaaggcataatcttttccacgtgggctttgtaacgctcgttgccaagaagtttggttctaaaggcttcggattccggcgtctcgacaaagaataattccggattgaaaccttcatcggttaggcaaacagttagtgtgctgatgactgtgccgacagctgtaatttaaaatagtcgtgagtgaaatacttatcatgttacctaatatcacgtaccgaatgccggatgctctatcaatatagcgtgcagttcacttagtgaaggcacgaatccgttgtatttcaataatttcgtgtgctctaccaagttttcgtggtaaaagcggataagattgtcaaactcatcgaccttgatgtccagttccgcagaactgattaggaagtagtaaagatcctgagccggattgccgtacttcgcattctggtgatccagcaaataggtttccttgagccgaccttccgcgtcgtattggaacatgatgttgtttatccaggcatcgccatggttaagcacattaaaagcttgctcattgatcttggcatcttccaagacctggtctacatggttgtctataatccattcctttaaaaacaaatagaatctgcttagtaattgaaatagtagtatagtaatacagtgaatttctttactagtttgggtaaatattcatcagcgccttcaaacgttccgaatatccgaatataagcttctttggccgaggcaaacatgttatgaaatacgtctctagtctgttcaatatagattccatcgttatataacggaggatatgcaccatttagttccttgtacttaatggaagctgcatgccattgggccagtttcttcagcgaactctttgtgtgctccatattcaaacctttcatacgatctgccattttgaagcctttggtctgcagattttccataagcaaatattcttcctttactgctttattcaggacgaaggagttggcagtaaatgtaactgtcaagcctgcatccttatagagttgctcaaaggcaggtacatatttttggtacatttccatttccttgggaaacatattaacgtccgtaaagttgtcgggcgtggactttggctgcactttcagtatgtaggagaacgtcttggaagtgtgatctgcaaaggattttctcgattaagcccactctcacacttctgattacgtacctttcagttgggtctcgatgtcaatcttcaagagcttagacgcgaagttgtcacctggtttggttgccgaagaccaagatccgcccacaatcttatcgaactcgggttcggcggatgaaatgacttctgcaaaatcgctgacattcagccagtccagtatttggtttttgggattctctggttgctccgatgagggcgtttcgggcgcaacaacctgattaatgaagctgcaaataatttgttgagtaacggaagtagaattgaatttgccttaagcttactaagcctccaaaaatcccttgttgtccagccatggaagcaatttttcaatgtagccgtgatagcgtttgttggtgtacagaaggttcttaaacttggcgctagattcggagtctcccaggaaattctcaaaagtggctgactcgttgggatcgaggagcacaattgggagtacgccgatcgaggggaacactgcccaacttccatgtttgtacatcagcatgtgcagttcccggagagatggctgcttgccggtgaaacccagcaaatcgagatgctgggtcaactgctcatggtagtgcctgatgaagtattcaaagtaatccagcttgtagtcaatgtgcaccgacgtaagaataaggtagaacaagtcctgagtgggtgagccgtatttggggttctggaagtcgacgaagagcatgtcctgcacttccccctttgagtccagcttgaacaggagattattcatccagcaatctccatggttcagtacgttgaactcatcgggatcggctgtcattaggtgttcaaaatccaagaaaatctgaacaaatgccttttcctaaataaatgtgttatctttagtatttgcttttaattagtgaaagtgaaattttaccagtttctcgcgaaactcttctccattcttgaagttcttcaaattggccattaatgccgttcggaaggaggcaaccattccctcgtagaaagccataagtacctccttgtttccacccatgactccattaacgaattgatcttcatagggtccattcacctggacattcatcgaagatgctgcatggaactgggccagtttcttcagtgcgaacttcgtttgctctaaattgaggcactccaggcgatttaggttcttgaacccatcctgacttaggtcgctcatcagcacagtgttggccaatttgggctcctttacggagtccagtttgaaggctttcggagcaaaggtgatgtccagccccttggccttgtaaagttcctccaattttggcaatatatccgagtagactttattctcgctgttaaagaagttggccatggccaacatttgttccatttgggggacgttgtgcggaaccttcagcatgaagcagaccagtttggtgctcttgtctagttgagagatcggaatttgaaagctcgttagttgaaatattcaccacaaaaccatttgacttggaaggtaattattgttggacatgcacttgctattgctggcaaatgacccaaacggcaggcattgatattgtactggctataaataaattgaagatactacttatcgccagtctacaccaaaaaaagttctccaattagattgtgaaaaccaaacagattgtgaaaattatcaaattctatggtcataacatggggaatgagtcgtccccgggggaagacctaccagttagctccacatctatgctgatcctgagcatcaacgtggcatagttttctcccggtgccatggctggcttcacctggaagcccactatcttggagaactgatccacatgggcggcaagtaattcctcaaattgcgtttgattcaaccattctggccccaaattggacttctcaattggacacggcagttgtggtggtggcgtgtcagccgtagtggttgaccccttaattttcgcgttagatgagccagaaatgtttattgatgcctttttctgattcaggtcgccggcggaagctacctcatagctttttttcgacttggaattacgcagtcccattgtgaggcgagagtagtttgactagaactagaacgaatgccgtacgtccgtttggatgcggtaatgtctgtgaactgatgtttggcagacagagttcccccctagctatgccgttcagatcgtcgttgatatggtttaattatttcatcagcgtcgacaattttaagctcaaccgtatgcgagtgtttgagctattcattgagtgagtgcttttcactcgaatatagtagaatatactcagtgataagagctgcggagctgataaactcatagcgcacacctcaaacaaaacaagcgataaaggtttatgaactgataatgaaattatatttatctaccgcttttattgaattacttacaaacataatatcaacagtttacacacatttatttggttatttcaaaggcaccccttctatgggcccagggcagaatctctttttggtgcttaatgacgcggtgattcttgaacatgttgttccggatcttgtcaccagctccctcgccatccatcaaactatccatattggcatcatcaccgccatcgattaggacaaggggcagcagaatggacacaattggcagtactggtttttcaaatgaatgcaaattagtatcttatagataactgattattcagtggttgacttactccagtcgccgtagatgaagatcgattgatgtagacttctaagcgaaggcaatggtttcggatacttgagtagtttaaggctctcgatgagcttttcgtgatagaacttgatcaagtaatcaaacttggctatcttaatgtccagttcagtggaggagagtatcaggtagagtaggtcttgtgctggcgaagagaaccgactcatttgtaaatccacaaaatttacctcagccagctttcccgcctcatcgtattggtacataatattattgcaccaggcatccccatgatttagaactcggaattctccctcgatcttgggtgcaaatgattggaacatatcatccg

SEQ ID NO: 14960 - DNA, 2673 bp, DROSOPHILA
atgggactgcgtaattccaagtcgaaaaaaagctatgaggtagcttccgccggcgacctgaatcagaaaaaggcatcaataaacatttctggctcatctaacgcgaaaattaaggggtcaaccactacggctgacacgccaccaccacaactgccgtgtccaattgagaagtccaatttggggccagaatggttgaatcaaacgcaatttgaggaattacttgccgcccatgtggatcagttctccaagatagtgggcttccaggtgaagccagccatggcaccgggagaaaactatgccacgttgatgctcaggatcagcatagatgtggagctaactgacaagagcaccaaactggtctgcttcatgctgaaggttccgcacaacgtcccccaaatggaacaaatgttggccatggccaacttctttaacagcgagaataaagtctactcggatatattgccaaaattggaggaactttacaaggccaaggggctggacatcacctttgctccgaaagccttcaaactggactccgtaaaggagcccaaattggccaacactgtgctgatgagcgacctaagtcaggatgggttcaagaacctaaatcgcctggagtgcctcaatttagagcaaacgaagttcgcactgaagaaactggcccagttccatgcagcatcttcgatgaatgtccaggtgaatggaccctatgaagatcaattcgttaatggagtcatgggtggaaacaaggaggtacttatggctttctacgagggaatggttgcctccttccgaacggcattaatggccaatttgaagaacttcaagaatggagaagagtttcgcgagaaactggaaaaggcatttgttcagattttcttggattttgaacacctaatgacagccgatcccgatgagttcaacgtactgaaccatggagattgctggatgaataatctcctgttcaagctggactcaaagggggaagtgcaggacatgctcttcgtcgacttccagaaccccaaatacggctcacccactcaggacttgttctaccttattcttacgtcggtgcacattgactacaagctggattactttgaatacttcatcaggcactaccatgagcagttgacccagcatctcgatttgctgggtttcaccggcaagcagccatctctccgggaactgcacatgctgatgtacaaacatggaagttgggcagtgttcccctcgatcggcgtactcccaattgtgctcctcgatcccaacgagtcagccacttttgagaatttcctgggagactccgaatctagcgccaagtttaagaaccttctgtacaccaacaaacgctatcacggctacattgaaaaattgcttccatggctggacaacaagggatttttggaggcttacttcattaatcaggttgttgcgcccgaaacgccctcatcggagcaaccagagaatcccaaaaaccaaatactggactggctgaatgtcagcgattttgcagaagtcatttcatccgccgaacccgagttcgataagattgtgggcggatcttggtcttcggcaaccaaaccaggtgacaacttcgcgtctaagctcttgaagattgacatcgagacccaactgaaagatcacacttccaagacgttctcctacatactgaaagtgcagccaaagtccacgcccgacaactttacggacgttaatatgtttcccaaggaaatggaaatgtaccaaaaatatgtacctgcctttgagcaactctataaggatgcaggcttgacagttacatttactgccaactccttcgtcctgaataaagcagtaaaggaagaatatttgcttatggaaaatctgcagaccaaaggcttcaaaatggcagatcgtatgaaaggtttgaatatggagcacacaaagagttcgctgaagaaactggcccaatggcatgcagcttccattaagtacaaggaactaaatggtgcatatcctccgttatataacgatggaatctatattgaacagactagagacgtatttcataacatgtttgcctcggccaaagaagcttatattcggatattcggaacattctatttgtttttaaaggaatggattatagacaaccatgtagaccaggtcttggaagatgccaagatcaatgagcaagcttttaatgtgcttaaccatggcgatgcctggataaacaacatcatgttccaatacgacgcggaaggtcggctcaaggaaacctatttgctggatcaccagaatgcgaagtacggcaatccggctcaggatctttactacttcctaatcagttctgcggaactggacatcaaggtcgatgagtttgacaatcttatccgcttttaccacgaaaacttggtagagcacacgaaattattgaaatacaacggattcgtgccttcactaagtgaactgcacgctatattgatagagcatccggcattcgctgtcggcacagtcatcagcacactaactgtttgcctaaccgatgaaggtttcaatccggaattattctttgtcgagacgccggaatccgaagcctttagaaccaaacttcttggcaacgagcgttacaaagcccacgtggaaaagattatgccttggcttaataggaggggtctcctcgatccttga

SEQ ID NO: 14961 - protein, 890 aa, DROSOPHILA
MGLRNSKSKKSYEVASAGDLNQKKASINISGSSNAKIKGSTTTADTPPPQLPCPIEKSNLGPEWLNQTQFEELLAAHVDQFSKIVGFQVKPAMAPGENYATLMLRISIDVELTDKSTKLVCFMLKVPHNVPQMEQMLAMANFFNSENKVYSDILPKLEELYKAKGLDITFAPKAFKLDSVKEPKLANTVLMSDLSQDGFKNLNRLECLNLEQTKFALKKLAQFHAASSMNVQVNGPYEDQFVNGVMGGNKEVLMAFYEGMVASFRTALMANLKNFKNGEEFREKLEKAFVQIFLDFEHLMTADPDEFNVLNHGDCWMNNLLFKLDSKGEVQDMLFVDFQNPKYGSPTQDLFYLILTSVHIDYKLDYFEYFIRHYHEQLTQHLDLLGFTGKQPSLRELHMLMYKHGSWAVFPSIGVLPIVLLDPNESATFENFLGDSESSAKFKNLLYTNKRYHGYIEKLLPWLDNKGFLEAYFINQVVAPETPSSEQPENPKNQILDWLNVSDFAEVISSAEPEFDKIVGGSWSSATKPGDNFASKLLKIDIETQLKDHTSKTFSYILKVQPKSTPDNFTDVNMFPKEMEMYQKYVPAFEQLYKDAGLTVTFTANSFVLNKAVKEEYLLMENLQTKGFKMADRMKGLNMEHTKSSLKKLAQWHAASIKYKELNGAYPPLYNDGIYIEQTRDVFHNMFASAKEAYIRIFGTFYLFLKEWIIDNHVDQVLEDAKINEQAFNVLNHGDAWINNIMFQYDAEGRLKETYLLDHQNAKYGNPAQDLYYFLISSAELDIKVDEFDNLIRFYHENLVEHTKLLKYNGFVPSLSELHAILIEHPAFAVGTVISTLTVCLTDEGFNPELFFVETPESEAFRTKLLGNERYKAHVEKIMPWLNRRGLLDP

SEQ ID NO: 14962 - DNA, 6689 bp, DROSOPHILA
attaattattgtaggcgattcaaaactagatttttaaattgcgttgcgttttttaatccaaggctagtacacaagcttattatttagaacaaataatatcccgaatccgaaaatcattttatacggtatgtttggatatatttctcccccagatttttatttgatttccattgcccgacggtcttggtccacctcccacaacgaaaattgcctgatgctggttttccctcccactttgtttggtttctggggcggcaggatctttagtgtgatttatttgcgcagagcacaatgtactttcttttcaaataaatcataaatttcaacgcattgccgtgcagtacacaattgttcttgatgtggctcccgctccagatttcgccacgcccaccaataatttttgcccaacgaacggattttcccgctatctcgcagtgagcgttttcaagcttggatggcctatggtcgcgttgcgacagcaattgagttatccgaaaagactatctaagcagaaaggaagatgtatatgcgttcagatatttcatattatatttattgtgtttttatggcacttgggcatttggcccaagtcgcccagcgttttgtttgtcctggtgaaaaatgtaaaacggatctcgaccctcgcaaggccgcagggagaattatgagctaaacgcgacacgcatttcagatggcgtgggtggtgccaaagtgggtggctgtggtgcttccagttgaagaactgaccaagtcgagttggaaacacatgatttgtggcggttttgttaagccagccagccagtcaagtgagatttagtcgcaatggttttggcctttaagtttgatttacaggcaacacttcattttgtgatcttttgaaattacttgaagaacactgcagttgaaagttcaaaatataaaataaatttagctaacatgattttattaaatttatcacaattttactatttcctacaagcttaaacattcataggcacactcaaatgcgagtaacttccttttccttgttaacctcatcgatttgcacctgaacgggagtacgatatgcactttgaaccatcatggatacgagaaccatttcaaccaggataaggatgttgatgatagctgtaaaaaaatgttaagaaatgttgaaacaatattattattaagaaagtaaattaagatggatctaaattactttgaagtaagatactcactttgcttgtagacggtgtgattaatgggatactccccacccattttgatgccgtccagctgatcatagagtaccaggtactgcagtttgcaaagcatcaccaccagttggaggcagaacatcttctttctcagctgatagtccccgcgcaccttcgtgatcatccgcacagtgatttggagggaccaagcgctattagtgaacaaacacttagctcgtatgtttataataataataaaaacgaatcaaatatttaccccaagacaatggagcagacgatgaaggggatgaagaagaacatgacctgccggtagagctgaatgtcccggtagtataggatgttcatcaccagcataatggagccctgccagaagggcatttgccatacctgcgaaagtgagtccttttttagtataatatttccttgcaaatccgatttctgggacataccatgtatctggagatgcagagtttcgccttggtgggaatcaccatcggcaggcagaggcagcagcaacagcacggaggagtatttagttgcaccgcctcgccggccgtctccttcacgtaattctgctccgagcccacgtaacgaaagagcagggtgcggaagacaggtccgccgaccataaacataacgtgcatcaccgtatggcagatgaaccaggagtacggcaccagaatggtaaccagggcagccaccgagataatcggatacaggcccaccatcataatcgagggacccagcagcggcttgtccaggtgacgacgcagccgagagactgtcgttgcgaagatgctgatgttgaggatggtcagcaggctggctatgaagatggccaggctgaggaaggcggtcatgtctgtaagtgagttcccagaaatccaattagttggaagaagggtgtggggcttatgtaacattttagtattattaaacacacgcttcaatgagaagcttttaccagaagcagttaccagaataaaccttaattttgtcaatagaacttttatcttgactgtatcaacctggggttgcatatacccatataggcgtaaacttgtaaataaaatattttaatggaagaacattgttgtagataatatataagacacattaatctttattaatatgctatatatacaacaaaattagataacgtcttaattggtgtttttaagttataactatattttctttatattttaatatatttttaatatactcactctcataatactcttccacagtgggatgtgttcgcaggctatttgtgttgtttctgttctggtctaagacctgggatatattctctgtggggtccatcgtgaaatagttctcactggcattcattgtgcggcttttatacttaaggtgataaattcaaactggggcaagttggtgcaatacttcctggtttccttcgcttacgctgcagcacttcacttcacatctttatcatagttcacaatttgccacttagcagactttgcacctcattagcactcatacatgtatctacatggggaaacatagagatattggttattctcctactcaggtgaaagtgtgaacagtattttttggttagtaactgatttgattccaaatgaaggcattgaaccttactagttaaaatttgacgcggcttgtttgaagtaataaataaaatgtgaatattatttcatttctgattattgctaaccaaaagtctagacgaagtgttaatacccttagacacgatcgccaggagttcgcttcaacaactaattaatggaaaaaatatgaacgatgacacatcttttccgaagccttttcacttttcgataatttcatgaacctttattgcaaagcttaagtaaccttgtaaggttcaaaagcacctataaaaatcgagttccactggattttatatgtcacgtgacaaaaaaataataatattttatatcaatcaagataaaagcccccagtagacatgacaaaagaattttcaattatagcctcattaaatgaatttggctatcatcatcccaaaatatttttccgtctttatatcttagaaaaaaattcatttaattttgcatgaagcattctctgcaaataaatttaaacttctctgaatatatacagattattaggtcaccttaataagaaaatgactacaataccgaaatatagtacaactcccccaacttttttttgcacttattagcttcaagtgttttaacgtccatgcaactataaacaaaacaattaaaaatttcaaaacaactggccattcagtcggcacataaaagagcatttaaacatcggcaagtctgaggagacgagcacgtgaccgaagcctgaggcgattccatggagtccagtcagttttttgaagcccaaagaagacccgactcccctcaaccaaatccaaatccatgtgaggaactggttttcgaaagcagacagtaggcaggtaacagaccggccatactaaagcaaattatacgagttgcctcattgcacagcccattatgtaatctctgtgttattgtccatttacaaactggtttcatatttttgcacagtaatagccgcatactacgtgttgaaagtacccgtaaacacactgaaacatgattcaacatctcgtagcaccagcaacggccttcagatctgctccaaaaacgtgtcaaagtccccgccatctgaccccaatttatatccgattcaacgtaatccggagatggggaaatggagaagaatcacggcttatcgccagtgatcacaatccggaatcagacgatccaatttcatcagctggcgaaaagagagcaaatccataatcaatttacaagccagccataaatcatttaccaaaaaattagcattcgccgaatctttttgaatttagcacattctaaggtgcgtaaaacaaatcgcgcaaataagcgtcatatatataatttgtattcgtgtataagcacatagtaggtgtatatatgcacttttgggtggtttttttttaacagatcgcaaatgggcttggcacgccattaacaacaaattaaattttgcaaatacaaaaaatatttcagctctattttgaaaacgtgctaacgtaacaaacgtcataaaatatcatgttactcttgtgaaattggctacaaatttgggtaaagagaaaaaattgtcagtgtcagttgtgcaaatagaaattttttcgttacatttaagaataaataaatttcattaagaaaatatttatttatgtttcaatttttgggtataaaaacagtgttacacaaaatgttcgaaatgaattgtaaacattggccaaaaacaagccaggctttgcatttcgatgttgcaacacttttttttttgtgggaccattgttaaatgaggcattttgtatttctttttcattcacatttatgcccacagcttttttgctgactgtcatctattggccggccctgactcttggccaagatgtttccgagcttttgcggctaacaaaattcgaatttcttggcgagacaaagtgctgtcagagtgtatgggaaactacacgaccttacgcaatgcaaacaaattgagcagagcggaaaacgtttgaaaaaccaaaataaaaccgaaaatcgaatgcaaatgcgagtgcatttttgtgggacaaaatcaaaatcagaacgcagacctcaaaatgtaatttgctttctggtcgacatagcaaatgatttcctcctgaaattcgcaagaggaatttgcacaaagtgagttgaagatgcaaggaattcacctatctacgcttactcaagatatcagctgttcattagggaatgtgtcaagtgaagacattcaggaatgacagctatctagataaaaacgtaattaattgacttgtctgataagatgcttcagctcccaattgtcacatattttcgacatgaatgaagctaaagcaaaaacattttgtaaattcgcagaatcgtttgcggaagtacacagcttctgtttaagttattatctcaacggagaagacaaatatttgttattcgtttgaattggtttgtaggagatgcagcagatatcagcttttcttggctgcaaccttgaccatcaccacagcactttacgtttgcccttggcattgcactttaatgaattgtttaaagaatttcaattacactcggatgcaattcgagttgtctttaattcatattgattgctcgccgtcaacgaatgaagagtaattattctttacatgttcacacgaatgtatcgtaatgaatattagcgttggatcacgagttgagctacgaatcaataaacgacaaaaatactttgcactgcaattggttgaatgaattttgtttaattttgcacttttctctatttttatttgctgcttacacttcacactccctgttttctcagcttttcaagcaattttttagccgcgtgtgtcttattcgctcgcacgctgttcaccaactgaaatgaaactgaaaatattgtagtgcccatgctgatcacgaacgcgaatgcgcccatcacagaccactgactataatgctggccaagtggctataagccgctgtgtgtgtgcgtttgggccaaaacagagaatagcggtagcaatagccacaatacctgcacacacctgctgacgcgatgtgctaatcgacatttgtcgattgcaaacgccgctgctgctgggaaaagttttcttaacactcgctcgctgcggaagttggctatttgccgatcaaaaagcgtttactttggacagccgaagtgaagctcgaaaagaggctggtcctgctaacacgtcggtaagccattgcgaaatgaaaagatatcttgatgatcgagagtgaaaatttgatcacgcaattgggtaaactaaaaacatacattaaggttaaagtaccaggtaagaaatgggtggatcatcaatattacaaaacactacaattttgtttggatacgtcataaaagtttatataaattggtaatgttataatccccaaagcatatatttttctatatatatacaatatacaccgctaatatatatattccaaatactcaacataaattgcgcagtgatcttcgcaatggtataaattatggtatcagctctgaatatatttttctttttatttaattaactttttttatgccctgaagaccactgtgcaattgagaaaattgcactcctatcttccggtgcggccaacccaatttttatcgccatcgctgggcactcaagttgaaagataatttgtataggaaagtgccatcagctttatgagaagtccagaacttatggatttcacgccaaaagccaattaacatgtccaaccaggtgataattacttattccagtgttcgatattgacctcagggaattgaagtcgcggaatataaataccgcgatatacaatgtatataatggcggcgcttcaatcagctatt

SEQ ID NO: 14963 - DNA, 1220 bp, DROSOPHILA
tgcgagcgaataagacacacgcggctaaaaaattgcttgaaaagctgagaaaacagggagtgtgaagtatacatgtatgagtgctaatgaggtgcaaagtctgctaagtggcaaattgtgaactatgataaagatgtgaagtgaagtgctgcagcgtaagcgaaggaaaccaggaagtattgcaccaacttgccccagtttgaatttatcaccttaagtataaaagccgcacaatgaatgccagtgagaactatttcacgatggaccccacagagaatatatcccaggtcttagaccagaacagaaacaacacaaatagcctgcgaacacatcccactgtggaagagtattatgagaacatgaccgccttcctcagcctggccatcttcatagccagcctgctgaccatcctcaacatcagcatcttcgcaacgacagtctctcggctgcgtcgtcacctggacaagccgctgctgggtccctcgattatgatggtgggcctgtatccgattatctcggtggctgccctggttaccattctggtgccgtactcctggttcatctgccatacggtgatgcacgttatgtttatggtcggcggacctgtcttccgcaccctgctctttcgttacgtgggctcggagcagaattacgtgaaggagacggccggcgaggcggtgcaactaaatactcctccgtgctgttgctgctgcctctgcctgccgatggtgattcccaccaaggcgaaactctgcatctccagatacatggtatggcaaatgcccttctggcagggctccattatgctggtgatgaacatcctatactaccgggacattcagctctaccggcaggtcatgttcttcttcatccccttcatcgtctgctccattgtcttgggcgcttggtccctccaaatcactgtgcggatgatcacgaaggtgcgcggggactatcagctgagaaagaagatgttctgcctccaactggtggtgatgctttgcaaactgcagtacctggtactctatgatcagctggacggcatcaaaatgggtggggagtatcccattaatcacaccgtctacaagcaaactatcatcaacatccttatcctggttgaaatggttctcgtatccatgatggttcaaagtgcatatcgtactcccgttcaggtgcaaatcgatgaggttaacaaggaaaaggaagttactcgcatttga

SEQ ID NO: 14964 - protein, 328 aa, DROSOPHILA
MNASENYFTMDPTENISQVLDQNRNNTNSLRTHPTVEEYYENMTAFLSLAIFIASLLTILNISIFATTVSRLRRHLDKPLLGPSIMMVGLYPIISVAALVTILVPYSWFICHTVMHVMFMVGGPVFRTLLFRYVGSEQNYVKETAGEAVQLNTPPCCCCCLCLPMVIPTKAKLCISRYMVWQMPFWQGSIMLVMNILYYRDIQLYRQVMFFFIPFIVCSIVLGAWSLQITVRMITKVRGDYQLRKKMFCLQLVVMLCKLQYLVLYDQLDGIKMGGEYPINHTVYKQTIINILILVEMVLVSMMVQSAYRTPVQVQIDEVNKEKEVTRI

SEQ ID NO: 14965 - DNA, 3647 bp, DROSOPHILA
tccttgacgccggtgatccgattggcagccacttcgtccgccggcgggctaaacgcctttccagtccctatttcgacaaggaaaaaacgttggttctggccaaatatgtagtctcgattcgatcccgaagaccccacaagttatttggcgacaatcacttctgcggtggcgtgatcatatcgagaacctacatcctcacctccgcccactgcgccatggagtaggtatagaaaagatcaatatataattgactgttatgtcctttaatcaatgcaaaagtaagcgcaagatcgtacatcgcagtcgggtgttggtggttgtggctggaaccacaaatcgtctgaaatcccgcaaaggactctctttaaacatggaggtgaagaagatctttgtcccagacaagttcacagtattcaatacgaacaacattgcgctgatgatgctggccaaaaaactacccttggacaatccgcttgtgggtgtgatcaatctgcctacggctgacccagaaccgggtttgaactacacggtgctgggctggggaaggatcttcaaggtaagttgtggtagttacgaactataagtaggtttattattaactatagggcggtcccctggcctcggacatcctgcacattgacgtggagctattgccccgggatatctgtgagaagaaagtccacatcttcaaggaggagatgatgtgcgccggaaatctgaacaacaccatggacgagaatccctgtgccggtgacaccggaagcccactgattttcaacgaaacagtctttggtgtggttagctaccgagtaggctgtggatctaaaactttgccctccatttataccaacgtctacatgcatatggactggattaatggcattatgaacaataatgaagcgaaccgattgtgttactctcccaactatctattcaccaccattggtataatcattggaaataaaattctgaaaagttggggattttatttgatcaccatttaaacgaggagacctcccttggcggtcaaagcgggcaggtgcttcacggtcttcaggaaatcggccacctcgcaagcataggaccaaccggccttgatgtctgtagtcttccagttgatgtaggtcacctgatcgctgacatcgtcacagatgacatagtcgcgcttgatctgctcctcggtgagatggggattgttgacgcccacaaagacaatgcccctgtgggaggagggatcgatgacaacgcggaagtagagcttcggcacggggatcaggccattgttgttgtcatccttggccagataaagcggcgtctccacaccgtccttgttgggcagagtggtcacgccgtagacaccggtatagcagttcacgttcagcttgttcttggagacccaggccctcagaccatcctccacacgagcccagtttccggcattgaaggtctgccactgaggagcggcgttaataaacaggaaggttgccctctgctcgggagcgtagtcgaaatcagccttggcacccaggtgaccacgtgccaggtagacattgctgctactatcgaagtacttttccgcatctccgcccagttcattgttgatggtctccagctgggtggcttgggtgtacagtttgtccacgttctttccatcaaagaagccagccgtttggaaggtaattctagccactccggtctcgtagtagttgcttccgggctccaacttgtggcgagtgtatcgggtcacttcctcctcttcgttgaagcaaatctgcatctgctcggcaaacctcgatgaggtgatctcgaaacctacgcggatcacaatgccaccgttgcaggtggctccggacttaacagccttgaatcccggccaggatttacagtacaggtccttgaactcgaagttagatccgcccacgctgaaggtggttccactcacacaactggcggtaagcagattctccgaatgagtgttgaatcctgagggacaccacagctgcaatgagccgcccgactcgaattccatgacaccgacgtcggaaaagggataaaagtcctcggaatcggttttcaggtacactggctcgggactgggcaatcctccgcgaatagtaacactgcaggctgaaaaaacatattagttgccaaatttatttaaattttacaactgaaataatttacttggttggaagaaaggactcgcagtcaatagaaattatttatctatctattttgggctctttaaattaatctttagaatcctaatatttatattttctatcttttatagttcccgagatctctaagttaataaagtaagtacacgtaactatctatcctgatcaagactatatatatataaaatcattttaactaggggttaaatatacatatatacacaaattcaaaaattgtacgaacttgaaaataatgcatttcagtagtattatatgatgcaattaaattaaatcgacctacctcctgcacgacccacgggctgaggtggcgccacagcaatccgttcgaagatcccgtcatcctcgaccactggaggaagctccacctccggacagggaactcgagcccaggcagccggagccgccagcaggccaactaccagcaatgagaatcggatgcacttcattttagatttaacaaacaaacggcctttgaggcatctttaaatagcccacgaccatatcgcgcaaattaatgaaaaatagttaatgaaacgaatctcgccattctgaccattatctctgcaaaacaatgaaatattggtcttatctattcacgtgaagtgtcgaagtgtgcggatttttacggtcctacgtagacccattcattcgagcttaattggtttgagacacttagtgcttttttggacaagtgggaaagttatgggaattacccaaacaatgcagataatttgtagctacaaaaatagaacgtgttttttaggcgtttagaacttaaagtatatctttggcgtacttctggtattacatttcatatcttatccaaagatttgtagtgcgtatttttatgacttacacaaggtacaatcgcttaattacttctgaaacatatttgctttcaagaatgtgtaggtattaagatttccgatacatatttttttattttaccatgtatttttattcaaatatgatacacattatatgtaatacagttcatttccaatctagttattacatttccacaaatcaacagtcatttatgattggccatctaaactagcagttgatgagctacgcagaccttcggacgcctaattaagttatttaatcagcagtcaaggcgagtgctttccctcaggttctcgtttcacttagcaataatttataatcaacaagtaattaatgcttatggccgcagcaggattcgaattgctggtagcggttggaatttcctaggcctttcaaggatatcgagaaatttgaacgtatgaatagctgggctggtggctggtagactgggcaaaaagcctcaaaagagccaaggaatgtgctcgttaatcattatctggcgccatctagcggctgcttcccgccctctgaggtcatttatctatatcgaatcaattagcgaacaccttgaagccttcgttgctgaatatggtgaaa

SEQ ID NO: 14966 - DNA, 1293 bp, DROSOPHILA
atgaagtgcatccgattctcattgctggtagttggcctgctggcggctccggctgcctgggctcgagttccctgtccggaggtggagcttcctccagtggtcgaggatgacgggatcttcgaacggattgctgtggcgccacctcagcccgtgggtcgtgcaggagcctgcagtgttactattcgcggaggattgcccagtcccgagccagtgtacctgaaaaccgattccgaggacttttatcccttttccgacgtcggtgtcatggaattcgagtcgggcggctcattgcagctgtggtgtccctcaggattcaacactcattcggagaatctgcttaccgccagttgtgtgagtggaaccaccttcagcgtgggcggatctaacttcgagttcaaggacctgtactgtaaatcctggccgggattcaaggctgttaagtccggagccacctgcaacggtggcattgtgatccgcgtaggtttcgagatcacctcatcgaggtttgccgagcagatgcagatttgcttcaacgaagaggaggaagtgacccgatacactcgccacaagttggagcccggaagcaactactacgagaccggagtggctagaattaccttccaaacggctggcttctttgatggaaagaacgtggacaaactgtacacccaagccacccagctggagaccatcaacaatgaactgggcggagatgcggaaaagtacttcgatagtagcagcaatgtctacctggcacgtggtcacctgggtgccaaggctgatttcgactacgctcccgagcagagggcaaccttcctgtttattaacgccgctcctcagtggcagaccttcaatgccggaaactgggctcgtgtggaggatggtctgagggcctgggtctccaagaacaagctgaacgtgaactgctataccggtgtctacggcgtgaccactctgcccaacaaggacggtgtggagacgccgctttatctggccaaggatgacaacaacaatggcctgatccccgtgccgaagctctacttccgcgttgtcatcgatccctcctcccacaggggcattgtctttgtgggcgtcaacaatccccatctcaccgaggagcagatcaagcgcgactatgtcatctgtgacgatgtcagcgatcaggtgacctacatcaactggaagactacagacatcaaggccggttggtcctatgcttgcgaggtggccgatttcctgaagaccgtgaagcacctgcccgctttgaccgccaagggaggtctcctcgtttaa

SEQ ID NO: 14967 - protein, 430 aa, DROSOPHILA
MKCIRFSLLVVGLLAAPAAWARVPCPEVELPPVVEDDGIFERIAVAPPQPVGRAGACSVTIRGGLPSPEPVYLKTDSEDFYPFSDVGVMEFESGGSLQLWCPSGFNTHSENLLTASCVSGTTFSVGGSNFEFKDLYCKSWPGFKAVKSGATCNGGIVIRVGFEITSSRFAEQMQICFNEEEEVTRYTRHKLEPGSNYYETGVARITFQTAGFFDGKNVDKLYTQATQLETINNELGGDAEKYFDSSSNVYLARGHLGAKADFDYAPEQRATFLFINAAPQWQTFNAGNWARVEDGLRAWVSKNKLNVNCYTGVYGVTTLPNKDGVETPLYLAKDDNNNGLIPVPKLYFRVVIDPSSHRGIVFVGVNNPHLTEEQIKRDYVICDDVSDQVTYINWKTTDIKAGWSYACEVADFLKTVKHLPALTAKGGLLV

SEQ ID NO: 14968 - DNA, 18294 bp, DROSOPHILA
tatcgattagtgctgttaacgctacagctacctaacagaattaaagaaatatattaaatttaacaaaaatactgaatacagctagctggtcatactcctgttttacattttatttaatttacgaatacgtttaatttaaattttgttgatatataatttaataaattttttggtctcaaaacgtcttagctaaccccacacaaaaccacttcgagattattctgaggttctacgaaaaaaaacttgttatatatacagagatatatgtattttaaaaccaaataaaaatgaacctgtatataataataccataagatagctacttactctacgagctgtgagccttgagtgccggtgctcatataactttcttaagcttgcttgatataattttcatattgcatatctaaaaaaaaataaaaaaataattataaaatttttgtaaaaagttcagtaaaaacagtttaattcacttattacctggtatttccttctctgcaaatataaacgaattttagatattttcaaatttgtttgagttggtgtgttctgtttattatgaaaacatggatacatttttaacaagtgctcaaaatattattttatttactaaatatatcaatatataaaataaattgtattttctattagaagactagtaataaaaatgacaaagttataataataccattggaaataattaccaaattgcaatttttgaaattgcaaagtgtgactgcacgaatacttgttgaatatcaactgcatgaattaaatttcgctttccgaatcaacgaaacatcaaatttggtcaaacatgagcaaaacatgtcatataatattaacaatatattctttaagaaatttaacaattttaaataaattatgagtgaccctgtgttgtgtaaaatatgtggtatttattcagtatttttgggtttttttttctgtttttcggcagcactgcgcggcggtcacgcctttgtattgtatttatattcattcgttaagcgacggtcgtccaaaaaggcagaaaatgtggaaattcattgatgaacagtggtgaaaagtgcgtgcagtcattcgcttcaatttgtcgtggccgattccttttcgcaaccaatttttcttattttttttcttgtcagtaacaagttgtcggtcaataaaagtgtcagtttattttctgcataataacggttactaaagcctaaattttttgtttgtgacttctttttttttaaacaaatgcgccgacgcgccagaagtttatattctgtttttatgttttccgcttaaaacgaaacgtgactagtttgttttaaattggtgtgcaacgaaaacaagaagaagcggatgaagagggtggagaggagaggaagcagaagaaaaagagcaacagtcaagtgaattagtttttttttcgtccatgccgtcgctgccaacgtcgacgccgttgcgccgccgcatttagtcattgcatcagtgtgtccgagtgtgtgtgtggcagagagagcgagtgggagagcaagggtggagtaaaagtaaatgcgtgcaattagcatttaatgcaatcaccattaaccgcctactattgtaatttatattaccctagtacctgtaatttacacatacacctacacacacacctgctcagctagtggtagtgcaaatatgaagtgcaaaaagcggcggcaacaacaattgtctgttaattgctggatatttcgtaatgcagcaacaataacaacggtagcaaactgtaatgccacagtgaagactcgctaatcgaaactttgtcgggcatattaaccaaattcgttatatgtttgcattgaatttacatttcatatattaacttctaaatctcgttagatttacatgctcgcgtgttcaatagcagggagggcccactgtacttgtagtgaagcgccgttacagccacaaatgcgtgtgagtgtgattatgtatgcatgtgtgtctgcatcaaatcacacacttgcagcgctcatgcacacgcacttgtacttgtgcgtggctcacatttccatagccagccgcttccccctccacgatcagtgttgctcttcacctgcagctttcgcttctgcttcttcttctcccgcacgcatgtgccgttacaaattcgcttggacataaatcatttttcgtgcattagccggcgattgttaatggaaatcgtattagaaaacaacaattacaatgggcccacatctgccgctctcgctctcgatcgcgctcatcattgctctcccgtttcccgttacagagagtgcaatacaagtgcaatattaattaagtaatagaggaaacgtaatatgcgtgtgcaatacaaacaaatgaccatgtaacggccaacagaaatgtatatgcaatacaaacgtacatacatgtgtaaaacaataagcgcaaaacaccgcccatccccgcttgaaaagtaaaaccagcaatctgcgaaaccttcgaccatcattgggttttactgtacttgaaaatggactgtgccacgcgaaaacaacaacaattacgggcacatcatcagcagcaacaaatacaaatacaaacacatggacgaaagcggcagcaattacaaaaacaacgccacaaccaccaccactactaccaaaattcacaacaacaacaaaaacatttcgtgtggcttgttgttggcattttgacaatttttttggctcaggtgagtgagaaaaaaaaatgaaggaaaagaaacaacaacaaaacatagtgataaagataaagcgacaggtaaacccgcaaagttagttacctctatgatttgggggaaattcgttgggaaaattctgaggactcctaatggatggcgcagggttgtcaaaaatattcatattttaactaattacaatgcagatttcatagattggccagcaacacagacaatttgctaattattttgaaatgtttttttctgtttttattgattctttttttttcgaaaattacaagccaactattttccacatttagtggcagaaaatgtcttaactgggtttttgattcgctgagtgcgttttaggaactcgtttggccggttctagttgtgattttggctgggtgttatgttattttaatatgaactcgctcaaccgctcactaaaattgaactaaaattacgataaatccagatttcatataaaatcgaatagtgagatacaaatatttaatgtgttcaatatttcaaaccaggtttacttgttatctgatcaaacttcggtagtcaaactattgattgcatagctcgaaatctttaaaggcaatttagaagcgcaaattagaagtttaggcccaagtcaatttgaaatgacacacacaggtgatgaatccggtgattaaatttgattttgttgggtgatttgtgggcttattcccgtgattattccttgttttattgcctgagtttttttttttacctcgttcacaaaactcgtttcatttcgtttcgttttgcattgttgtcgcattgtttcagcgcaaacgaaagacaataaaaacaaaatcccaaccatcgcaacgcaacaagtaaaaagttaaaaaaaaaaaaaaaatgatgaaaacactaaaaagcgaacgcaagttaaaatcaaggttggttctgatgacgctgtccatcgcaacttcctcactctgaaaaaatttcaatacgcttatcgagcgattccccgagatagcccagcatagtcgtaaactgtttctaagcttgaaataataaaaaataaaaaaaactatagaaatcaaagccttaataaatagatggcaaaacttgtatctttgctgctgcagtttgtgtattctttgtatctcagatgatcacaacaacaataaagttgtccctgatttcgcagtttctttggccacaataacttgaatgcactgccgtcttagttttgttttttttttttctttccacatgcttcatattcataactcacgtgtttctggcactgtgactttggctttcattttatctgggcattgccgcgattgcggatcgcaggtcattacgtgccggcttatcgcccgaacttggaacttggccgaaagtattcgtattactaagcgtcccaaacatacaaatgcgaaaatgtttataaaaaaaataaaaaaaaatgccagcgaagaagagtggcgatgacatcagccaggttttcggtcactcgtttatttactacgggccaaaagagagcggggcgtaaccacaaaatgtgtaaatttgactgatttcgattgaaatcgtttgaatcgaaattcctcatttgatttgtatgctctctgtaattttggatttagttatgctcaaatcgtttgcacttcttttggcttaataaagacaattaatacctatgtatatcctattgttgcctgaagtctgtaaactcaattagaatcgtgcagatggagtacaaagtgccggcaattaagccccccctttttgttttccagataatattggaactgtgtcaagtggtttttggttttgaaggggtggggggtggagtgggcgtggtgatgtgttgagggaaattaagcaaagcaccacgagaacagcgaaattagagtcgaaaaactacacaattgtatgggcatttctttgtttacaattgcgctaggatcgatgtaaaattaacttgcgctcaattaatggaaattgtgttttttttttacacttgttcagttttcctttctagctggattctctcaagatgccactgcttcgtccactttcttgtgggtgcttctttttattaggttttttttttttattctttgttgcctgattgttggcacctccactccgtttgccgttcaccgttcactttattgttttgtgcctattggccattgtttatgtggcagctgcagaggcagcagtagaatcaatttggagtgggccaaacaaagatacttacaactaattggcatgcgggtggagttgggccaagtggagcacacacccattggaatgctggaatttcacgtggcttttgaggagaacagtgaacttttgtagaagaatctgcgaatctgccgctttctcccggcaaagacaggagattgaaaataaaataagacaggaagcgaatttcgcatgcccaagtgacaactcaaacagagaatcggtgaggagaataaacataaatacatacatatactatatatatatatatatatgcatatccatttatggcttgttaatctctatttgcacttgactatagaccccatcaattgaagtgttgttggatcgggagggggagtgttggtgggggggggtggcaatggagggggttggtggagttgacggcttcttaaaatagccacatcacatgcttggggtcccacatcattatttatccactggaggcagctgaactcttagcccgtttggcaatcgaaagcagttgctttttagaaacacactctatactctatactctgcacgctatactctatactctatattttggttatgatcaaaactccagctatagcatgtcatttatctccagtttattgctatctttgccctatccggtttcactttgcgctgggttgactgactgactgacttatataaacctataacaatttgttgctgcatcgctggcgctggttaagtgcccatttatcaatataattattgttttgttaaacacttttctgattcgcgtagtgggactttacatatgtacatacatacatacatacgtgccacatttgcgacgccatgacttctggctaattttttgtgctgattgctgatctccaattattttcgttcgttaatcgctgtaccgaattctctctttctctgtgttctgacaaagcaactactactaattaattgatattaattgcggggccaacacaaaaaactgggccaactcgacccgaacagaaaggccaaaaacaaaatagcaagaaatagcaacaaataaccagctagctggaagaccataataagttaaagttacaggtggattgtgggggggatggaagaggggggtatccacataaaacgacaatttgtttattgaacacaaaaatatgggtacgacaaaaaggtaaaaaataaatgtttaaaaaacggagacacaacgcacgacaaaaattgaagcaaaattcgagagaagcttttggctcacctaactggtttgggtttttgattttgattttgattttggttttgaattggatttgtattttatttttacttttttaccttcgagctctccatctctcttgcgcgcacataaaaataattagcaaacaacctacagcgttttatacttgggagcaaaaggaaaataaataataaaataagacgaaaaatcgcacattcacaagaaaaacaagccttaaattcgatctcacgcattccacgtttgcgatttcaatttgcgttacgtttatttattttttatgccgcccggtttcatttcgatttatgcgatattttcgcactggcttcatattcattcgttcaaatagtttagtggaaaactattacaagcgagcttaatttatttaagcaattatgaggattcaacaaagagccactttgttccactcaaagttcaatggaatattcctgtgggcggcgagactagaacacgctgtctatcgatatttcattacgcactctaaattacatatagtttaatccccaactttcccaaaaaaaatctcagtggcttagcagaaaaaaagtgaaaggcaggtccgaataacaacatgaaacaaaatccaacttaaattgtcaatcaaattggcttaacccaaatgtaagtaagtgtcgattaaagaaacgatcgtgtgtgcaaataaatcgaaataatcgattgcaccaatgcaaagactaatcgatgtacaaaggaagtatttagtcggtgcggtataattttatgcaagccaagcctttatcatttgatttcaaatcgataacatgttacaaaagatatggaccatagttaatctacaattatcgatggtttgcagtaataaaatatttgtttttcgatgagaaacctatgttcaaatgcagcactctaccaagtaattaaacttattattgaatttacatttaaaatataatttttgcttgttttctacacaccttacatacattagctaaatcgtttcagtttatatggatgacgattaatctttggcttccgtcccatcactgtcataatcatgcccatcatcctaattatgaccattagtatgatcatttaggcttaaaggtcatattcatttgccgaattgaaggacaaaaagtggttggggggggggggggcgtgatcagaggtgtcgctgataaaaggggggccattaatgtgaaaaatgggcggctgatcgcttttgactcgatttgcctaaaaaccactttaacttccgttttcacatgcaatttgccattgttattgctcttttttttttttttttagtttgcaattgcatgtgacatgcaatagcagccccagccccactgctgaaatcgaattaagaaatcatattcaaattgcatatgcacttcgagcgtaggaaaatctgtttttcctaccattcagctctgctgccttttcaaattttcaatccattttccggactacgaatgttttccagcatgatcggaatctacaactccctacacattattttttttttatacattttttttatatttttttttattattatctcctactttttcgggtagccccagaaattcgatatctcgtatccgttgcgctgctgacgtcagcatttgcctaatgtccgaataacgttgcaaacgtgatcagcgtcattatcattcatatatgtggatatgccatactatatatcagccgtcagatgatcggaccatcggaaattaacaagttgcgggcagagacaaaaaacaataaaaaaaaaaaaaacaaacaataagcaacaaatagatcgccagcggctaatttgatttttgcattatatattttttatggcgaaactgcactttatgtggctaataattgctaattatcagccaccatagatattaattgcgcacttatagcatctgaattgtggcaatctatataagaacgctcctcggaataaattttgcataaagactaaccccacccactcacaagtggatctaaacaattatccactgaaataggattgcgaaacgatacgataacggaatgcgtaatccaacactggacattcccgaaggcaccaagaaatcgatcagattcgcagttttttctaaatactttcgatgggccagacaggaaatgcgatcaaagtgctacggtttacgccaaagaaatgccaatccccgaagtatcgtaaacagatatttatgtatagaatttgccttttgcatacgcatacctaagggtaatccgaactgtacgcaaaagggtatagaaatgcgaggagatgacgatgtgtgtgtgtgtgtgtgtgtttttcctgctgcatttcgctggaaacaacaatgcacggaacggtggaaaaacccatcatcacagttgatggccactctgggattacggaggccgctcattgatgataactggatgtcggggccgggcacacatggtgatccatggtgttgtgggttcgtggactagctggctagccttatgcaatgccaatttcaataggtgcacaacacaccacgagatgatgcactcactcaatggcatcgaaacggaaccctcgtgaatcactttcgttggcattgtgcaaagtgatacactcatgattaggcagatgaactggtagattcacgctcttatcgctcaatacgtttgccaatatgccgagtgcgttatctagctgattaatgcgaaattgtaccgatgttagcatgtaggtcaatttggaggttgggcactggggatgtaaggactggacagagtgactgaacggcgcgattaatatacccttgtggatttacgggcagactcgttagcatgcctcaattcactgcagctgtaattgcactcgcccaaaaaatgtgagttgtgccaatgtgaataggacttggtctagaaccacattggcttattcatcggcagtgatttgtgatttgtttcatttcagtattgagatttacgttgactgtgtgtcaagcaaaaaaccttggttgggcgtaatggttgcggttagcacttgatttatttgttcagttctaattaaagtgtttttaagattatttatagacgctattaaccgcaactggaacggtttttttttttttgttacttggtcttttatggcttgtatttgtatgtgattcgcacctaattaatatatatatatatatatggggataggagaagtttggagtttatgttgacgcttcatagtggttgataaattgttatttactcgtcgttctttttgtttttttttttagcacgcaaatgccgctgatctagtgataaatgtaccaaatgcgagcagcaacgccaacgccttctacagaatcgactacagtccgccctttggcttcccggagccgaacaccacgattccggccagtgatattggcaaggacatcaagttctcgagggctctgccgggcacggagtacaacttttggctgtactacacaaactccacgcatcgggagcagcttacgtggacggtgaacataacgacaggtgggtcatttagtgctggattctatgctaactaactaatggataatgtttcgctttgggtatagctcccgatccgccggccaatcttagtgtgcagctgcggtccagcaagagtgcgtttataacgtggcgaccgcctggatcgggtcgctactcgggatttcggatccgtgtgctgggcctcacggatctgccatttgagcgcagctactcgctggaaggcaacgaaacgttgcagttatcggccaaggaactgacacccgggggcagctaccaggttcaggcgtactctgtctaccagggcaaggaatcggtggcctacacaagtcgcaactttaccacaagtaagtcgggacagaggacaggaacgcgtagtccgcaccgcaggtgcaacttctagtgcatcagcaaatacgcatatccggttaatcgtgtatacctacaataactgcaagccgtaatccggtgatgggccaatgactaactaacatatgtttaattccacttgtctcaccttgatccataatactgctctcaaggcgccgggaatctgaaagtctgagcagcagcccgaaggtaaccctctttacacacccaactaaatccttaatttcccaagcgttttactagtttgttatttcgttaataaacggttgacatgccagttgattagtatttcattcgaagcgcttttaagcagtggcgcccaattcgatgtgaaaattgtaatgattggatagatcagatagattagtagattgttcctcgccattggttcaggatttggggaccactgtgtcgggcgtattgcgtctttatttctcccaatgtttaatcgtcgaaattctaaatgtttgtatttgttgtattattatttatttcaaatatgtacatatcctttgcatagtatatcgttcctttgaaatcatttagagtacaattaacaaatttaacttttcattttacttttttttttgtttttttttttttggtttgccttaaatgtattgtagactaaccaaaacacacaccaattaattgactcaccttagctgttagtttagttacccatttacccaagactcattgcatctcgaaatccctctttgcccgctgcatcttccctaaccgcgcagagcccaacacgcccgggaagttcattgtgtggttccggaatgagacgaccctcctggtgctgtggcagccaccgtttccggctggaatctatacccactacagggtatccataacgccggacgacgccatccagagtgtactgtatgtggaacgggagggtgaaccgccgggaccggcacaggcggcattcaaaggtctcgttcccggcagagagtacaatatctcggtgcagacggtttccgaggatgaaacgtcgtcggtcccaacgacagccagatatttaaccgtaccggagcgcgtgctaaatgtcaccttcgacgaggcctataccacatcgagttcctttcgcgtaagatgggagccgccgcgaacctacagcgaattcgatgcctaccaggtgatgctctccacgtcgcgtaggatatttaatgtgccacgcgcagcgaatggcgattcggtgtatttcgactatccggatattttggagccaggtcgcacgtacgaagtggtggtcaagacaattgcggacaatgtgaattcgtggccagccagcggagaggtcactctgcgtccacggccagttcgcagtctgggcggattcctcgacgatcgcagcaatgctctgcacatatcgtgggaaccggcggaaacgggacgacaggactcgtatcgaattaggtgagtaatgctgaaaagattggttacactaaataccaaaataacaaataacaaataccttacctacgttagctaccatgagcagacgaatgccagcgaggtgccggcaccgtttccggttgccgctgaatcccaaatcaccacgaatcttacggagtacacactggactcgctgctggcaggacgacgctatctgatcgccgtgcaggccctgtccaagggtgtggcctccaatgccagcgacataacgcgctacacacgtccggcggcgccacttattcaggaattgaggagcatcgatcagggtctcatgctcagctggcgtagtgatgtgaactctcgccaggatcgctatgaggtgcactaccagcgcaatggaacgcgcgaggagcgcacaatggccaccaatgagacaagtctgacgatacactacctgcacccaggatccggttatgaggtgaaggtgcacgccattagccacggagtgcgaagcgaaccgcactcctatttccaagcagtttgtaagtattttactaactgcaactttgttgcagtgctagaatttgattgtacttgacagcgttattgttatatgacgcccattaaatatgaatttaaggtcttctattgagctttatggccgctaattagtggacggtcaaactggttgtggcataaccctttgattttgtgtttcccaagtttaattgccatttagatagctgtttagtttacaatgtatactttaatgtatttgaaaacaccacgtaaccaattaaatatttgctccattccacgacagttcccaaaccgcctcagaatctcaccctgcagacagtgcatacgaatctagtggtgcttcattggcaggcgccggagggcagcgactttagtgaatatgtagtgcgataccgcacggatgcctcgccctggcagcggatatccggattgcacgagaacgaggcgagaatcaaggacatgcattatggcgaacggtatctggtgcaggtgaacaccgtgagctttggcgtcgagagtccccatccgctcgagctgaatgtgacgatgccaccgcaaccggtgtcgaatgtggtgccattggtggattcgcgtaatctcaccctggaatggccgagacccgatggtcatgtggatttctacacactcaagtggtggcccaccgatgaggaggatcgtgtggagttcaagaatgttacgcagttggaggattgtgagttaataccacccgatgcgcacagttctgcatctaatctgattgcatctaaatttttcagtaagctctcccagcgttcggatacccattgaagatttgtcgccaggtcgccagtatcgtttcgaggttcaagccagttccaatggcattcgttcggggactacccatctgtccacccgcaccatgccactgattcaatccgatgtgttcatcgccaatgcggggcacgaacagggtcaggatgagaccattacccttagttacacacccacgccggcggacagtactcgcttcgatatctatcgcttttcgatgggcgatccgacgatcaaggacaaggaaaaactggccaacgatacggaacgcaagctgagcttttcgggactgacgcctggcaagctgtataacgtgaccgtgtggacagtgagtggcggagtggccagtttgccggttcaacggctatatcgcctgcatccgctgcccattagtgatttgaaggccatccaggtggctgctcgtgagataacgctgcattggacagcacctgctggcgaatatactgattttgaactgcagtacctaagtgcagacgaggaggcaccacaactgcttcagaatgtgaccaagaatacagagattacgctgcagggcttgcgtccgtatcacaattacacattcaccgtggtggtgcgatcgggctccatccagggcacagatttcgccgatgtttccgtcagcaccctgatgcgcagcagtgctcccatctcggccagttaccaaacgctgaccgctccgccgggaaaagtcgattacttccagcccagtgatgtgcagcctggtgaggttaccttcgagtggagtctggaacccgccgaacagcatggacccatcgattacttccgcattacatgccaaaatgctgacgatgcagcggatgtatcaagctacgaattcccggtgaatgctacccagggaaagattgatggtttggtacccggcaatcattacatattccgaatacaagccaagtcggctttgggctacggtgccgaacgggagcacatccaaacaatgcccatactagcacctccggttccggagccaagtgtaacaccactggaagtgagcaggaccagtagcaccatcgagattagtttccgtcagggttacttctccaacgctcatggcatggtaagatcctatacgataatcatagccgaggatgtgggcaaaaatgcctccggactggagatgcccagctggcaggatgtgcaggcatataccgtgtggctgccttatcaagccatagagccatacaatccattcctgaccagcaatggcagcagaaagagcagcctggaggcagagcattttacgataggaacggcgaactgcgataaacatcaggcgggctactgcaatggtccgctgcgggctggaaccacctataggattaagattcgtgcctttacggacgaggacaagttcacggacacggtgtacagttcaccgataaccaccgaacgcagtgataccgtcatagtggcggctaccgtttcggctgtgttactggtggcaatggtgcttgtggtggtgtactgtcagcaccgctgccaactgattcgtcgcgcctccaagttggcacgcatgcaggacgagctggccgccctgcccgagggctatatcacgcccaaccgacctgttcatgtgaaagacttctccgagcactacaggatcatgtcggccgattcggactttcgtttcagcgaggagttcgaagagctgaagcatgtgggccgcgatcaggcctgcagctttgccaatctgccctgcaatcggcccaagaaccgatttaccaatatcctgccctacgaccattcccgttttaagctccagccagtggacgacgacgatggttcggattatattaatgcgaactacatgccgggacacaattcgccgcgcgagtttatcgtcacccagggaccgttgcactcgacgcgcgaggaattctggcggatgtgctgggagagcaactccagggcgattgtcatgctgacgcgctgctttgagaagggtcgcgagaaatgcgatcagtactggcccgtggatcgggtggccatgttctacggggacatcaaggtgcagttgattatcgacacgcactaccacgactggagcatatcagagtttatggtctcaagggtgagttatttaccattgctttgcgtgtccatttttttcatcccatttgttttgcagaactgcgaatcgcgtataatgcgtcactttcacttcaccacatggccggactttggggttccagagccgccgcagtcgctggttcgctttgtgcgcgccttccgcgatgtcatcggcacagatatgcgtcccatcatcgtccattgcagcgctggagtgggcagatcgggcacgtttatagccctggatcgcatcctgcagcacattcacaagtcagactacgtggacatttttggcatcgtgtttgccatgcgaaagggtgcgatattaatgatattttcttcttttcaccttgacaattgtccataatgattttggatgatttcagagcgcgtttttatggtgcagacggaacagcagtatgtgtgcatccatcagtgtctgctggcggtgctggagggcaaggagcacctgctggccgattcgctcgagctgcacgccaacgatggctacgaaggtgagttggaggatttgttcttctttggccagactcagattctgttctattctccctcattttatctgatttttctctattttcactcactttgcggatcaagttttataaatattacttgctgattgattaacttaatctgtatctagttgaacacacaatctggataacgggctataataatttgtaatttggtggtgcttcatatttttttttatttaatattgagtttctgtggctgcggttgacctagaggttctacattaatttatctgagattgtaactaaccaaaaatgttcaataatttattttcttctttcttttcacaatcattcacaaacacccatcacacaattaaaacacgattgtaaatcacacaaaaaatcgcctaacctacacattttcatatgcttctactcctgcaaacgaattgaaattgaaaaactcgaatccgatcaaaaacaccgcaaaaaaaaaaaaaacccacaaaaaagtgactaaaatttacttagagcgccagccacaaacgaaaatgggaaccttgcccatacgagcttctctggccatggccgagaaactggacgcggatttaatgaccaacaaggatgaggatgaggatcaggagcagcagcagcagcagcagctgcagctggccacggaagttaagccaaagggtagcaatgacgatgaagaagacgaagaagacgatgacgacgacgacgatgaccagcagccgttgaacaatgaaacgacggccaccttgtcatcggccagctgcagcagcagcacccatgacgtgcatgtggttctccaggaggcgatagaaaaacccaagcaagagcaggaacgaatctgcgccggcacacagtcccatgcagataccgaatctgacaacacagactcagatgacgatgatgaggatggggatgggaaggtggccaaggatggggctgtcgccgatgaggatggctggtggtattgatagaaaagtcaactttttaggtttgtacccacaaataacaaacaacacaaaacaacacagacccaaaactgtatgttccatatccaaaattactgctttaactcgcttttgcccccgactaaaaatcaaaaaacaaaaagaaaaaccgcaaaattctaaccgcactggaaagtgaactaactaacattgacacatcaacacggttatgggttgaaagacaaaaacaaaacaaaacattagatattgcatcgaaaagacaaatttaaaacccccactggcctgttttagtccatgttgtatgttctcgcatcccgaacatcgttggtgtcacagcgcgatttctaaactatccttgcacttttccagatgacgaaggcatagctgagacgggaatctgaggatgcttgctgcgggaacatctacatatgatatatagtacctatagttattttttttttttttacatatactatacgtaaaatctgcctgtgatgtgctggatgtgatttgtctacgaagtggcactcggagttgctgtcaaatgagttgagtttgttgcccatattctgcggaggatcgtcggcagattcatccgtgggataatggatgcgctttttggcctgtgccatgtgtgcgagtacgccgtaccgcctgtttgccatagagctaagctagctagcccgcttatttaatgtaatgccgccaaactctagaccaaaccaacaagagcgtaaacttaagcttcaggtttaacaatctgctacctatttttgtatctgtacctacctgtatccctgtacctactgtataactacctaaacaaaaaaaaaaaaaaaaactatttacatattaccctttgctctgtcgtgttgtgtatagatttgtacatttgttaccacttagtgtgcgcgtcgatcgatattatgaccatactatgtttaccattaccactatgactattactctaaacgattgtgtattattttattatatagtttatatagcctagttacgttttatcgatagactttagaccacgattagtcagcgaaatgttggctctaactgcatgcagctttccatttgccctttccgttggccatcaagtctcgaaataaccaagcgattccatcggatctgtccgaagcagcattagtaccgtaccggtaccgtacagtacagtacagtacagtacactgcagttaaagttattagcatttattttactatattttattttatgatattgtattgtattgtattgtattttttttagatgtgcatctacacaagatcaataaatttatattgagaacatgaacaagttgcgtttattgacatgggcgggttgttgttgtttttggttttttctttcagcggggcgacaacctggcgaatggcgagatttttgattttcggctaccaggcgaacagaatcgatcagcaggtgaagaacgctagggatgggcgattcaaataagtgcccggagctttcgtgactatcgtgcaaagctcgtgacacgaccggcgaaacagcgagattggccatctctaggcgttgatgtttaaattaatcgacggacaccttctagtgtttctgtttgcctggtatttagtgtcggcaaaactggcagttttggccgaaaaaattggttgcgacgttcaaatgtgaagcaaattggtgtttttttcatttcaagtaccaggcgaacagaaatggcagcaggtggatcagcgatcagtttcgttggtcacctaacggttgttttccaaaaggctgacgtcaataaatgctgcagcccaaaagtatgctatgctttt

SEQ ID NO: 14969 - DNA, 6177 bp, DROSOPHILA
cattcgttaagcgacggtcgtccaaaaaggcagaaaatgtggaaattcattgatgaacagtggtgaaaagtgcgtgcagtcattcgcttcaatttgtcgtggccgattccttttcgcaaccaatttttcttattttttttcttgtcagtaacaagttgtcggtcaataaaagtagagtgcaatacaagtgcaatattaattaagtaatagaggaaacgtaatatgcgtgtgcaatacaaacaaatgaccatgtaacggccaacagaaatgtatatgcaatacaaacgtacatacatgtgtaaaacaataagcgcaaaacaccgcccatccccgcttgaaaagtaaaaccagcaatctgcgaaaccttcgaccatcattgggttttactgtacttgaaaatggactgtgccacgcgaaaacaacaacaattacgggcacatcatcagcagcaacaaatacaaatacaaacacatggacgaaagcggcagcaattacaaaaacaacgccacaaccaccaccactactaccaaaattcacaacaacaacaaaaacatttcgtgtggcttgttgttggcattttgacaatttttttggctcagcacgcaaatgccgctgatctagtgataaatgtaccaaatgcgagcagcaacgccaacgccttctacagaatcgactacagtccgccctttggcttcccggagccgaacaccacgattccggccagtgatattggcaaggacatcaagttctcgagggctctgccgggcacggagtacaacttttggctgtactacacaaactccacgcatcgggagcagcttacgtggacggtgaacataacgacagctcccgatccgccggccaatcttagtgtgcagctgcggtccagcaagagtgcgtttataacgtggcgaccgcctggatcgggtcgctactcgggatttcggatccgtgtgctgggcctcacggatctgccatttgagcgcagctactcgctggaaggcaacgaaacgttgcagttatcggccaaggaactgacacccgggggcagctaccaggttcaggcgtactctgtctaccagggcaaggaatcggtggcctacacaagtcgcaactttaccacaaagcccaacacgcccgggaagttcattgtgtggttccggaatgagacgaccctcctggtgctgtggcagccaccgtttccggctggaatctatacccactacagggtatccataacgccggacgacgccatccagagtgtactgtatgtggaacgggagggtgaaccgccgggaccggcacaggcggcattcaaaggtctcgttcccggcagagagtacaatatctcggtgcagacggtttccgaggatgaaacgtcgtcggtcccaacgacagccagatatttaaccgtaccggagcgcgtgctaaatgtcaccttcgacgaggcctataccacatcgagttcctttcgcgtaagatgggagccgccgcgaacctacagcgaattcgatgcctaccaggtgatgctctccacgtcgcgtaggatatttaatgtgccacgcgcagcgaatggcgattcggtgtatttcgactatccggatattttggagccaggtcgcacgtacgaagtggtggtcaagacaattgcggacaatgtgaattcgtggccagccagcggagaggtcactctgcgtccacggccagttcgcagtctgggcggattcctcgacgatcgcagcaatgctctgcacatatcgtgggaaccggcggaaacgggacgacaggactcgtatcgaattagctaccatgagcagacgaatgccagcgaggtgccggcaccgtttccggttgccgctgaatcccaaatcaccacgaatcttacggagtacacactggactcgctgctggcaggacgacgctatctgatcgccgtgcaggccctgtccaagggtgtggcctccaatgccagcgacataacgcgctacacacgtccggcggcgccacttattcaggaattgaggagcatcgatcagggtctcatgctcagctggcgtagtgatgtgaactctcgccaggatcgctatgaggtgcactaccagcgcaatggaacgcgcgaggagcgcacaatggccaccaatgagacaagtctgacgatacactacctgcacccaggatccggttatgaggtgaaggtgcacgccattagccacggagtgcgaagcgaaccgcactcctatttccaagcagtttttcccaaaccgcctcagaatctcaccctgcagacagtgcatacgaatctagtggtgcttcattggcaggcgccggagggcagcgactttagtgaatatgtagtgcgataccgcacggatgcctcgccctggcagcggatatccggattgcacgagaacgaggcgagaatcaaggacatgcattatggcgaacggtatctggtgcaggtgaacaccgtgagctttggcgtcgagagtccccatccgctcgagctgaatgtgacgatgccaccgcaaccggtgtcgaatgtggtgccattggtggattcgcgtaatctcaccctggaatggccgagacccgatggtcatgtggatttctacacactcaagtggtggcccaccgatgaggaggatcgtgtggagttcaagaatgttacgcagttggaggatttaagctctcccagcgttcggatacccattgaagatttgtcgccaggtcgccagtatcgtttcgaggttcaagccagttccaatggcattcgttcggggactacccatctgtccacccgcaccatgccactgattcaatccgatgtgttcatcgccaatgcggggcacgaacagggtcaggatgagaccattacccttagttacacacccacgccggcggacagtactcgcttcgatatctatcgcttttcgatgggcgatccgacgatcaaggacaaggaaaaactggccaacgatacggaacgcaagctgagcttttcgggactgacgcctggcaagctgtataacgtgaccgtgtggacagtgagtggcggagtggccagtttgccggttcaacggctatatcgcctgcatccgctgcccattagtgatttgaaggccatccaggtggctgctcgtgagataacgctgcattggacagcacctgctggcgaatatactgattttgaactgcagtacctaagtgcagacgaggaggcaccacaactgcttcagaatgtgaccaagaatacagagattacgctgcagggcttgcgtccgtatcacaattacacattcaccgtggtggtgcgatcgggctccatccagggcacagatttcgccgatgtttccgtcagcaccctgatgcgcagcagtgctcccatctcggccagttaccaaacgctgaccgctccgccgggaaaagtcgattacttccagcccagtgatgtgcagcctggtgaggttaccttcgagtggagtctggaacccgccgaacagcatggacccatcgattacttccgcattacatgccaaaatgctgacgatgcagcggatgtatcaagctacgaattcccggtgaatgctacccagggaaagattgatggtttggtacccggcaatcattacatattccgaatacaagccaagtcggctttgggctacggtgccgaacgggagcacatccaaacaatgcccatactagcacctccggttccggagccaagtgtaacaccactggaagtgagcaggaccagtagcaccatcgagattagtttccgtcagggttacttctccaacgctcatggcatggtaagatcctatacgataatcatagccgaggatgtgggcaaaaatgcctccggactggagatgcccagctggcaggatgtgcaggcatataccgtgtggctgccttatcaagccatagagccatacaatccattcctgaccagcaatggcagcagaaagagcagcctggaggcagagcattttacgataggaacggcgaactgcgataaacatcaggcgggctactgcaatggtccgctgcgggctggaaccacctataggattaagattcgtgcctttacggacgaggacaagttcacggacacggtgtacagttcaccgataaccaccgaacgcagtgataccgtcatagtggcggctaccgtttcggctgtgttactggtggcaatggtgcttgtggtggtgtactgtcagcaccgctgccaactgattcgtcgcgcctccaagttggcacgcatgcaggacgagctggccgccctgcccgagggctatatcacgcccaaccgacctgttcatgtgaaagacttctccgagcactacaggatcatgtcggccgattcggactttcgtttcagcgaggagttcgaagagctgaagcatgtgggccgcgatcaggcctgcagctttgccaatctgccctgcaatcggcccaagaaccgatttaccaatatcctgccctacgaccattcccgttttaagctccagccagtggacgacgacgatggttcggattatattaatgcgaactacatgccgggacacaattcgccgcgcgagtttatcgtcacccagggaccgttgcactcgacgcgcgaggaattctggcggatgtgctgggagagcaactccagggcgattgtcatgctgacgcgctgctttgagaagggtcgcgagaaatgcgatcagtactggcccgtggatcgggtggccatgttctacggggacatcaaggtgcagttgattatcgacacgcactaccacgactggagcatatcagagtttatggtctcaaggaactgcgaatcgcgtataatgcgtcactttcacttcaccacatggccggactttggggttccagagccgccgcagtcgctggttcgctttgtgcgcgccttccgcgatgtcatcggcacagatatgcgtcccatcatcgtccattgcagcgctggagtgggcagatcgggcacgtttatagccctggatcgcatcctgcagcacattcacaagtcagactacgtggacatttttggcatcgtgtttgccatgcgaaaggagcgcgtttttatggtgcagacggaacagcagtatgtgtgcatccatcagtgtctgctggcggtgctggagggcaaggagcacctgctggccgattcgctcgagctgcacgccaacgatggctacgaagtgactaaaatttacttagagcgccagccacaaacgaaaatgggaaccttgcccatacgagcttctctggccatggccgagaaactggacgcggatttaatgaccaacaaggatgaggatgaggatcaggagcagcagcagcagcagcagctgcagctggccacggaagttaagccaaagggtagcaatgacgatgaagaagacgaagaagacgatgacgacgacgacgatgaccagcagccgttgaacaatgaaacgacggccaccttgtcatcggccagctgcagcagcagcacccatgacgtgcatgtggttctccaggaggcgatagaaaaacccaagcaagagcaggaacgaatctgcgccggcacacagtcccatgcagataccgaatctgacaacacagactcagatgacgatgatgaggatggggatgggaaggtggccaaggatggggctgtcgccgatgaggatggctggtggtattgatagaaaagtcaactttttagatgacgaaggcatagctgagacgggaatctgaggatgcttgctgcgggaacatctacatatgatatatagtacctatagttattttttttttttttacatatactatacgtaaaatctgcctgtgatgtgctggatgtgatttgtctacgaagtggcactcggagttgctgtcaaatgagttgagtttgttgcccatattctgcggaggatcgtcggcagattcatccgtgggataatggatgcgctttttggcctgtgccatgtgtgcgagtacgccgtaccgcctgtttgccatagagctaagctagctagcccgcttatttaatgtaatgccgccaaactctagaccaaaccaacaagagcgtaaacttaagcttcaggtttaacaatctgctacctatttttgtatctgtacctacctgtatccctgtacctactgtataactacctaaac

SEQ ID NO: 14970 - protein, 1767 aa, DROSOPHILA
MDCATRKQQQLRAHHQQQQIQIQTHGRKRQQLQKQRHNHHHYYQNSQQQQKHFVWLVVGILTIFLAQHANAADLVINVPNASSNANAFYRIDYSPPFGFPEPNTTIPASDIGKDIKFSRALPGTEYNFWLYYTNSTHREQLTWTVNITTAPDPPANLSVQLRSSKSAFITWRPPGSGRYSGFRIRVLGLTDLPFERSYSLEGNETLQLSAKELTPGGSYQVQAYSVYQGKESVAYTSRNFTTKPNTPGKFIVWFRNETTLLVLWQPPFPAGIYTHYRVSITPDDAIQSVLYVEREGEPPGPAQAAFKGLVPGREYNISVQTVSEDETSSVPTTARYLTVPERVLNVTFDEAYTTSSSFRVRWEPPRTYSEFDAYQVMLSTSRRIFNVPRAANGDSVYFDYPDILEPGRTYEVVVKTIADNVNSWPASGEVTLRPRPVRSLGGFLDDRSNALHISWEPAETGRQDSYRISYHEQTNASEVPAPFPVAAESQITTNLTEYTLDSLLAGRRYLIAVQALSKGVASNASDITRYTRPAAPLIQELRSIDQGLMLSWRSDVNSRQDRYEVHYQRNGTREERTMATNETSLTIHYLHPGSGYEVKVHAISHGVRSEPHSYFQAVFPKPPQNLTLQTVHTNLVVLHWQAPEGSDFSEYVVRYRTDASPWQRISGLHENEARIKDMHYGERYLVQVNTVSFGVESPHPLELNVTMPPQPVSNVVPLVDSRNLTLEWPRPDGHVDFYTLKWWPTDEEDRVEFKNVTQLEDLSSPSVRIPIEDLSPGRQYRFEVQASSNGIRSGTTHLSTRTMPLIQSDVFIANAGHEQGQDETITLSYTPTPADSTRFDIYRFSMGDPTIKDKEKLANDTERKLSFSGLTPGKLYNVTVWTVSGGVASLPVQRLYRLHPLPISDLKAIQVAAREITLHWTAPAGEYTDFELQYLSADEEAPQLLQNVTKNTEITLQGLRPYHNYTFTVVVRSGSIQGTDFADVSVSTLMRSSAPISASYQTLTAPPGKVDYFQPSDVQPGEVTFEWSLEPAEQHGPIDYFRITCQNADDAADVSSYEFPVNATQGKIDGLVPGNHYIFRIQAKSALGYGAEREHIQTMPILAPPVPEPSVTPLEVSRTSSTIEISFRQGYFSNAHGMVRSYTIIIAEDVGKNASGLEMPSWQDVQAYTVWLPYQAIEPYNPFLTSNGSRKSSLEAEHFTIGTANCDKHQAGYCNGPLRAGTTYRIKIRAFTDEDKFTDTVYSSPITTERSDTVIVAATVSAVLLVAMVLVVVYCQHRCQLIRRASKLARMQDELAALPEGYITPNRPVHVKDFSEHYRIMSADSDFRFSEEFEELKHVGRDQACSFANLPCNRPKNRFTNILPYDHSRFKLQPVDDDDGSDYINANYMPGHNSPREFIVTQGPLHSTREEFWRMCWESNSRAIVMLTRCFEKGREKCDQYWPVDRVAMFYGDIKVQLIIDTHYHDWSISEFMVSRNCESRIMRHFHFTTWPDFGVPEPPQSLVRFVRAFRDVIGTDMRPIIVHCSAGVGRSGTFIALDRILQHIHKSDYVDIFGIVFAMRKERVFMVQTEQQYVCIHQCLLAVLEGKEHLLADSLELHANDGYEVTKIYLERQPQTKMGTLPIRASLAMAEKLDADLMTNKDEDEDQEQQQQQQLQLATEVKPKGSNDDEEDEEDDDDDDDDQQPLNNETTATLSSASCSSSTHDVHVVLQEAIEKPKQEQERICAGTQSHADTESDNTDSDDDDEDGDGKVAKDGAVADEDGWWY

SEQ ID NO: 14971 - DNA, 7706 bp, DROSOPHILA
tagaaatagttttgcagttgctgcaaatagttttgcagacattttttgattgccgcatactttaagccagcgagccagtcagtcaaccagaatggatgcctctagctccacaactgaaatactgaaagatgttaaaagctgagaaatggtttctgtctggatctggtattttttttgcccagatccttggggctcgtttactcctttgctttgatgcggcttcatgatgctgatagtaaaataaatctcttttcatacgaaaaagggtctcatctgtggcttcaatattaattttagtaatttgttgtgaatgccatgcatggttggctggtttttaacagttttacaagccaatctgcctagaggtcttttcaatatacctaaagttaagatatagtaaaataaatgtaccctataccccagtcactttaaagtatttcctcaccagtctgccgtgaatatggatcttaagtaaaagtgctggaaaattcggggaattatcttggctggttccccgaaaagcgtcatcttcggctgttcttattttaatagcccggcgattatagtggattacatgcacatacccttcattatcaacttattttcgtagcagctctgtgccggctgctccgacgtcatctttcccatgagttggcatccgttgcctgtgcatttgccgcattttcaaaaggttaattttccagttatcaaataaaagaccaaggcatgctctcgtactcgaatccatggaaaccgaagagtagcaggcggtggagaagcaggatgcagcagctggctgttggatacacatgcttggcaaatagttttgacagccaccggggaaagtgggcgacgaaaaggggggtgtgctatgtgtgtatgtgtgtagtcgtggccaaagccgttgggatcctcttacgtacgagtattttcgctagaatttttcttgtaataatttttgctttaacctttttggcatgcagagtgaaacgagcgctttgcatttcagcattttgcttggctgcttttggggccaacgtttttattatagcgtattttaattttcattcgcatcaatttgctgaaacactgcattaaactaggaaaattttcttaagcctacgttctcatgaatttaattcttcttctcggttagattgtagatttgcttggcaacatcggatagctgaacatcaatggccttggtatcgtcatatagcgacggagcctcgcctaggatcacaaatgtgcccaccaaggatgcgatcataaagagccagaggaataggcgatccatgaccatggccacaaagccccagtcctgatcttcctgtaagaggaaaatggtttcagtaaattatgcacatttagtgctgagcttaacaaattgattcaaatatccatacgaaatccgaaaatataaaaccggtaaaacttcagtaaattatatgcatttgatgctgagctaataaaagttattaaaatattcatacgaaatccgaatcgaaaataaatcaagagaagcacattgttagtagatataatagtatatacaaaatgaatttatatcaattatgcacactttatataaagttgaactattaaaaatgattgcaatgaaatttgctgaataatgtgttcaacaagagaacaaaaatcaggcttcttttcatatgaaaatttgctttctttttttttggctgccattcaatttgaagttgcccgcatgcaggacggttaattgcgctttaagcccacactttgagcgattggctttcattaagcacttcgcttaatctacttatgcccgacatcagttcggttatcaatcaaagagcgaaatcgcagcgccagcaaagcaaagcccgaaaaaaataaatggctcaaaagggccaaaagcaaagaacaaacggggctgtggggaaaactcatggcaaccagacaccgccgcacacaatcgcacaacaaagaacattcggggtttgattgaaacgttttgctgaacccaacccgcgctgatgaagagatgaagtgcctcgattggccaattgccagtcaattgaacaaaagcaattaaaagtggatttgccgggtcgagtctttaagtgcaaatatggcaaaagcttaaataagtcggcaaataaaaaaaaaaaaaccaactgccttccaggcgatcagacagtgggtggccagtccccagtccgtatgaccagttcggctgaacgaaagcctccggataggaggacaacatcatcggccaatgcgatttttgcggttcttcttctccggctacgcccgtggacaaacggaatttccaattaaaaattcaatcagctgccggactcaccgcattgaactcgtcctgccgctgcatgtggtgctgtatgaacatgacgttgtggatggccttttccagctcgaaaggatactttttgcgtgcggccacatcgctcaaagagtcgtccaatccggatagcaccgatggcagtccgttgtagccgctcagggtgctcagtccgccgcccaaagcccccaccaagccgctgaatctgtaagttcgagatgagaggtcaacacagtgtccttgtgccaggatatgcacagatgcgggtctgagaagttatacattcgtccatcacaaaatacaactgttactttttttcggaccgtattttgggaagtattaaattgtatgtacaagattttcgtaaataaatgcttttcatgtttttgatacccaagttggtttatttacccccaaaactcgttagcataactcacctgtttgtggccgtggtcacgtgcatgccattgcacccaccagcacccacacgaccttgcatccgccgcagggagtctggactggagccgcccgagttcatttgcatctcgtccatcagcgcctgtccgaacttggtcttgctgaacttgaggccgtagttgatcttgttggccgccaggtcacgcagcaggtccttgggcacacgcatcagcaggagtttcggcaatctcttgatgaagaaggacctaatccagggtcgcatcttgtgcgtactcggcttccggtagtgtatgtttagtatgataatcgtgatgacaacactcaggccaaccagcaacatggtgaacagtagatattttcccagtagcggcaatgccagtgaagtcgatggtataatctccgatatgagcaggaagaacatggtttgcgacagcaggatgctgatgcacagagcaatcttctcgccagaatcggcgggcaggtaaaagaccagcaccgaaagatacgagatgcccacacatggaataatcaggttaaccgtgtagaagagagtctttcgcctcagggtgatgttgaagaagatatctaaaccgtccagccattgaagcagttacaaatccacgaagacgcgcaggaagtgggatacaaatgtgttgggaaaaggggagaaagggatcattttcgggggatgagtttgggtagagctttcgcgtaattgctggcgatgggaagctttaaactccactaaactcacccggatacggttcggcacagcagggatagtacttctcgtgccgctcagccggaacgccgagaatgtcccactccacactgggatagtactcacgcaggtcgatgcctatctccaccttgttgtccttgtcgtttttctggctgatgtgcttcaaatcgatctgtgaatcgagaaaagccccgttgatggagccgttaaagttacgctcctttggctcctttgtccggctcactgccacttgccgtgacaacgccacctggcgcatcccactccctccaatctcctccaaccaggcgaccggcagccaaagtgcagtcgttaaaagagtagcgaaatttaaatgcgttgacaaacgcccggtgaaaaagagctctgttccgtagcctgtcctaaaacccatcgcagcactcaaaaaaaaatctagtgcctttaatgtgtagctctctaatagtttaactaatcttataacattctatacatcttataaattctatgtgcacacttcgtctttaagtagttactaattgcaaatgtgacatactccatctcaatattgatttcatatttttctcagtgcacctgtccctcttcgcagcactgcgaagggtcagcggaaacggaagctgcttgggttgggtggaagtcgcactttggcttaatttatggccgcgcatttttatgacagcgacacacacagtcgagtgcctctgtgtgagttagtgccgctctctttcagcgccagtgtgcgtgcatggctgtgtttgtgtgtgcagcggttagacaagtttcaattacacttttacaatttctcacattttaatctgcgagttgccaacgacgccttttcgatgttcttaccgcgtcttaggcgtgtaagtcgctacctcatctcctcatctcatctctcagataaatggtgtaccataaatcgttcgccacgcccatttatctgaggctcaactggcatggcactggcagcagatagaagacaatgacgccaccactcacctgatcaccgtcgtaggtccacgagccgaacttcatgaagcaggtctgctgatcgaagggaaagtagcgcacatcaatctcacagctggacttgaagatggccggcggagtccagaccactttgccggtatagtggaggatggccttcgtcatggtggtgaccacgtactcgccatcggcactagaggaaagggaagacatagctttgattcagggcttttaagaaatagagatttcagaaacgtaattttaacatgcaatacaaattgggctttaagtgtacatgtgtgtattcgaggtcctgtttcgactacttacttgttgtagagcacgatgtcgggcagccagatgtgctcggatggcacataaagctctgtgacgccgccatactccgagggatcccacttgaatttatgatcctgccattcgtgctccagccacacgttggtggttagaatttgatctttgagattctgcaaaaaattaaactcgcatatatgtacggatagctctacaagccgcaaaaaaaaaaaaaaatgtgtgtgagcaagtggagcggagtgtagtggagttggggcagtaaggcccagcgatgcatcaagtgggatttgcattttattcatttttcccctgcatttttttttgttctttatatcatttgcacttctcgtcctggccacccggtaccccggctaatgtgctttttgctgtcagcttacggcttctttcccttttcggcttgttttattaccttttaagccttctggtggcagggccaaccatcaccactaccaaccgcccaaagtagcggcccttgcagccggaattgcagtctcggccggctgacaaatgacttggccggggaactttaagcaagcgcagacaacgatcccctccatgtaatgaaatgttggagtgaaatgttataaaaatctagtgctccccgttcgcccaaagttttttttttgagaaatgccagcgatttatctggtgttctggtggtgcaaggcaaccagtgctgacaggaataaagttgatgttgcgaattgaaatatgccactttaatatagggtctacacggagagaaatctagctaatatcgcaattaagctaatatcttattctgtacttttaacttacagcactcatccctctttttttttgggggggtgtgtcattatggccccatggatttctctgtttgccagctcgcgattcgccccatttcttgctgtttattgttttgcattttttatttacgagctgctgaaagttgctggcaacttttacgcacttcttattgttttgccagcaaatgtagcgaaacgcgggcgcttgagcttaattaaaaacatccccccacccgccaaacttcgatgattataccaattaattttgcttaccaaatcgatgagttgggagagccgtaggcccaatttgaccaacaccgtgtccgtattattgctcacagggcggatgaggcgattgtagttgcttagcagatcgtcatagagtcgcttggcatcgggattcgcctgaacggtttcgcagaggagcaggagcaccaggagcaggcagagtggcttgcagtggcgccagatgtgagcgagcagggcgatggggcggggtcgtgtggtgcagcagccaggagccatggtgacgacgtcacgacggaaagaaaaaaaggaccttgacgctgtgcggcgtgggcggtgtgccggtgttttattgatgcacaaaacacgcgcacaggtttttgtttacctttctgcccgccttgggtgcttggctgccccttgatgctcaatctctgacgcagttcgtggggcagagcgagtaactggcttttagcacatggcctaaaagtgtttacaagtctccaagtctcgctgctgctaactgattcccgattcggcgcactgcttgagcagctgaagtcgctgcgtccaggcagctgattttgtttttgctccggccgccttattttatttaaaaagtctttttaattttcaccaactcaatttcgtgcttaaaaaattctaaaaaatattcaaacttgttaactgatttttcaatatttttgtgtgcagttttaagcggactttcacttgatttcaacaagcctttgggccccgctccgtgctgtcctgcatagatattcacaggattcgtactgacgcgcgttttgtttttgtagcctggccaggacctctggcagcctccgttttgtagctttgtcgccggcgggatatcataggaatgtggcatgtggcagatgctgcgcagcgcctgcgcttttagcattcaccctgttatcctgcgagagccgcatcctgttacacactgtaaaaccaagccctagacggatgctctctttgccacacactctccgcatgatgctcgccggactctctgaagatgtgctcttcgatgggttaatccaacaaagactcagactccattacaactccggcctggttcggtgctcttttggccgtacatattttttgggctctctcccgcgattccggcgagccacagcccaaaaaaattccccacaaatactcccagcacacagttacgcagaaaaaaaagtataaattcgagaaaaaagtatgaggcaaggcaaggaaaacttcaaccatgtaccacaccgctccacatttggcaaatactcatacgccccgttggacccacatttcgtttaaccagaaaccaaatttttcgtaattgtcaacattcgttaaaatctacgttaacatgcagttcgccacacacacacacacacatgtacatgcacatgcacacttatacattgagaaacacacacacacagctatcagcacttgtgcactttgcatgtttagcgctgcaatgctggctacactttttgccttttgcatgggtgttggttcagctcggttttgcatttcgtttcgtttggcattttgcaacgtctgttcacatatgtgtcatattgcgattttgagttgtttctgtggttttggtttggtttttgccacccatacttgtatttctatctgccgccagctgaattcccaccctcctgcaggtcctgtgatgcctgtaatgcgtttgccgtgttgaaagccagccgagccatttcatcgcataacgcagctagcagagagcctgactacc

SEQ ID NO: 14972 - DNA, 2385 bp, DROSOPHILA
tgaatatctatgcaggacagcacggagcggggcccaaaggcttgttgaaatcaagtgaaagtccgcttaaaactgcacacaaaaatattgaaaaatcagttaacaagtttgaatattttttagaattttttaagcacgaaattgagttggtgaaaattaaaaagactttttaaataaaataaggcggccggagcaaaaacaaaatcagctgcctggacgcagcgacttcagctgctcaagcagtgcgccgaatcgggaatcagttagcagcagcgagacttggagacttgtaaacacttttaggccatgtgctaaaagccagttactcgctctgccccacgaactgcgtcagagattgagcatcaaggggcagccaagcacccaaggcgggcagaaaggtaaacaaaaacctgtgcgcgtgttttgtgcatcaataaaacaccggcacaccgcccacgccgcacagcgtcaaggtcctttttttctttccgtcgtgacgtcgtcaccatggctcctggctgctgcaccacacgaccccgccccatcgccctgctcgctcacatctggcgccactgcaagccactctgcctgctcctggtgctcctgctcctctgcgaaaccgttcaggcgaatcccgatgccaagcgactctatgacgatctgctaagcaactacaatcgcctcatccgccctgtgagcaataatacggacacggtgttggtcaaattgggcctacggctctcccaactcatcgatttgaatctcaaagatcaaattctaaccaccaacgtgtggctggagcacgaatggcaggatcataaattcaagtgggatccctcggagtatggcggcgtcacagagctttatgtgccatccgagcacatctggctgcccgacatcgtgctctacaacaatgccgatggcgagtacgtggtcaccaccatgacgaaggccatcctccactataccggcaaagtggtctggactccgccggccatcttcaagtccagctgtgagattgatgtgcgctactttcccttcgatcagcagacctgcttcatgaagttcggctcgtggacctacgacggtgatcaggtgagtggtggcatcgatttgaagcacatcagccagaaaaacgacaaggacaacaaggtggagataggcatcgacctgcgtgagtactatcccagtgtggagtgggacattctcggcgttccggctgagcggcacgagaagtactatccctgctgtgccgaaccgtatccggatatcttcttcaacatcaccctgaggcgaaagactctcttctacacggttaacctgattattccatgtgtgggcatctcgtatctttcggtgctggtcttttacctgcccgccgattctggcgagaagattgctctgtgcatcagcatcctgctgtcgcaaaccatgttcttcctgctcatatcggagattataccatcgacttcactggcattgccgctactgggaaaatatctactgttcaccatgttgctggttggcctgagtgttgtcatcacgattatcatactaaacatacactaccggaagccgagtacgcacaagatgcgaccctggattaggtccttcttcatcaagagattgccgaaactcctgctgatgcgtgtgcccaaggacctgctgcgtgacctggcggccaacaagatcaactacggcctcaagttcagcaagaccaagttcggacaggcgctgatggacgagatgcaaatgaactcgggcggctccagtccagactccctgcggcggatgcaaggtcgtgtgggtgctggtgggtgcaatggcatgcacgtgaccacggccacaaacagattcagcggcttggtgggggctttgggcggcggactgagcaccctgagcggctacaacggactgccatcggtgctatccggattggacgactctttgagcgatgtggccgcacgcaaaaagtatcctttcgagctggaaaaggccatccacaacgtcatgttcatacagcaccacatgcagcggcaggacgagttcaatgcggaagatcaggactggggctttgtggccatggtcatggatcgcctattcctctggctctttatgatcgcatccttggtgggcacatttgtgatcctaggcgaggctccgtcgctatatgacgataccaaggccattgatgttcagctatccgatgttgccaagcaaatctacaatctaaccgagaagaagaattaaattcatgagaacgtaggcttaagaaaattttcctagtttaatgcagtgtttcagcaaattgatgcgaatgaaaattaaaatacgctataataaaaacgttggccccaaaagcagccaagcaaaatgctgaaatgc

SEQ ID NO: 14973 - protein, 580 aa, DROSOPHILA
MAPGCCTTRPRPIALLAHIWRHCKPLCLLLVLLLLCETVQANPDAKRLYDDLLSNYNRLIRPVSNNTDTVLVKLGLRLSQLIDLNLKDQILTTNVWLEHEWQDHKFKWDPSEYGGVTELYVPSEHIWLPDIVLYNNADGEYVVTTMTKAILHYTGKVVWTPPAIFKSSCEIDVRYFPFDQQTCFMKFGSWTYDGDQVSGGIDLKHISQKNDKDNKVEIGIDLREYYPSVEWDILGVPAERHEKYYPCCAEPYPDIFFNITLRRKTLFYTVNLIIPCVGISYLSVLVFYLPADSGEKIALCISILLSQTMFFLLISEIIPSTSLALPLLGKYLLFTMLLVGLSVVITIIILNIHYRKPSTHKMRPWIRSFFIKRLPKLLLMRVPKDLLRDLAANKINYGLKFSKTKFGQALMDEMQMNSGGSSPDSLRRMQGRVGAGGCNGMHVTTATNRFSGLVGALGGGLSTLSGYNGLPSVLSGLDDSLSDVAARKKYPFELEKAIHNVMFIQHHMQRQDEFNAEDQDWGFVAMVMDRLFLWLFMIASLVGTFVILGEAPSLYDDTKAIDVQLSDVAKQIYNLTEKKN

SEQ ID NO: 14974 - DNA, 5031 bp, DROSOPHILA
ccagcatctgccagcagaagacgtcgccgcccttgacggccacttctctggaggaagcgccctccatttggaggcgcagtgccttgtcaaaagtgtccgtgcagacgtatccgatggccatgccgtaggatgcggccaccagagacttgggcaccagcgggcggaaggactcgccaatctcgttgctgtagcctgcaaagccgtaacaattaaactcatatatttcgatggatctgggcagattctgcttgggaggaacactcacccatatagcgaatgaaggtgtcccggtagatgtccacctccttcaaagacgtggaagttttcttggtgcccttatcccggcggatgaactgtttgtcctccgacattgtctattttttttatttttattttttatttttggaatggcagaagttctaatgctattttgattttcgagtaattgggtaatatgacaagatgatctgatcttctccaactgacgcaaaatcagctggcaactgagtttcctaaaaattcattgaaatcgcttaaaatatcgctttaaataaaataattaaagcgcctaactgcctataaattggagacttaaaaacaaactgtttatataaatattttaattgcgcgtatcgataatgtattattgttatcgattgtcagagctagtggaaaaaacgctaaaatcagctatttatggcgattaaaatttataggaatttatagcaattatgaaatatcatatattagtttttatattgtattcgttttttaatgagctaagtccatttaatatcgcttgctatacacttaatcatataacatatgagttccgaactcttttaagttaaataaagtaatgtgaacaaattgtcatattgtcacatatgtgaatttattagagctggatttttggctacactttcaaaaaccgcgccaagtaatttcacctttccatgtgtgaccattgcagctgcaccgcaatctaaggcccagcccgcgctgtggtcacactgacaaataaaaaaaaacaagacgtcgtcattcgcgttggaattccaacaaaatagttaagttttccttttgtttaacacctgtcgagttagccagcgagttagtcagtgacgcttgccggaattccaggagcaagtcagccagcataaatgtgagtaatggtcggaactgacccgccatcccctccgcagccgccccgcaaaaagttggctacttgtgtttttgtcaatgccgctgtattcgggcattagtcatgcccagaaattcgattttgctcgcgaactgcgtcaccgaaggacactgagtagcaagatgggagttactactccgccaaggatcaattgggtaaccatcgtcatcggcctggccagcgaaactcacgccgagatgatagattcccaaggggaggggggctattacagcccgaaatatatcaaaattctatggaatcattatgctcgggaagtttggcattacaatatgagttatagaatcgttttggatagtgagtgtaaagcaatcaaaggatataaacaaagctgggatcagatccagttgattttgcataaatcgatattgtaactatatttttagaacctgtttaataactttattttgaactttattctatacattatgctccatattgcacaaatcgatttgcccacatatttgtggcatctttagttctctgtgtagtaaagttgtaggctttaaaatatgacaacttaactctaagctgagcagaaatgattagaaagcggaaattaagatgataaaatccataagtagtccacgttaagccttggtggatagttcctcccatcaaaatgccagttgaaataatgatgtgtgaacgtttgtaacttccagcaccatggcagccggtaccacactacagaaggccatcgatctggtgaccaaggccaccgaggaggatcgaaataagaactacgcggaggcactgcgtctgtatgagcacggggtggagtacttcctgcacaccatcaaatgtaagcagtcccattagtgcatctaaaatgcacttatactcactgaatagaagcaagctgactactaactatcaaattactatctaacgagcagatgaggcacagggcgagaaggccaaggactcgatacgggccaagtgcctgcagtatttggaccgggccgagaagctaaaggagtacctgaagaagggcaaaaagaaaccgatcaaggagggtggtgagtccagcgccaaggacgacaaggacaaaaagagcgacagcgatgacgaggacggcgacgatcccgagaagaagaagctgcagagcaagctggaggacgccattgtcatagagaagccaaaggttcagtggtccgatgtcgctggcctggatgccgccaaggaggcgctgaaggaggccgttatcctgccgattaaattcccgcagctcttcactggcaagcggattccgtggaagggcatcctgctgttcggcccgcccggtaccggtaaatcctatctggccaaggccgtcgccaccgaggccaatcgctccacattcttctcggtgtccagttcggatctgatgtccaagtggctgggcgagtccgagaagctggtcaagaatctcttcgaactggcccgccagcacaagccctccattatcttcattgacgagatcgattcgatgtgctcggcgagatcggacaacgagaacgacagcgtgcgacgcatcaagaccgagtttctggtgcagatgcagggcgtgggcaatgacaccgatggcattctcgttctcggcgccacaaacataccgtgggtcctcgactcggccattcgccgtcgattcgagaagcgcatctacattccgctgccggaggcgcatgcccgcctcgtcatgttcaagatccatctgggcaacaccacgcacgtgctcaccgagcaggatctcaaggagttggccggcaaaaccgaggggtaaatgcactttataaactatttgcttcactatcacacaaaattgatccattgtttataatgtttatatgtaagcatatttaactaagtgaatgattttccgttttgcagctactctggcgcggatatatcaatcgttgtgcgcgatgcgctgatggaacccgtgaggaaagtgcagaccgccacgcatttcaagcgggtatccggtccgagtcccaccaaccacgaggagattgtcaacgatttgctggttccgtgctcacctggcgaccagggcgccgtcgagatgaactggatggatgtgcccagcgacaagctcttcgaaccgcccgtgaccatggtacggcatccttagctatcaaccttttttcgcagtgccaataatctttcttgaacttctacatccagcgcgacatgctgaagtccttgtcccgcacgaaaccgaccgtcaacgaagacgatctgaagaagctgcgcaaattcacagaggactttgggcaggagggctagacacgaaccccgccagatatcgtcagcaccaccagctaattctaattgttgcctattgcataaattcaaacacgttttacttctggctctccttaaacattttttttattttatatatatatataatgtatacatacgatatatggttaaaatttaattcaaatttgtcgttcgattgcaaccggagatgaaggacatgcagtgagcgtgaagcgggtggatctgtggattgttgtaatcacaaagtcaatgtatttttgtactcttaatgttaagcgacggaagaaacccgatatccagcctgaagtttgaaacctaatgtaatatgagtgtccgccgcgcttgcgcaatatttgccactcggacttgccacggacacctcagatcagagcagcaccaatcagcggaggagctggagctagagctgtagaagcagaaggagaagaaggagcagaagcaggagcagtttgcggagtttaagcgcagtcgagcaaacctatttaacttgtaacgtaccagaaataaaaacgaaaattgtataccatgtatgacgacgtagcgggaatgccaattgccagtggaatcgtcgcggggattccccgccgccgcaagtgaccccatttcaaagtgagccaccaggtgggtgggtggccggtggacggaatggagaaactgagcgccgagagtatcagcggcagaatgcgagagtctcagccgtctggcccacatgccaagtgcgataagatctttccagctcaccagcatatgtgcgcttgttcctggccgatcgaccagatatcgagcatactgcgagctgcgcacagtgggcaatgacctatttgtatggagcaaactaaaagaaacctactgatgccatagttgaaatatttttataacacaaaaattgcatttctctgttgctgctcttcctttgcattggttctttatatatatatatttttttttaaatatttttcccttttccctagttttaagcatttaagtccatcgaaaataaatgctataaaaatgaaaatatctttattttatagcgttgctttaagtagattgatttgtaatatttgagacattttgaatgtagttttttagtatgaattattatgttatttcctattgtaagctttttgcccatcagctccactgtgcgctgccgaatgctgccgagcagtgattgtgctcttcggctcttcgacttcgccttcggatcgctgggttttcgcgttcggttcgtgagttttgagccgtgctttgagccagagtttcagttgatcttcggccgcaaaggctagaggtttgaatattgtgggatcggtccgctataggtttttcgctatatttcgcccgcacatcggcagttccgttacgtgagtgcagcgccgtcgtctgcgctgcatgaggccaaagatacaagccgaaaagatacagatacacggcgacaacgtttctcggttggttttgcgcaactttgtgaaaagcgtgatagagcccagatacgaaaaaaaagtgcgtatttgttg

SEQ ID NO: 14975 - DNA, 2036 bp, DROSOPHILA
cgctgtggtcacactgacaaataaaaaaaaacaagacgtcgtcattcgcgttggaattccaacaaaatagttaagttttccttttgtttaacacctgtcgagttagccagcgagttagtcagtgacgcttgccggaattccaggagcaagtcagccagcataaatcaccatggcagccggtaccacactacagaaggccatcgatctggtgaccaaggccaccgaggaggatcgaaataagaactacgcggaggcactgcgtctgtatgagcacggggtggagtacttcctgcacaccatcaaatatgaggcacagggcgagaaggccaaggactcgatacgggccaagtgcctgcagtatttggaccgggccgagaagctaaaggagtacctgaagaagggcaaaaagaaaccgatcaaggagggtggtgagtccagcgccaaggacgacaaggacaaaaagagcgacagcgatgacgaggacggcgacgatcccgagaagaagaagctgcagagcaagctggaggacgccattgtcatagagaagccaaaggttcagtggtccgatgtcgctggcctggatgccgccaaggaggcgctgaaggaggccgttatcctgccgattaaattcccgcagctcttcactggcaagcggattccgtggaagggcatcctgctgttcggcccgcccggtaccggtaaatcctatctggccaaggccgtcgccaccgaggccaatcgctccacattcttctcggtgtccagttcggatctgatgtccaagtggctgggcgagtccgagaagctggtcaagaatctcttcgaactggcccgccagcacaagccctccattatcttcattgacgagatcgattcgatgtgctcggcgagatcggacaacgagaacgacagcgtgcgacgcatcaagaccgagtttctggtgcagatgcagggcgtgggcaatgacaccgatggcattctcgttctcggcgccacaaacataccgtgggtcctcgactcggccattcgccgtcgattcgagaagcgcatctacattccgctgccggaggcgcatgcccgcctcgtcatgttcaagatccatctgggcaacaccacgcacgtgctcaccgagcaggatctcaaggagttggccggcaaaaccgagggctactctggcgcggatatatcaatcgttgtgcgcgatgcgctgatggaacccgtgaggaaagtgcagaccgccacgcatttcaagcgggtatccggtccgagtcccaccaaccacgaggagattgtcaacgatttgctggttccgtgctcacctggcgaccagggcgccgtcgagatgaactggatggatgtgcccagcgacaagctcttcgaaccgcccgtgaccatgcgcgacatgctgaagtccttgtcccgcacgaaaccgaccgtcaacgaagacgatctgaagaagctgcgcaaattcacagaggactttgggcaggagggctagacacgaaccccgccagatatcgtcagcaccaccagctaattctaattgttgcctattgcataaattcaaacacgttttacttctggctctccttaaacattttttttattttatatatatatataatgtatacatacgatatatggttaaaatttaattcaaatttgtcgttcgattgcaaccggagatgaaggacatgcagtgagcgtgaagcgggtggatctgtggattgttgtaatcacaaagtcaatgtatttttgtactcttaatgttaagcgacggaagaaacccgatatccagcctgaagtttgaaacctaatgtaatatgagtgtccgccgcgcttgcgcaatatttgccactcggacttgccacggacacctcagatcagagcagcaccaatcagcggaggagctggagctagagctgtagaagcagaaggagaagaaggagcagaagcaggagcagtttgcggagtttaagcgcagtcgagcaaacctatttaacttgtaacgtaccagaaataaaaacgaaaattgt

SEQ ID NO: 14976 - protein, 442 aa, DROSOPHILA
MAAGTTLQKAIDLVTKATEEDRNKNYAEALRLYEHGVEYFLHTIKYEAQGEKAKDSIRAKCLQYLDRAEKLKEYLKKGKKKPIKEGGESSAKDDKDKKSDSDDEDGDDPEKKKLQSKLEDAIVIEKPKVQWSDVAGLDAAKEALKEAVILPIKFPQLFTGKRIPWKGILLFGPPGTGKSYLAKAVATEANRSTFFSVSSSDLMSKWLGESEKLVKNLFELARQHKPSIIFIDEIDSMCSARSDNENDSVRRIKTEFLVQMQGVGNDTDGILVLGATNIPWVLDSAIRRRFEKRIYIPLPEAHARLVMFKIHLGNTTHVLTEQDLKELAGKTEGYSGADISIVVRDALMEPVRKVQTATHFKRVSGPSPTNHEEIVNDLLVPCSPGDQGAVEMNWMDVPSDKLFEPPVTMRDMLKSLSRTKPTVNEDDLKKLRKFTEDFGQEG

SEQ ID NO: 14977 - DNA, 5157 bp, DROSOPHILA
cacacaaccacgacatgtcctacatggatacactaaattttgtttggggtgctatgtgccagcagggtttctacgtagaggtgcggaaccgatcggcgagaatcattgtcttcaccacatttgttgcagctctcttcttgttcacctcgttttcggccaatattgtggccctgctgcaaagtccgtcggatgctatccagtcattgtctgatctgggacaatcgcctctagaaatcggagttcaggacacgcaatataataaaatatacttcaccgagtccacagatcccgtaacgaagaatctttaccacaaaaagatcgcgtccaaaggtgaaaatatctatatgcgccccttgctaggaatggagaaaatgcgaaccggcttatttgcataccaggttgaactccaggctggttaccaaatcgtcagcgacaccttcagcgagccggaaaagtgcggattaatggaactggagccttttcagctgcccatgctagctattccaacaaggaaaaactttccttacaaggagctcattcgaaggcagtaagaatattttatatataaacatagtttcgctttccaattgcattttacatttaaataaaataggtaatttattaaattttatactaaaaatccaatagtaatttaaacgtgtaactaatcaaaatatgcctaattaaaaattttacagggataaaaacccttttataatttacaattcaataacttgttcgaaaagaggaaatcataaaacactttgttttaacccacagactacgctggcagcgagaagtaagcttggtgaatcgcgaggagcgaaagtggattcctcagaagcccaaatgcgagggcggagttggcggatttgtctccattggcattacagaatgccggtatgctttggggatctttgggtgtggagctgctgtcagttttgtcctgtttcttttcgagtttatcttcagacacttcaaacaagtttatcgcataattaaaggctatagagaagtgcagcgctaggctccacgcgtttaatccaaacacacttaaaacttagatgggtatggatagctcccggacaacagcacgcagcacctcaggtgtcttgaactgccagttctggatgttcttgctgacccgacaccaggactcgccgtgcgtgggctctgcagaaatgcaccgatcgaggacctcctgctgctgcgcctccgtgccgtggagtaattcgaacttgtagaaatatgcccaagcatcacctagatctggatcgatcttgacctgaaataaacaaatgattagctctgaacatgtttgtttctattacatttaataggtagtataaattacttacagttcgattaaaccagtctcggcacttagagaacttgtgctcagaccagaacagttttgatacagctagcagcacatgtggatcgtgctcgcatttcttgagagcatccactgacttggtctttcgctgcggcttggtttccatgaagatagcctccgcccatagctcaccagcgttgggacattcctgcagtgctcttgccatcattgtgctggcaatctccttgaggcccgcacgcagctccaccctgatggcctccagccagagcacagccactttggggttgcgtaaacgtcctcgttccagaatggatcgagccttcgtcagcactcctttgcgctcttctagattggcggaaagaatccaaagtgggatggacgtaggacactttttcaagcccagagtataggtggcagccgcatcatctgtccgtctctgctgctcctcaatctgacccttcatcatccacagtttggggaaatctgggaacacttccaccgcctcctccagcaaccgcagagcttcgtcgaacttttccaaagcccattccaggcgagctgatttcatcatcacccttggtgtcggtgccgatcctctagccttggctaacaagcgtctcgcccgctcatattccgagttctctgattccaacttaacggcagccaaccaaatgtcctcggaattgggattggcctggaaagccaaggacaaaatgcctctcgcggctggaacgtctccagccatccatttggatttggcccccatcagccagagaatctccgatttaggacaatgagccacggctcgctgcaacagggcctccaaagattcgcgggtgccatggttcttttcaaagtaggcggctcgcaaccagatgcttttcttcgagggaaatatttggagggcatgagcgtaaacagctcgagcacactcaaatgcattttcctttgcgcactgaaagagggaaaatataatacggttattttgttccaaaaatgttacaaatttgaaaaatgagtgtttcttaatacttacgaattcagcatcatcaatccaagtctgcttgcgatcctcctcctccactcctattccaatgacagccttaacaatggattggcaacagttgactgctcctgatttttccgcctcgatggcctcctggaaccactgatcacggttgatctccactccgttgacggtaagcgaggtcaatgatcgatcaatgatcttttccaccatgtgaatattaccattggcctcctccaacttagcagctgtggtccaaatctggcgatcagtgggaatattctcgcgagccttgtttagaacctttcgggcgttctcgtaggtttccaagcgggcgagagccaaccaaagttcaacgctggtgttgcagcactccacggcgcgagagagtagaatccgtgcatcatcaggattctcgagttccacagccgccttccacagacgaactgaatttggaatatgctctagagcttttctgaaaactctacgcttagctttggtctccgattccagatctgcggctttaatccagatcctgaccgaggtaggaatatgacgagccgcttgcgcgatcaccgctttggctgtatctggcggctgaaggcgagctgcttccagccagagatcctcagactggatgttcatttcgcagccccgcattatcagattcctcgccatctgaaccttgccagtcacttcttccaaacgggcggaggcaatccaagctggtggatggttaggattcgtttccctcacactcttgagcaacaaacgagccttcttgatgtcgtttatgtcaccaccataagtgggaatcatactctgcaggtcggtgagatagcccttgggatccaccaccgtttggcctgtcacggaatcggaaacctgcgaaagcttgacgttcataagagtgttacgagcctggccaatctttcgcagatcaagatcacccgtaggtgtcagcatgcctggagtagctacgccaggcaccatagaagccaagcccgaggacggatccaacgtagaggacgactcgccgccaagatttctggatatcaagctgtccggcagaggggtaaacttttcggcccttggatttcgttgctttctgtttcgactgtcgcccacttcaggaatcgtggaccactcctccgatgtgacactggccagtgagcgtttcaggtcactgaactgctgctggatcttcggtcgctcctggcggtaccgctccaaatcctcacgcagccggcgatcacgatactctttgcgcttttcgtccattcgcttgtctatcgaatcgtagatagcgtccgcctcctcgtcatccttgtcgtacggatccttggagaacagggagccgctgtaaccactaaactcgtcatagtttgagtcgttcaagtcttcgtcctcctcctcctcttcgtcttttttcttacgtttggtggccggcggagcatggcggtcgtcggatacatcgtttgcatcacgggcaggaccaatatcggaccgagtggtgaatcctgtcgctctaaaatagaaaatataccattagcattaagttttgctttgcgagatgcgcgtttggtagtacttacccacgaccgacgccggcaacatagcccaatggggctgggacgcccaggaaatgctttttgttgcggttggctataaccgccgccgttatgttggacatcgtggcttagttctatattaatattatctactttatttaataaatttcacaaacaattgaaagttttctaatgcgtggtgcgcttcttcttctgaaattagggatgggaaaaatatatcaatttatcgatatattaaaataaatgtaaatatttatatcgtgatagtttttctatgatatatcaaatatcgctctttctgtaaaatattttattggacacatgtggattcataaaaaactgaaaactaagttattattcttaaaggatcactaaattattatatttatgatgaaatatctgatgataaatgataatatattatgaaatgtcaagaataatttgtttgggtactttatcattttgataatttttttaaatgaaaagtgtctgataacgacctgtagtcgcggattataaaagtatttgatatcggaacttagcctaaaaccaactatctttgttaaatatttttaaactgatatcagtgttattttttgttatattatttgttggaaaagtggaaaatggtcttctaccatacagttgtcatctatcgatcaaaagcgttgttcacattgtccatctctagattatcggtgtaaaataatttgcgaatcggaaaaattaattgacgaataaacaaaaacgtagcttaaatttttcattttccctggactttcgttgcaaatagaagcaggatgcccgtgctgccgatgccaccactcatgcaggtaaaaagtaaccaaaaatgcgttatctgaagccatataatcagcaaaaatcgcttattactccaacaatagaacgccgtggagccgatgcaagtggacatcgcgccgccgaacgaggacaacgaaaacaacgaggagcagcagattgtggtggagaaccccagcatcgatctcgaagtgtacgccaaccaatatgccgggatcgtgcggctccatcgcctaatttatgtggcggacgtctgcccggttttagccgtggaggctctgaaaatggccattacttacgttcaaaccacctacaacgtaaatctctaccaagtgctgcacaagcgcttgagtgatctaaac

SEQ ID NO: 14978 - DNA, 2882 bp, DROSOPHILA
caccacgcattagaaaactttcaattgtttgtgaaatttattaaataaagtagataatattaatatagaactaagccacgatgtccaacataacggcggcggttatagccaaccgcaacaaaaagcatttcctgggcgtcccagccccattgggctatgttgccggcgtcggtcgtggagcgacaggattcaccactcggtccgatattggtcctgcccgtgatgcaaacgatgtatccgacgaccgccatgctccgccggccaccaaacgtaagaaaaaagacgaagaggaggaggaggacgaagacttgaacgactcaaactatgacgagtttagtggttacagcggctccctgttctccaaggatccgtacgacaaggatgacgaggaggcggacgctatctacgattcgatagacaagcgaatggacgaaaagcgcaaagagtatcgtgatcgccggctgcgtgaggatttggagcggtaccgccaggagcgaccgaagatccagcagcagttcagtgacctgaaacgctcactggccagtgtcacatcggaggagtggtccacgattcctgaagtgggcgacagtcgaaacagaaagcaacgaaatccaagggccgaaaagtttacccctctgccggacagcttgatatccagaaatcttggcggcgagtcgtcctctacgttggatccgtcctcgggcttggcttctatggtgcctggcgtagctactccaggcatgctgacacctacgggtgatcttgatctgcgaaagattggccaggctcgtaacactcttatgaacgtcaagctttcgcaggtttccgattccgtgacaggccaaacggtggtggatcccaagggctatctcaccgacctgcagagtatgattcccacttatggtggtgacataaacgacatcaagaaggctcgtttgttgctcaagagtgtgagggaaacgaatcctaaccatccaccagcttggattgcctccgcccgtttggaagaagtgactggcaaggttcagatggcgaggaatctgataatgcggggctgcgaaatgaacatccagtctgaggatctctggctggaagcagctcgccttcagccgccagatacagccaaagcggtgatcgcgcaagcggctcgtcatattcctacctcggtcaggatctggattaaagccgcagatctggaatcggagaccaaagctaagcgtagagttttcagaaaagctctagagcatattccaaattcagttcgtctgtggaaggcggctgtggaactcgagaatcctgatgatgcacggattctactctctcgcgccgtggagtgctgcaacaccagcgttctaaacaaggctcgcgagaatattcccactgatcgccagatttggaccacagctgctaagttggaggaggccaatggtaatattcacatggtggaaaagatcattgatcgatcattgacctcgcttaccgtcaacggagtggagatcaaccgtgatcagtggttccaggaggccatcgaggcggaaaaatcaggagcagtcaactgttgccaatccattgttaaggctgtcattggaataggagtggaggaggaggatcgcaagcagacttggattgatgatgctgaattctgcgcaaaggaaaatgcatttgagtgtgctcgagctgtttacgctcatgccctccaaatatttccctcgaagaaaagcatctggttgcgagccgcctactttgaaaagaaccatggcacccgcgaatctttggaggccctgttgcagcgagccgtggctcattgtcctaaatcggagattctctggctgatgggggccaaatccaaatggatggctggagacgttccagccgcgagaggcattttgtccttggctttccaggccaatcccaattccgaggacatttggttggctgccgttaagttggaatcagagaactcggaatatgagcgggcgagacgcttgttagccaaggctagaggatcggcaccgacaccaagggtgatgatgaaatcagctcgcctggaatgggctttggaaaagttcgacgaagctctgcggttgctggaggaggcggtggaagtgttcccagatttccccaaactgtggatgatgaagggtcagattgaggagcagcagagacggacagatgatgcggctgccacctatactctgggcttgaaaaagtgtcctacgtccatcccactttggattctttccgccaatctagaagagcgcaaaggagtgctgacgaaggctcgatccattctggaacgaggacgtttacgcaaccccaaagtggctgtgctctggctggaggccatcagggtggagctgcgtgcgggcctcaaggagattgccagcacaatgatggcaagagcactgcaggaatgtcccaacgctggtgagctatgggcggaggctatcttcatggaaaccaagccgcagcgaaagaccaagtcagtggatgctctcaagaaatgcgagcacgatccacatgtgctgctagctgtatcaaaactgttctggtctgagcacaagttctctaagtgccgagactggtttaatcgaactgtcaagatcgatccagatctaggtgatgcttgggcatatttctacaagttcgaattactccacggcacggaggcgcagcagcaggaggtcctcgatcggtgcatttctgcagagcccacgcacggcgagtcctggtgtcgggtcagcaagaacatccagaactggcagttcaagacacctgaggtgctgcgtgctgttgtccgggagctatccatacccatctaagttttaagtgtgtttggattaaacgcgtggagcctagcgctgcacttctctatagccttt

SEQ ID NO: 14979 - protein, 913 aa, DROSOPHILA
MSNITAAVIANRNKKHFLGVPAPLGYVAGVGRGATGFTTRSDIGPARDANDVSDDRHAPPATKRKKKDEEEEEDEDLNDSNYDEFSGYSGSLFSKDPYDKDDEEADAIYDSIDKRMDEKRKEYRDRRLREDLERYRQERPKIQQQFSDLKRSLASVTSEEWSTIPEVGDSRNRKQRNPRAEKFTPLPDSLISRNLGGESSSTLDPSSGLASMVPGVATPGMLTPTGDLDLRKIGQARNTLMNVKLSQVSDSVTGQTVVDPKGYLTDLQSMIPTYGGDINDIKKARLLLKSVRETNPNHPPAWIASARLEEVTGKVQMARNLIMRGCEMNIQSEDLWLEAARLQPPDTAKAVIAQAARHIPTSVRIWIKAADLESETKAKRRVFRKALEHIPNSVRLWKAAVELENPDDARILLSRAVECCNTSVLNKARENIPTDRQIWTTAAKLEEANGNIHMVEKIIDRSLTSLTVNGVEINRDQWFQEAIEAEKSGAVNCCQSIVKAVIGIGVEEEDRKQTWIDDAEFCAKENAFECARAVYAHALQIFPSKKSIWLRAAYFEKNHGTRESLEALLQRAVAHCPKSEILWLMGAKSKWMAGDVPAARGILSLAFQANPNSEDIWLAAVKLESENSEYERARRLLAKARGSAPTPRVMMKSARLEWALEKFDEALRLLEEAVEVFPDFPKLWMMKGQIEEQQRRTDDAAATYTLGLKKCPTSIPLWILSANLEERKGVLTKARSILERGRLRNPKVAVLWLEAIRVELRAGLKEIASTMMARALQECPNAGELWAEAIFMETKPQRKTKSVDALKKCEHDPHVLLAVSKLFWSEHKFSKCRDWFNRTVKIDPDLGDAWAYFYKFELLHGTEAQQQEVLDRCISAEPTHGESWCRVSKNIQNWQFKTPEVLRAVVRELSIPI

SEQ ID NO: 14980 - DNA, 4336 bp, DROSOPHILA
gagaccacggatcctggagataactcgcaaacgaaggaaagaacaaacacgcatcttgaggagacgcaaaaccaaggaaatactacactctgggattctgcacacagaaaagattgactcggctattgatcctgactaataatatatatattaacaatatatacactttattaagtcggaatcgtttaattctacatacaaatttcataggatgtgtcacttcatgtgagaatattaacaagattatcttggcaataagcgcttcgtcacttcgtggatcgctagatgacgtttatttgggaactcgtcatcttcatcacaaccttttcatctgtaaaacgtgactctactaattattatatatttttattattataatacaataataatacaaaaacatatttacagaaaataactttgaaacctatgatttgtttcataacttaaaatttataattataattcagcaacaaaaatcttagatactgagatattacggggtattatgaataggttggttttgataaaaacggtaaaggtataaaacaagacatacacccacaaaaaataaattatattattcatgcaaggatgtaccaaggagtttttcggacaattcggggatgattgcaaaacaaaggtaaattattgaacgccgtgttgaacaaatcatgctcaggtatacccaggctcatttaccctgcaaattatggcactgaatgtggcatgtttacctttcaaattgagcgcacaatacaaaccaaatgcgtttgacactgaagtcagaatatgcctttctcgcaaatccagggaccttcttcgtctcgaaggatatcagattgagaaaattagctgttggagtggggaaaataatgagggatcatagacacacattgaggaaggcacagttactatttcattatattttgaagactcagttttaatctaaatagcaatctataggtttgttcaattgtttgttcggtgttttcttttatttcgtttgttgttgtatatgggctttaatttgaatatttatttacaatttatttaagactcgttacacccttgctcaagtcaaatatagtaacagttgcaataaacaagctttcaacttattgcttacgtgtctcatcaatataatttacaagaaaaacttacttaaggctaatctccgttgatgttttgctttatgtctctgtgcttcacgcataatttactttacggatatttaccggctgcttattttgatgcttcttttattttgtaggtatgtgtatttttactagtgagaatattggttggttaattgagagtatatataattactatatatatctgacttctatataccatttttaacatttgtaatttatgtacgttcgtttttacgaattgagtttttactatgcgcttgcggttggttttctttgtataaataaaatagaatattttcgcttttgcttcgcttcgaataatacatgccatatacatacatataagaaaatgctcgattacgattctcataacttatggttcgacgttaaccaaatgaggccctcggacaggccatcgccggatgtggcacatgatggttgtacataccaattgcgatctcttattctagttaaacctagtttttcctggatttcatggggtttcattgctgcaagagagaacaataagcggatggaaacaattggctgagcactatactaaccatcaggcagatcctgcttgttagcaaatatcagtatgatggcgtcgcgcatctccctatcgttaattatcctatgcagctccgtgcgcgcctcgtctatccgatcccgatccgcacaatccacgacgaagatcagaccctgtgtacccgtgtaatagtgtcgccatagcggtcgaatcttatcctgcccaccgacgtcccacacattgaacttgacattcttataggtgacggtttccacattaaagcccacagtgggtatcgttgtaacagattggccaagtttcagtttgtacagaatcgctgtgggtggacaaaaacaatattactttagacacgcaaaggatgtataaacaaaatagctcgaattcgattagtgatagtactggtgtacgtattgaaaggtctttatattgtacattttttcaaagtacaataagaataaaaacaaaacaataattgcctcgcctcaagagtattttttaaatgggattggtttccacttaggaaactgatgaaactaatgggtactaatcaggcccacaatcgaattcgagaaccctttattgtttatgtgcttacttgtttttccagccgcgtccagtccgagcatgagaattcgcatttccttgttgccgaaaatttttgatagtaactttcccatggtgctgatgtgtcatccattaaaccttagccaatctgaaaaacagttcgagtagagttggcgaggtcttccaaataagcatatcgataagaatagctgggcgagattcagggcagggtcagtgaatttccagataatagggccattgtaatacagtttgcagttaacatatcaatttatgatataagaacgccgtcgcgcgaaggcgcgtaagtgatatatgaacatacaaatgtagctacatatgtacacatacggcgggcacaggcaatttggtggccatatagagcttgtacgacggcggaagctaagaccattattttgcataataatttcacttacattgtcatcagctcgttgctaaaaagcgagaaaaaagtggagaggcagaatttatcagtgaagagcttgcagcacacagtcgcacacacaaacacacgcacacatgcttacacataggaagtacaattggacagataaacacactatagtgtctcgcaaattgaggcagagttatctcaattgcgggcttatcgctggctccactgaatgggcgggtggatccgaccgctccacccccgccccctgaacagccaccgcacccctcgacgacccagtaaagccggcttgggagcaacgatatcggatggttttcggattctacggaatttcgctcgctctctcgctgctgcttgcctacgtcacaaacacgcccgtaacacacatacacatgtatacacacccaagtctccgacgaccgccgttacgcaccgctttccagcccaattcgttccacgccagcctgaaatccgttaacatgtagtgccaaagtgcgcgggccggggcataaaatgcatttgctagcacacggcggccaaaaaactataactaacaacaacaattttgcactaatcttcttgtatttatatacacatacacgaagcaatgtgcccgttagcgcagagcggaacaagatcttcgggaattccagaaaatacgctaaaaaatgcaaagaatgcggaggataaataccaaaaatactgaatttatcagatgaaaaacggtgactggcggggatatcgtgattttttggccaataagttattacttttgcaattcaaaattgaaaaagatttattttcttatattcatttattattcatattaatttagcaaacaatgtagctgatatattctcctcgtacgttcaacaatttgttaattttttttaattttaaaaatttttgttttgtgtatttagtgatttggtattttaatgtagccctggtgaacttacaaagccctagggcggccacactgaaaccgatgattgaaatcaagtcgattgatttcagtttccttcttttgtattgttttatatttgagcaatacttacgatactgacatcgctcagaggtacaatggaacttagttagtcgtcgaccagaacagactcggaaaacatggctggcatttgcccccgggaggcggttcgggtgaaagtgaaggcaagtgaaaggtggccagaaggcgagacaacaaaagggctgcttagtttgtgttcctcaatctaatttttttgaaatcgcccacagaaatgcgaacccactgctcggccggagtggcgaaagttttcagtggacccgcagatcaccacgctggaggtgttgtactccctgctggccaaggccttcgatgtcaagtcggacttctccattaagtacaaggcctttgatccggcgggcaacgagatctacctggccgtgcgctccgactgggatctggatgccgcctttctgaggattcacaacatttccattcagacggcctcagaaccctgcctcaccctgcagatcgatgtgaagccatttacggtggtcagggagtgtgagaccgaggcctccccgggtagatccataacgggagcgcctgctcccgcaactcctgcacct

SEQ ID NO: 14981 - DNA, 1296 bp, DROSOPHILA
ggcacattgcttcgtgtatgtgtatataaatacaagaagattagtgcaaaattgttgttgttagttatagttttttggccgccgtgtgctagcaaatgcattttatgccccggcccgcgcactttggcactacatgttaacggatttcaggctggcgtggaacgaattgggctggaaagcggtgcgtaacggcggtcgtcggagacttggattggctaaggtttaatggatgacacatcagcaccatgggaaagttactatcaaaaattttcggcaacaaggaaatgcgaattctcatgctcggactggacgcggctggaaaaacaacgattctgtacaaactgaaacttggccaatctgttacaacgatacccactgtgggctttaatgtggaaaccgtcacctataagaatgtcaagttcaatgtgtgggacgtcggtgggcaggataagattcgaccgctatggcgacactattacacgggtacacagggtctgatcttcgtcgtggattgtgcggatcgggatcggatagacgaggcgcgcacggagctgcataggataattaacgatagggagatgcgcgacgccatcatactgatatttgctaacaagcaggatctgcctgatgcaatgaaaccccatgaaatccaggaaaaactaggtttaactagaataagagatcgcaattggtatgtacaaccatcatgtgccacatccggcgatggcctgtccgagggcctcatttggttaacgtcgaaccataagttatgagaatcgtaatcgagcattttcttatatgtatgtatatggcatgtattattcgaagcgaagcaaaagcgaaaatattctattttatttatacaaagaaaaccaaccgcaagcgcatagtaaaaactcaattcgtaaaaacgaacgtacataaattacaaatgttaaaaatggtatatagaagtcagatatatatagtaattatatatactctcaattaaccaaccaatattctcactagtaaaaatacacatacctacaaaataaaagaagcatcaaaataagcagccggtaaatatccgtaaagtaaattatgcgtgaagcacagagacataaagcaaaacatcaacggagattagccttaagtaagtttttcttgtaaattatattgatgagacacgtaagcaataagttgaaagcttgtttattgcaactgttactatatttgacttgagcaagggtgtaacgagtcttaaataaattgtaaataaatattcaaattaaagcccatatacaacaacaaacg

SEQ ID NO: 14982 - protein, 175 aa, DROSOPHILA
MGKLLSKIFGNKEMRILMLGLDAAGKTTILYKLKLGQSVTTIPTVGFNVETVTYKNVKFNVWDVGGQDKIRPLWRHYYTGTQGLIFVVDCADRDRIDEARTELHRIINDREMRDAIILIFANKQDLPDAMKPHEIQEKLGLTRIRDRNWYVQPSCATSGDGLSEGLIWLTSNHKL

SEQ ID NO: 14983 - DNA, 3214 bp, DROSOPHILA
gcccaggttcatactcgccttgaatgcgctgctggtctggcggaactgcagcaaaagaaatataaggtggccgctaagcatttcctcaatgctaacttcgatcactgcgactttcccgaaatgatctccaccagcaatgtggcggtctatggtggcctctgcgccctggccacctttgatcgacaggagcttaagcgtctggtcatcgcctctacatcctttaaattgttcttagaactggagccccaactcagggatattattttcaagttctacgaaagtaaatacgcctcatgtctgacgcttctggatgagattagggacaacctgctggttgacatgtacattgcgccccatgtaaccactctgtataccaagatacgcaatcgcgcgctaatccagtactttagcccctatatgtcagctgatatgcacaaaatggccatggcatttaactcgtcggtgggcgatctggagaacgaggtgatgcagttgatattagacggacagatccaggcgcgtattgactcccacaataagatcctgttcgccaaggaggcggatcaaaggaacagcacctttgagcgggctttgatcatgggcaagcagtaccagcgtcatacccgcatgcttgttcttcgtgctgcaatgctcaagagccacatccacgtgaagagcatttcccgggagggtggaagcaaccacggcgccgaactttgcgtctccgccggatcctcgacaactgctcaactcgcccgaatctagagcaatttaaaagcaccacttaatacccaataaattttttaagatatgtatatcacaagctggcaaaataaataattatagcaaagctaatgaatgattttaaaaactagttggttcctcaaaaacgaaaaagcaccatacttcatcgtgtaaatgaaatataaattaaattagaattttaaatatgacgatacaaattgataaaaatttattggtgggttttacaaaactaattctaccgcctggaccgatctctgcgctccctctcccttcttcggtctctgctaagcgatcgcgagcgatctctggagcgggatcgatctctccgatgcctattttcattgctccgccgttggtagctatgatccgagtccctagtcctttgatgtccatttcttttgtcgtccctgtgattgcttttgtgattgtcctcggagtcgctgctgtccgacgatgaagaggagtctgagctattgctaactgagccctttttgtcttttctgctcgatttgtccttcttggatttctttttcttgctatctttttcgtgcctttccttttttgatttcctttttgtgggcttcttgatgccctcgcctttgcgcttcattcgttcaatcttctccagtttcttcaacagctttagcttttgtttcttggacagggatttgagaaaaactagttcgggattttggtcatcggcatgagcgtccttctcgccatcgctgggcaccagttgatgttgctgttgaatggcccttatgctctgcagctcctgtgccgatcgcttcatcatgaggccatcctccttcatctgttcctccagcacgtttttggccatgatgtcgctggcctctgtttctgcgtgcagtttccgtgcctcgctcatggaaatgctgtacatggtgcactccttgtccgtgttgatgtggccccacttgtggcacttgagacaacgcacatttctcacctggatgccgaagggctggtccctgatctcggtgtcgcccttgcagtacgactctctaggagcgttgtactttcgctgccactcgaacttgtactccggctcgttgtcatctttttcgcgctcctttcgcactcctggcggtggctcgtacatgaaattgacgctcagcttatccttgctgtccttgctgagcattgccttgttctcgtgcaaattctgctccttttcatactggttgcgtagctcctcctgcttctttttgtacgcctccgcctgctgctccgccatccagacctgcagaaggtaatccctatagttttaggcgttttgctggggaagaacatatttcatcaggagcccggagccacttacccttttcaagttgtccctggaggcggggtggaagaatttcttgcacatgtagttgttgaagcccttgcccatcttgctgctgtgcaatttcgctaccaaattgcaaacaaataaccaatatacaacttttataaatactttccagctgcgatatcagggcactttgactgcgcttatcgataggctaagaaaagtatcgcatttcattatcggtatagtaacacaagtagataaagcgttgccggactgtttgtattttacgaatacattttaaaagcaactcgaaaccttaggttttgtttcatgatgaataactacgacgaatccgatatggtttattgcccgtacaacaaggagcacaaaatgctgcgcaagaagctccagcagcacatcttaaaatgccgtgtgatctacaaagacacggtggaacttatggtttgtcccttcaatagttcccatttgataccagagccccagttctttgtgagtacagaatatacgtagtagttaccttgtatgtcctattaaagcccagctttctgcatacgtagcaacacacccaatcgtgcgaggatcgaaacattatagtacactatcagaccagcgctcctgctgtcctcagcgaagacaccagacacgcgaagatcgagtccgaggagaactgggatgacgacgagagtgtgcccgattacgatcctcaggtctactgttccagggccaacatagtgagagagcccaatgggttgtttcccgcccagcgaagggctttcatcgagcaggaaaaacgtcgtcactttggcgaggattacgaggaggagaagaagccgcggaaggccaaggctcgcgcggatcttcgtcccactccctacgagcacaggaggccatactcaaggcgccagtagttcgtgttcatcaagaattactcccactgccaaagaacaaaaaccaaaacattttatcggggcttatactcgttattataaccaaaaaaaacaattccacggccaaattgttaaaattaacatgtgctgtgaaacaagtattgctcgcagttcagatgagcaaatgacaaaatcaatctcatattattctgagataatgaaaata

SEQ ID NO: 14984 - DNA, 1136 bp, DROSOPHILA
tttgcaatttggtagcgaaattgcacagcagcaagatgggcaagggcttcaacaactacatgtgcaagaaattcttccaccccgcctccagggacaacttgaaaagggtctggatggcggagcagcaggcggaggcgtacaaaaagaagcaggaggagctacgcaaccagtatgaaaaggagcagaatttgcacgagaacaaggcaatgctcagcaaggacagcaaggataagctgagcgtcaatttcatgtacgagccaccgccaggagtgcgaaaggagcgcgaaaaagatgacaacgagccggagtacaagttcgagtggcagcgaaagtacaacgctcctagagagtcgtactgcaagggcgacaccgagatcagggaccagcccttcggcatccaggtgagaaatgtgcgttgtctcaagtgccacaagtggggccacatcaacacggacaaggagtgcaccatgtacagcatttccatgagcgaggcacggaaactgcacgcagaaacagaggccagcgacatcatggccaaaaacgtgctggaggaacagatgaaggaggatggcctcatgatgaagcgatcggcacaggagctgcagagcataagggccattcaacagcaacatcaactggtgcccagcgatggcgagaaggacgctcatgccgatgaccaaaatcccgaactagtttttctcaaatccctgtccaagaaacaaaagctaaagctgttgaagaaactggagaagattgaacgaatgaagcgcaaaggcgagggcatcaagaagcccacaaaaaggaaatcaaaaaaggaaaggcacgaaaaagatagcaagaaaaagaaatccaagaaggacaaatcgagcagaaaagacaaaaagggctcagttagcaatagctcagactcctcttcatcgtcggacagcagcgactccgaggacaatcacaaaagcaatcacagggacgacaaaagaaatggacatcaaaggactagggactcggatcatagctaccaacggcggagcaatgaaaataggcatcggagagatcgatcccgctccagagatcgctcgcgatcgcttagcagagaccgaagaagggagagggagcgcagagatcggtccaggcggtag

SEQ ID NO: 14985 - protein, 340 aa, DROSOPHILA
MAEQQAEAYKKKQEELRNQYEKEQNLHENKAMLSKDSKDKLSVNFMYEPPPGVRKEREKDDNEPEYKFEWQRKYNAPRESYCKGDTEIRDQPFGIQVRNVRCLKCHKWGHINTDKECTMYSISMSEARKLHAETEASDIMAKNVLEEQMKEDGLMMKRSAQELQSIRAIQQQHQLVPSDGEKDAHADDQNPELVFLKSLSKKQKLKLLKKLEKIERMKRKGEGIKKPTKRKSKKERHEKDSKKKKSKKDKSSRKDKKGSVSNSSDSSSSSDSSDSEDNHKSNHRDDKRNGHQRTRDSDHSYQRRSNENRHRRDRSRSRDRSRSLSRDRRRERERRDRSRR

SEQ ID NO: 14986 - DNA, 4632 bp, DROSOPHILA
gcaatatctaactgattgggtaataagtgcgcgtatcccagtatccaacgttgcaaaatgatacaacatttcaataggtttcaaaatctacgtaagatacacataaaacgacctgactactttgttctaccctacgcttgtgctgcagtacctaaaatcgaagaaagagtacagtgaacagggctaagatatagaaagacagctctatttctgcaatccaaaaagggcttgccctaattaaaataattgcaaatgcattgcgcttcaaatccagaagccttttttaccttttatagcctacaggaaaaaagaaaaaagaggagataacggaaagacccataaaatcgaaaagtgcataggtaaacctgtaggacgattagtggaatactaaaatcatcatatgttttaatcaataagtattccaattttaccaggggcaagtgtatgcgaattctttcagtacgagtatttaatatatttatttttatcataattgtataaaaacctgaagctccaaaataacttgatcattttgagaaaaatattaataaaaattatttttttgtttattttcttattatttagttacatataattttattttatgtttatgtttttataatttttattttattattcattatattataataaatagattcgttgaatagtattaatattggatttgaatgcagcgatgcgttttacgcatttcaaatccgaaactcgcttagatcacacgacgtaactttataagatatataaatcaaaaataactgttattttgaaagagaaaaaatgatgttgtttgaaataaaggaacaaaaaagcgaaaaacagaaaaagcaatcggttaagttttaaattctttttgggcgccaaaaatgaatcggataagccaaaaacaacaaacaataggcttttcgattttaagaagggtcacatttccgataacaatgaaaactcacatttaaattggtcacactaagtggggcgccaagagaaaatatcgatatcgattccgactgttgtgttagactttacaaataaattacaaagaaatcgatcaaaataaaatcatggaagaaagtcagccaaggtatggcgctatgtggacattcaagctggtggcaccatacgtaattggcggctacctatgcggcctcgcggtaacgctcgcatggaactggtggcagctgggccacttggttctgggtcttaatctcaccttcgcgattccggtggcgcttgttctggcggtcttttacagcaggcccgtaaggtaagaactacctgaaaaagcccaaaacgatttgtgtctaacagtgttccctcactggctgccaggtgcattgtgactttggcccttccctcgctgtgcagctctcggggaagggcgttcctcatcagccttgcctttgttattgccgcagttgggcctacggcgaacattctagccaatttgaaggtgatgctccgcagcctcgcttgcggacaggagctattgcgtcaggcgcttggccagatgttggacgtaatactggagccggtgaatgccatccagctagcggtggatctcttgatgcgggaagtgcgtcgggtgctcaagctggccatggtagtgctgttacgcattcaggaccaattgatcgcaattagtgagtatctgtattaaaaagtgctgcagttttctctgctgattcatttttgtagttaaaaccctgaagaactgcgccgcttggctgaaatccatcgtagacctgtgcaacacagaaatgggcactccctgggcacgttgcaaaaagacggcgcatcacgcaatgatcaggtgccagtcaaagatgggcgtattcaaggcgctatgccatgctgcaaagctgtttctggccctctgctatccagccaagatcatcgatgtgttttgcagcggttactgggatctcagctggggtcttcttgataaaatcgcagaacgtgagagtgtaaacaacgatcggtactttggttattagttatacgatctcgcaggctaccgtgaatttgtgcggcacatcgaggaaatgtttgatgccaatatcacttttgagcacgaatttttcttcgatacaaactcttcaaagagcctgacggacgtgggggaggaaattttacaggatattaacaagcgtctgtcgtcgtttatcttcttgagcagctttgtggacattctctgctgggtcatggtggttactgtattttttaagtaggcaagagcttaatcatcttattaatttagtgttggtgatgcctcaattgttcccatcagagccaccatcttctaccttcgatatatgcacagccggcaatttcagaatgtgttcttgacaaagatactaagtgatatcgaccggcggcacgaaaagcacggttacgatccactgctaccccttcatcagcttgaaagggcaaagtatatgaaggtaaggtttccctacgtttccctgacataatattacaatgatttcattgcagcttactagcttgcgtttgactttgtttgagttcgtgtccattgttgagaacgcctgtttcatggccacaacctgcttgcagttgtttgcgatttgctttctggattacgggctgttctggctgttggcaactatatccctccatggccaccaagagactgggctggaggtgcccgcttacgtcgatctagagattaagggtgggggctttgtggcggatgtcatgcggggaatcgctaatgcctttcgacccttgacgcaaaaaagcattttagacgtgaatccttgcctcccgctgcccgtgaaacctgattatgcggagtatctaattatattattactctgtctgctcgcttggctgatccttttggccgagccgtatattttgcgtactcgccatcttataatggcccacttttatccaaaacgcgccaaggaaagaggcatgtttctgtacaacatgatttccgaagatagaagtaagaaagtacataccttttaaagttgttctaatgtattctctccagcaagcatttttaagtttatccgccgcagaaagcgtaatgagtttaaccacacacggaatgtgaagcacaccagaaactacacttggctgaacaatagattctcctgtttaatgtgcatgtgctcctgctgctcatcctgtcaaagcactgagaggtgcaccatatgtggccgatctctgactctgtaagtaactccaatcgttaaacacactccgggttacagttggatgtcccctttttagttcaaatcgtaacccctgcgacactcctggatgcaaaggggtttattgcggtaaatgctttgaaaagtcacacaataagtgttgtctgtgcaatcgaccagtggattatggtgatttttccgacgttactgaagtagagtgagtaaaaaccagggtttaatcgactattcttaatggttttgtttgtgcagcgactcttcggactattctgaaaaagagtcttttagcgaaaggcagtacaggaagacctgtggaggacaacgctagcaacgagggaaaaacagttaaacatagaggttgtgagcgcatacacgttatgcagatagctcagaaatataatatttccacctattaaatacctgatattccaacaatttaatatatggttataggtgagttattcaataaaaataactcttgttattgctgatctgatgtcagtgcaattcctacccttcaccgcccatggaagtcgcaatacggggactgcgttgtttggcgagcttctgggctgaaattattatttaattaaatactacagcgacaaatggctacacagcaattcagaaaataaccttgttctcacccctgttttcgattttttcttttttatcaaaggcttgtttgcttgatacctatttttatttcttcttgggctatgactgtaacgtgctgttgaacatcttctcattattgttgactttctctttacgactgtttaataaattctgctcttcccccacatgcggcttccatttaccaagcttatacgagcatttattatataacacccgtcgacttgcaccgatccctctagaccctatatcgacccctatccacttgaccaccatcgttgacagtcaaccacacacactcgaaaaacaatggagctcatcttttcgaacggatttttgtgcttgtgcaaggtaatgcccggtccgttcggatgatatcaagttactattgggtagttttgtttgacactcgatcgatcgccgttgtgtctcttagatagctgatgcgtgaacatttcatcagtgccatccagattcgctttcaggccgacgaattattttgttttattgagaataccatttttcctatctaaaaaactgcttttttgtttgggtacccaaagaaaccaatgcttttaagctccataagaagctcgtggtcgttgccaattgccttgaaaatggctttctctaactcgtcgtattggaagtgtggcgaaaagggcatgtcgttcagggcgttgaagagcgtgttcccgcgctcgttgccaataaccaatgtgcgaccacagtgggaaaacctaagaattggtaaaggaaattcctattcaattggcca

SEQ ID NO: 14987 - DNA, 2239 bp, DROSOPHILA
gagaaaatatcgatatcgattccgactgttgtgttagactttacaaataaattacaaagaaatcgatcaaaataaaatcatggaagaaagtcagccaaggtatggcgctatgtggacattcaagctggtggcaccatacgtaattggcggctacctatgcggcctcgcggtaacgctcgcatggaactggtggcagctgggccacttggttctgggtcttaatctcaccttcgcgattccggtggcgcttgttctggcggtcttttacagcaggcccgtaaggtgcattgtgactttggcccttccctcgctgtgcagctctcggggaagggcgttcctcatcagccttgcctttgttattgccgcagttgggcctacggcgaacattctagccaatttgaaggtgatgctccgcagcctcgcttgcggacaggagctattgcgtcaggcgcttggccagatgttggacgtaatactggagccggtgaatgccatccagctagcggtggatctcttgatgcgggaagtgcgtcgggtgctcaagctggccatggtagtgctgttacgcattcaggaccaattgatcgcaattagtgagtatctgtattaaaaagtgctgcagttttctctgctgattcatttttgtagttaaaaccctgaagaactgcgccgcttggctgaaatccatcgtagacctgtgcaacacagaaatgggcactccctgggcacgttgcaaaaagacggcgcatcacgcaatgatcaggtgccagtcaaagatgggcgtattcaaggcgctatgccatgctgcaaagctgtttctggccctctgctatccagccaagatcatcgatgtgttttgcagcggttactgggatctcagctggggtcttcttgataaaatcgcagaacgctaccgtgaatttgtgcggcacatcgaggaaatgtttgatgccaatatcacttttgagcacgaatttttcttcgatacaaactcttcaaagagcctgacggacgtgggggaggaaattttacaggatattaacaagcgtctgtcgtcgtttatcttcttgagcagctttgtggacattctctgctgggtcatggtggttactgtattttttaaagccaccatcttctaccttcgatatatgcacagccggcaatttcagaatgtgttcttgacaaagatactaagtgatatcgaccggcggcacgaaaagcacggttacgatccactgctaccccttcatcagcttgaaagggcaaagtatatgaagcttactagcttgcgtttgactttgtttgagttcgtgtccattgttgagaacgcctgtttcatggccacaacctgcttgcagttgtttgcgatttgctttctggattacgggctgttctggctgttggcaactatatccctccatggccaccaagagactgggctggaggtgcccgcttacgtcgatctagagattaagggtgggggctttgtggcggatgtcatgcggggaatcgctaatgcctttcgacccttgacgcaaaaaagcattttagacgtgaatccttgcctcccgctgcccgtgaaacctgattatgcggagtatctaattatattattactctgtctgctcgcttggctgatccttttggccgagccgtatattttgcgtactcgccatcttataatggcccacttttatccaaaacgcgccaaggaaagaggcatgtttctgtacaacatgatttccgaagatagaacaagcatttttaagtttatccgccgcagaaagcgtaatgagtttaaccacacacggaatgtgaagcacaccagaaactacacttggctgaacaatagattctcctgtttaatgtgcatgtgctcctgctgctcatcctgtcaaagcactgagaggtgcaccatatgtggccgatctctgactctttcaaatcgtaacccctgcgacactcctggatgcaaaggggtttattgcggtaaatgctttgaaaagtcacacaataagtgttgtctgtgcaatcgaccagtggattatggtgatttttccgacgttactgaagtagacgactcttcggactattctgaaaaagagtcttttagcgaaaggcagtacaggaagacctgtggaggacaacgctagcaacgagggaaaaacagttaaacatagaggttgtgagcgcatacacgttatgcagatagctcagaaatataatatttccacctatt

SEQ ID NO: 14988 - protein, 166 aa, DROSOPHILA
MWTFKLVAPYVIGGYLCGLAVTLAWNWWQLGHLVLGLNLTFAIPVALVLAVFYSRPVRCIVTLALPSLCSSRGRAFLISLAFVIAAVGPTANILANLKVMLRSLACGQELLRQALGQMLDVILEPVNAIQLAVDLLMREVRRVLKLAMVVLLRIQDQLIAISEYLY

SEQ ID NO: 14989 - DNA, 5043 bp, DROSOPHILA
ctgctgcatataaaaagtttgcaggttaaaagatcctgtgcagaaattcccagtaaaaacagaaacttaagcttttcatatatacgattatatttttacaggtataggtatcgagtttaaataaaatcagaatttaagtgtgtagatttcgattctgtgttgtatgtatgcagctattttttctgtgattaatttatatattttatagtcagtagtatttccccatttccttttctggaccctagaagctcgacgcgtgttgacaattttgggctcagcgcttggttaatacattttagattcggctttaaaggtgtttgggtatttaggaattttaaaaacgcaatcacgcttcggcgattcatcatataaacccgcacacgaatagcgtagttatgtcatccgcgtggcgtgtgtttcgtttcgattcgaatcaaaacgaatcgtttcgagtggaaacgtaagacggaaaattaaaattaaaataattcacgcattgtcattgaaaataaattttaagtagttgtcaccccaacttatcggcttgggaaataaactgttatatcagggaacagcacgtacataagggaactttaagggctcgccttaactagttataaaacttgaggaaattttagacccatacacataataatgaagagtaatgaaggcatacgtaagataattcagctgttttggtccaaggcttaaccgattgatgggctttcaaaatatagcatagcacgggaggagctgtgacaaacttggaaacgcccaaatcgaatataaatctaatgtatcgaatggcgacgaacgtgcttgtcatgcacatagtagtacttacggaattgattgcattgcaatatactattgattcgcatttgcctgccttttgtatggattacttatagccatcgcccaggaagtggccagaactgtgcccaccgcgccctcgcctgcccattttgcggaactatcgcaggcggtccatgatcagttaatggagcacgaggagcgccagcgagagcgagtgcgtcgtggtcaccgctcccggagggcagtcaaacgggtatgctatggggaactgggttgcttcgaggactccggcccgtttgcctatctggagatgctgccctcgtcgccggaggagatcaacaccaagttctatttctactccacgcgtcagcgttccgatcgtccgctgatggagctgtcctttctgaacatgaccaatgcatttcgtggcaagcgtgaaacggaggtcagcaccagttcaccagagggaaccagcggcaggtcatcggtcgcctcggcaccaagttccatgtccgccgtgaacgccaccacgttcacgacagaacgtcctggtggagggcaaaagaaaccaacaccatcaatcgatgacctcgagggattcgatgagctgtccgtgcgggttattgtccatggattcggttcggcctgtccgcatgtgtggatctacgagatgaaaacagctctgatggcggtggttagtgctgcacaatgtccacagtgtccttcttcttaataccacttgcccatttgcaggaggattgcattgtgatctgcgtggactgggagaatggagccacctttccgaactacgtacgagcggcggccaacacccgtttggtgggcaagcagctggccatgctgctcaggaatctgcagcagcacaagggtctcgacctgatgcgcacccatgtcattggattcagcttgggggctcacgtgtccggatttgctggagctgagctgccagggctgtcgcggatcacgggtctggatccggcgggtccactctttgaggcgcagcatccgaaggtgcgactggatagcagcgatgcggagttcgtggacgtcatccactcgaatggtgagaatctaatcctgggtggactcggctcctggcaaccgatgggccatgtggactattatcccaatggtggtcgtgtgcaaaccggctgctcgaatcttttcgtaggcgctgtcaccgatttcatatggtgtaagtatatttgttcaaataaattgtatatattcttagctgactgagctacccaatcttctacagctgcccaggcggcagaggacgaggagggtcgttccttgtgcaaccacagacgagcctacaagttcttcatcgactcggtggcgccacgttgtctgtttcccgccttcccttgcgggaattacgatgatttcctcaagggcagatgctttccctgcgcccaggatgatgaggatctggccgagggtgtgcccaggtgcggcaacatgggctactatgctgatcgttccacgggaaggggtcagctgtacctgctaacccgcgaggaggaacccttctgtgcccaccagtttcagctgcagatcttcaactccttcaacgatctgccactgcgcaccataggtcgcctggaggcgattctcgagggagatggtggtctcaacgagaccttcgaaatatccgagtgagtatgagtgtgattaatatgtcaaattacctgttcctaacattattcacttgcaggaaagacgatgcggagttctttgccggcgacatagtgtctaagatcattgtgcctcatccggctctgggattccccaccacactgagcctgcactacaagtcgtacagcgggtggttgagcaagggcctgccccattgggacatcgataaggtggtgctgacggacagctttggccgcagtcactccctgtgtcgcccctccacgaaactgagcagcggcagtccggtgcgcctgcgccttcaggcgggcaactgtgagctggacaaccaggaggactatggagcgtacaccacccaaccaccggcagcaccacctgcacagcatgcgggcaatcccacggtggccgtgcccaccgatgtgcccgattccagtgtccaggaatccggcttggcggcatcggtggatggcgtggagagcgccaaacagcgcaaggacatcttcaatttgggcaccagctttaagttggcccgcaatcagacatatcccctggatcagggcgacgagctgccgtggcaaccgatcttggtgggcaactcgctggataacgagactgctgaggccgcagagtccagtcgcagtctctcggactcgattgccggggagatctttgagccggtgcttaaggatcgacggttggcggtgaatagggggcgaaatctgcaggattatgccaccactgacagtccagagattatggaacctgttttaaaggccaccacaccacgtgttaagcaaggcaaggatctggatttgtctgaaagtgagttggctgctggcatggtcacaacattgggcgccattacgtctgcagtggctggctcctcccgcctgcccgccaagacgatggctcaggtgggcaccggacgatctccggatccggatgagccgcaaaccgtccagctgctgccattccgactgggcgaactgcttcagcgggcggagcgttatgctcgtgagacccttctaccgctcatatccgtgcaggcgccgcgcttctttggcttcaatgtgacgcctcacgatcgggagccagtgcgtccgggcgaatcgcgcaagccacgctatattccacgctacgaggagtcggcctttctaaacaccagttcgaatgccagaaggcgatcgcagaaggcctcgcgacgctcgtcagcgcagcagagaaacctcttacgacttgtgcgagcgcgatcccacggcctggatgacggcgaagatggttcggatgagcagcgggagggagagcgggagcagcggaacgaggtcaactactacaccaatgtgctgcagtccgaatcgcggtccatgcgacccgaggcaccggaatatagacccgtattcatcgatctacccacctataagccgaagacagcagctgcattttccacctccgctgccgtttccgctccgctggcatccgctgctgtttccggttccgtttccctatcgagggccagaaggcgtggcagatcaccaaagctaattccctgatattcagacatgcagctggctaagctgtcccgccatcggggatgaacactttgtgatatgcacaccagatcgtggctatggcacggctccagaacccccatcccatttcgatcctaatcccaattcagatcactcatacgcattacacccatcctcacactgtaaatattcgaacgagcaagcaaagttacatagacaatgaaatggaatttcaaatcgttggatgttgcatcgtagaataagatattgaacgtaagaatttaaatgtgagaaatttagttggtaagataaaagcctacggtcgagggtctcgaccttaagatatcagaatataatggttgtattttaattttttcggggctattatattgccttcttaagtgggtaagctatatatccacatacatgtaccttattttccaaataaatatttaaattaatatgtgtaaccgaaatgactgcacattttctgttaaagagcactgtaaagtgctgaaactaacagcgatcaactgcttgctagcaacgctgttaacgtttcacaatagtgcgacactgcttgcttactgaaattcaaaatgaaacgcgcacttttaatttttctttttagcataatttattttatatactttccatttaatttgttttatgttcataaagtaacgtgtgtctgcctctgtctgtgtaggtgtgtgtgtgtgtgtgtgtatgtttgagcatgtgtgtggcttgtatctttttcatatattttgtattattcacttaaatttgttcgatttgtaagctgctttgatttgagatccaatttggttggtttcaatttacaatgattgtaaaaattgatttatggttttcgccaccttggcttggatttagcttttcaaccattgcttttaaatttatcgaaagtcaaatggtagatttttgtgcttgctggccttgttcacttgtttgtttgtttgtttgttctcttgtttgtttgttgcttgtggttttggtg

SEQ ID NO: 14990 - DNA, 2859 bp, DROSOPHILA
atggagcacgaggagcgccagcgagagcgagtgcgtcgtggtcaccgctcccggagggcagtcaaacgggtatgctatggggaactgggttgcttcgaggactccggcccgtttgcctatctggagatgctgccctcgtcgccggaggagatcaacaccaagttctatttctactccacgcgtcagcgttccgatcgtccgctgatggagctgtcctttctgaacatgaccaatgcatttcgtggcaagcgtgaaacggaggtcagcaccagttcaccagagggaaccagcggcaggtcatcggtcgcctcggcaccaagttccatgtccgccgtgaacgccaccacgttcacgacagaacgtcctggtggagggcaaaagaaaccaacaccatcaatcgatgacctcgagggattcgatgagctgtccgtgcgggttattgtccatggattcggttcggcctgtccgcatgtgtggatctacgagatgaaaacagctctgatggcggtggaggattgcattgtgatctgcgtggactgggagaatggagccacctttccgaactacgtacgagcggcggccaacacccgtttggtgggcaagcagctggccatgctgctcaggaatctgcagcagcacaagggtctcgacctgatgcgcacccatgtcattggattcagcttgggggctcacgtgtccggatttgctggagctgagctgccagggctgtcgcggatcacgggtctggatccggcgggtccactctttgaggcgcagcatccgaaggtgcgactggatagcagcgatgcggagttcgtggacgtcatccactcgaatggtgagaatctaatcctgggtggactcggctcctggcaaccgatgggccatgtggactattatcccaatggtggtcgtgtgcaaaccggctgctcgaatcttttcgtaggcgctgtcaccgatttcatatggtctgcccaggcggcagaggacgaggagggtcgttccttgtgcaaccacagacgagcctacaagttcttcatcgactcggtggcgccacgttgtctgtttcccgccttcccttgcgggaattacgatgatttcctcaagggcagatgctttccctgcgcccaggatgatgaggatctggccgagggtgtgcccaggtgcggcaacatgggctactatgctgatcgttccacgggaaggggtcagctgtacctgctaacccgcgaggaggaacccttctgtgcccaccagtttcagctgcagatcttcaactccttcaacgatctgccactgcgcaccataggtcgcctggaggcgattctcgagggagatggtggtctcaacgagaccttcgaaatatccgagaaagacgatgcggagttctttgccggcgacatagtgtctaagatcattgtgcctcatccggctctgggattccccaccacactgagcctgcactacaagtcgtacagcgggtggttgagcaagggcctgccccattgggacatcgataaggtggtgctgacggacagctttggccgcagtcactccctgtgtcgcccctccacgaaactgagcagcggcagtccggtgcgcctgcgccttcaggcgggcaactgtgagctggacaaccaggaggactatggagcgtacaccacccaaccaccggcagcaccacctgcacagcatgcgggcaatcccacggtggccgtgcccaccgatgtgcccgattccagtgtccaggaatccggcttggcggcatcggtggatggcgtggagagcgccaaacagcgcaaggacatcttcaatttgggcaccagctttaagttggcccgcaatcagacatatcccctggatcagggcgacgagctgccgtggcaaccgatcttggtgggcaactcgctggataacgagactgctgaggccgcagagtccagtcgcagtctctcggactcgattgccggggagatctttgagccggtgcttaaggatcgacggttggcggtgaatagggggcgaaatctgcaggattatgccaccactgacagtccagagattatggaacctgttttaaaggccaccacaccacgtgttaagcaaggcaaggatctggatttgtctgaaagtgagttggctgctggcatggtcacaacattgggcgccattacgtctgcagtggctggctcctcccgcctgcccgccaagacgatggctcaggtgggcaccggacgatctccggatccggatgagccgcaaaccgtccagctgctgccattccgactgggcgaactgcttcagcgggcggagcgttatgctcgtgagacccttctaccgctcatatccgtgcaggcgccgcgcttctttggcttcaatgtgacgcctcacgatcgggagccagtgcgtccgggcgaatcgcgcaagccacgctatattccacgctacgaggagtcggcctttctaaacaccagttcgaatgccagaaggcgatcgcagaaggcctcgcgacgctcgtcagcgcagcagagaaacctcttacgacttgtgcgagcgcgatcccacggcctggatgacggcgaagatggttcggatgagcagcgggagggagagcgggagcagcggaacgaggtcaactactacaccaatgtgctgcagtccgaatcgcggtccatgcgacccgaggcaccggaatatagacccgtattcatcgatctacccacctataagccgaagacagcagctgcattttccacctccgctgccgtttccgctccgctggcatccgctgctgtttccggttccgtttccctatcgagggccagaaggcgtggcagatcaccaaagctaattccctga

SEQ ID NO: 14991 - protein, 952 aa, DROSOPHILA
MEHEERQRERVRRGHRSRRAVKRVCYGELGCFEDSGPFAYLEMLPSSPEEINTKFYFYSTRQRSDRPLMELSFLNMTNAFRGKRETEVSTSSPEGTSGRSSVASAPSSMSAVNATTFTTERPGGGQKKPTPSIDDLEGFDELSVRVIVHGFGSACPHVWIYEMKTALMAVEDCIVICVDWENGATFPNYVRAAANTRLVGKQLAMLLRNLQQHKGLDLMRTHVIGFSLGAHVSGFAGAELPGLSRITGLDPAGPLFEAQHPKVRLDSSDAEFVDVIHSNGENLILGGLGSWQPMGHVDYYPNGGRVQTGCSNLFVGAVTDFIWSAQAAEDEEGRSLCNHRRAYKFFIDSVAPRCLFPAFPCGNYDDFLKGRCFPCAQDDEDLAEGVPRCGNMGYYADRSTGRGQLYLLTREEEPFCAHQFQLQIFNSFNDLPLRTIGRLEAILEGDGGLNETFEISEKDDAEFFAGDIVSKIIVPHPALGFPTTLSLHYKSYSGWLSKGLPHWDIDKVVLTDSFGRSHSLCRPSTKLSSGSPVRLRLQAGNCELDNQEDYGAYTTQPPAAPPAQHAGNPTVAVPTDVPDSSVQESGLAASVDGVESAKQRKDIFNLGTSFKLARNQTYPLDQGDELPWQPILVGNSLDNETAEAAESSRSLSDSIAGEIFEPVLKDRRLAVNRGRNLQDYATTDSPEIMEPVLKATTPRVKQGKDLDLSESELAAGMVTTLGAITSAVAGSSRLPAKTMAQVGTGRSPDPDEPQTVQLLPFRLGELLQRAERYARETLLPLISVQAPRFFGFNVTPHDREPVRPGESRKPRYIPRYEESAFLNTSSNARRRSQKASRRSSAQQRNLLRLVRARSHGLDDGEDGSDEQREGEREQRNEVNYYTNVLQSESRSMRPEAPEYRPVFIDLPTYKPKTAAAFSTSAAVSAPLASAAVSGSVSLSRARRRGRSPKLIP

SEQ ID NO: 14992 - DNA, 2838 bp, DROSOPHILA
catactcaaggcgccagtagttcgtgttcatcaagaattactcccactgccaaagaacaaaaaccaaaacattttatcggggcttatactcgttattataaccaaaaaaaacaattccacggccaaattgttaaaattaacatgtgctgtgaaacaagtattgctcgcagttcagatgagcaaatgacaaaatcaatctcatattattctgagataatgaaaataacatacatatcccaaattcatgtacatgtgtaaactatgtgcctttttccattaacgacacagataatcgtgaaataaagcatttcactttgtttcttatcaaaaaaaatactcgtttcttactcttccttaacctatcagtttatccccaacaatacctttattcgtttatacctttaattcgttattgccaaagtgggtatataaataggggaaatccgacgtatattggtttctttagttatcctaataatattggctgtttttcaaatcggtctgttctgtttattctacctacaaaatgaaactctttgggaaagttaaatagctttgaaagtttgctgttgatgcttatcaagattgtatagtaggaatacacgatcgattatacatgtaagtagccattacgtattaaatctgctatttttggatttttggttacaagcttaacttaaatcaatcatttgactattaatttgaatggatggatgccaaatacagcattttataagtccaaattcaatgaaaactctatttcaagctaatgcaagtcaattaaaggttttaacttttagagtaacaaaaatatggagaagatggcagtataagttatatctgaaacagaatctaatcgggcagtaatcaaacatcaataatctttgcaaaacaaatagcagagcgtctctttttaaactactccaaaacttctcagctacgtcggttttccggcacatttatctaaaacttcattcagggaaataagccaacagatccatttgtgaaaatcaactttcctttattgtaaagaatggcgccgttttcacacgcgatttttttcagatgttttgttttttacactaagcgttacggtaaaaacagtaaacagcgacgtcccagttgtccagagcagagttttagccggcgatttacgcggtctccatgggctgggcggcggtctcctcggtgtacttgcccttatccttgccgagagcggccagacgacccttgccgcgacgctccaggatggccttgcggtccttgtcgagcttcagcttgacgatcagcaccttgctgggatggatgcccacgtagacgttggtgccgttggcgttctcgcgctggatcttctcgacgtagacgacgaactttttgcggtaggcctggaccaccttgcccacctggttgcccttgaagtggccgcggatcacctggacctcatcgtcgcggcggatgggcatggaacgcacattgtacttctggcgcagctccttggagaggggagcggacatgaggcgcctgcgaatgtgggagggagcctggaagtgacgcttgcggttcttcctgcgcgacgacgacacgaacgggttctgtttcatcttgcttgtgcgggctgtaaacaaaaaataggcactgctttattggcgggctctccgaaattcacaataattgcacgaacgagtcgtgcgttgttttctctgctcgatttcattgtttatggggcataatatgtggggatgccgggccaaaaacgaaattaatcacgaaaacgcactcaccgtcgaaaaatcaacgaaaagaaagaaatttgacagatgggtcgcggttagggatggcaaagaggcagtgctggaggtggtatttcgtaacgatagttaacgatgttatcggttgtacttgtcaggggtgaagagcattggattctacgtttataaatggttttgatagctcattttccttcttctacgcttatttttttcctatgaaattgtttaaatatttactgttttgtttatgtcttcctgtaactgtttaatttaattcagctagtatcgataacactgtcatctctaagtcgtgaactgtcaaattcaaagcatgtgctttgcaacacttcaagggagtgtgtctttgctaaaatcgtggtcttgttttcactgttacaattcaatattttccaattggaaaccagtttaaatttttcccaactcgtgaaaaataaaaataattttaaattttcgttaaacgtttttattacgttttaaaagcatatttttcacatgtcaacatactgatagttataatttaataacggttcttaatacctttgtaaaaaatgaaatacagatcaaggatctaacgaaaggccattaataaagtagatatgtaagtaatataaaaaatatagacaaatagttttaatagaatcaatagcaattcagtgattgaattcatatttttaccagcgttgaagaaagttcagtaacatctgttgatcatccgcactaacagaatgttaccgaaaagctcaacgaaatacagcccgctgttaactaacatggcgcttcgccaacagcaacaggtttcctatggtccacgatccccacatatgtggagaatggaaattcagtcgcgtgtgagcagcccacttttaacgttgtggtgtctctggggatcagatccaaaattcaaaaaagtccagtttggcctcttgattaaatcaattcttccacttcattcaagatgatgaacagcctaaagaaattgcccgtgcgcatggtgagttggccacgcccccctaaccgacacctttatacatacatatatgcctacaac

SEQ ID NO: 14993 - DNA, 672 bp, DROSOPHILA
ccatccctaaccgcgacccatctgtcaaatttctttcttttcgttgatttttcgacgcccgcacaagcaagatgaaacagaacccgttcgtgtcgtcgtcgcgcaggaagaaccgcaagcgtcacttccaggctccctcccacattcgcaggcgcctcatgtccgctcccctctccaaggagctgcgccagaagtacaatgtgcgttccatgcccatccgccgcgacgatgaggtccaggtgatccgcggccacttcaagggcaaccaggtgggcaaggtggtccaggcctaccgcaaaaagttcgtcgtctacgtcgagaagatccagcgcgagaacgccaacggcaccaacgtctacgtgggcatccatcccagcaaggtgctgatcgtcaagctgaagctcgacaaggaccgcaaggccatcctggagcgtcgcggcaagggtcgtctggccgctctcggcaaggataagggcaagtacaccgaggagaccgccgcccagcccatggagaccgcgtaaatcgccggctaaaactctgctctggacaactgggacgtcgctgtttactgtttttaccgtaacgcttagtgtaaaaaacaaaacatctgaaaaaaatcgcgtgtgaaaacggcgccattctttacaataaaggaaagttgattttcacaaa

SEQ ID NO: 14994 - protein, 149 aa, DROSOPHILA
MKQNPFVSSSRRKNRKRHFQAPSHIRRRLMSAPLSKELRQKYNVRSMPIRRDDEVQVIRGHFKGNQVGKVVQAYRKKFVVYVEKIQRENANGTNVYVGIHPSKVLIVKLKLDKDRKAILERRGKGRLAALGKDKGKYTEETAAQPMETA

SEQ ID NO: 14995 - DNA, 2426 bp, DROSOPHILA
acgatcgttgtagaggatttcgggagaagctgacctcttgaacctcccaagttactgtgctgcgcccaagtaacctctgacgcagcacaaaatcggatcatcaaaaccgttgatgagtaatggacatcacacattccaagcgttaccaatagccaaggcagccaggtatgacacactgtgcgataatcaagccaataaaccaacacccaaaatgaaaacatacagatgagtttgtaaaaatagtgcactttactacaataattagctacaaaagcatttgggtttcaagaaatgcttggcaaattgtttataagtattaataaatatttccaaaattacgtaggcaataattatcgtcctgaaaaatatgtacgttataagggaaggaagtatatatagatatgtaacgtaacaaaagtttccaatcgaaaataaaattatagtttaaaaataaacagtatataaattagtcacctaaaatgttagaaaacattgtctagcttctgaacaaatacaataagtattttaaaatattttcatgtaaagttgaaacgttacaattttttaagttcaaaagctgaaacgatcttgtaagctaataactaaaaataacttactatttccgtagccacaactgtaggtgatcgtcgaaaatgtcacattgaaatgagaaattgaaacaaataaattgtacttagaaccgataaacgagtaagcaaacaatggaaagtgctcaaacaacgcagtgcgattcattcgtaatgcgtatttattttagtggtaccaattaaaatacataaaattaataatactatgacttatacttagatgagattgcaggaacagactcacatgagccatacatacagatgggggatctctaacttaatgctctacaagtactacagattcaattagtgctgatagtttatctaatctttattgctacctttggaatgttttgaattgacatcgctacgaaagcatcttatccgtctcactaaaccttagagcagtactgatcctcgctgaagctgttgttcacggagtacggcgggggagtggtggggcagacctcttcctgcagagtggccgctgtgttttccctcctcaggccaccgcttagaatattgcttgccccgtcgtcgaacatccttgctatatagtgggcggtgattagagcgccagccacgccaagtagcgatccggaaaggacgtcggaccagtggtgccaatggtccattacacggctgagggccgtataccaggctaccatcaccactgcgaactgcacaaagtgccggctcagcttcgatccccgccaggtgatcttccgctggaggtagagtgccacgtagatcatggcatagaaggccaaactagagtgaccgctgggaaagctgaggcgggcctgtcgcacgtcctccacggtgaagccctcgccggcgcagtcgtagttctccatgtagcggtgcaggttgaccggatcggagcacatgctcccatccgcaatctgcggctggcaaacggccaggaagtgcggtctcaggcgtccgatggtgtacttgcccacctcggtagcgtcaaaggtgagcagcaggccaaagcagaagtaggtggactgccggcccagctccacgtaccatgtggataccctccagccaagcagatccaccgtggccgagatgtctccggcgcgcaggtggctaacgtactccaccaccaccatgaccagggccggaagcaggcccacgatcaggccgagcattaccggcgttatggtgttgtcctggaatggatagctgatgctctcgtcgtcgcagaaaaagccgcgtcgcacgggatccaccgcgaactcgtacacgcagatgggaatgacgagcaccaccaccaccaggagctccacgagcaggcgctgcgtcatccggcgatccgatgacggtcccgtggagccggcggcagagccggatgcagatgccggcatggaaaccgttacggactgatcttctggtgcgtcgcgcatttcactggcttaattagttaatattccaaatggcctttctgcctgctggtaattagcttttcgattcgtttgcttgttttcccgccgcgtcgatcgtttcgtcgggttcgttgtcagtggctgactgagttggcgtcgtttgggtaacgttctttaatttaacgctcatttaataggcggcactctcccgacattcggcattgtttttggctccccagtgctctcttatttttaaattctctgagtcagagcagagtgtttatggcctattttatggtagttagccgtttgcggggatgtaattattgttgcggctcttcatttttccagattagacaagagccagaaacactgaaataaaaaatcggatcgattaaaactatttacctaaccaccacctata

SEQ ID NO: 14996 - DNA, 1135 bp, DROSOPHILA
aacgaacccgacgaaacgatcgacgcggcgggaaaacaagcaaacgaatcgaaaagctaattaccagcaggcagaaaggccatttggaatattaactaattaagccagtgaaatgcgcgacgcaccagaagatcagtccgtaacggtttccatgccggcatctgcatccggctctgccgccggctccacgggaccgtcatcggatcgccggatgacgcagcgcctgctcgtggagctcctggtggtggtggtgctcgtcattcccatctgcgtgtacgagttcgcggtggatcccgtgcgacgcggctttttctgcgacgacgagagcatcagctatccattccaggacaacaccataacgccggtaatgctcggcctgatcgtgggcctgcttccggccctggtcatggtggtggtggagtacgttagccacctgcgcgccggagacatctcggccacggtggatctgcttggctggagggtatccacatggtacgtggagctgggccggcagtccacctacttctgctttggcctgctgctcacctttgacgctaccgaggtgggcaagtacaccatcggacgcctgagaccgcacttcctggccgtttgccagccgcagattgcggatgggagcatgtgctccgatccggtcaacctgcaccgctacatggagaactacgactgcgccggcgagggcttcaccgtggaggacgtgcgacaggcccgcctcagctttcccagcggtcactctagtttggccttctatgccatgatctacgtggcactctacctccagcggaagatcacctggcggggatcgaagctgagccggcactttgtgcagttcgcagtggtgatggtagcctggtatacggccctcagccgtgtaatggaccattggcaccactggtccgacgtcctttccggatcgctacttggcgtggctggcgctctaatcaccgcccactatatagcaaggatgttcgacgacggggcaagcaatattctaagcggtggcctgaggagggaaaacacagcggccactctgcaggaagaggtctgccccaccactcccccgccgtactccgtgaacaacagcttcagcgaggatcagtactgctctaaggtttag

SEQ ID NO: 14997 - protein, 340 aa, DROSOPHILA
MRDAPEDQSVTVSMPASASGSAAGSTGPSSDRRMTQRLLVELLVVVVLVIPICVYEFAVDPVRRGFFCDDESISYPFQDNTITPVMLGLIVGLLPALVMVVVEYVSHLRAGDISATVDLLGWRVSTWYVELGRQSTYFCFGLLLTFDATEVGKYTIGRLRPHFLAVCQPQIADGSMCSDPVNLHRYMENYDCAGEGFTVEDVRQARLSFPSGHSSLAFYAMIYVALYLQRKITWRGSKLSRHFVQFAVVMVAWYTALSRVMDHWHHWSDVLSGSLLGVAGALITAHYIARMFDDGASNILSGGLRRENTAATLQEEVCPTTPPPYSVNNSFSEDQYCSKV

SEQ ID NO: 14998 - DNA, 49380 bp, DROSOPHILA
ttatctgtttgtttttctccgtattagtttgtaattttcggtttttgctttgttgttgtcgtatgaactaaataacttagcatctagtagaatatttatacaactcaatcgacaaatgtgctgttcggaaagttgtctgttttcatcgcttatcttatagcctagaaccgtaactatgacaatcagtttacttttttaacatacagatacagaccattaatttgcatttattttgttttgaattcgtgttactaggttagaaaagtcttactaactagttttgtttcccaacaaaccgtatcatcctatatcgcattcttcaatttctcgttcttgattttccgttgcggttttgagccaatcgaaagcagtttaaccagctaaaaacattgcgatttacaattgctatagactaaatataattgtttagttctaattgccttagtcggtctcgaatcgtgtggataattgcgtgtttaagtgtatgtatacttggattctcctgctggctgactatttgaaaacgtatctattggctttgtgaagcgtttacacaaatctctaacataactagacgtagcgattactgtagttcattaaggttagttgtataaattaaagcatttctttgtaatacaaaaatatagctacaacggaatcgggtagacgcagacgttcaatatatatcgagtgatcggcagatctaaagatagcgattcgggtcgagtatacccgtcagtgtgcatggtagtgtggaacccttcttcgaagaccgccgcttctaggtgctgttaaattgcgctaatctaagctatcgaacgctcggcatgcaactggctctctctagtcatctatgatcagtgaactcactgcttagcctacgagtaattaaattacagttaatagttgacgacgacggcggcgacagccctttaaaatgtgtgtggtgaaccggattatatttaaaatataacagtggattgggcgggcgcccattagcttagtagctagcctcgtgcccggccagaatgtacagatcgtgtccctcctcgctgcccagggagccggtcctcagcagctggctctccaaggccacaaccctgcaaggaattgaagtaacattttactagagagttctaaaaagccagagttaaaggttttcatacttatcgctgcccagcagcctgtaggtgcgactcatgtccttgatctcctgcgtcacctcgccattgcgcaacgactttccctgcatgccgtgcttatggaatgccaaaacgctgtccggtagacaaactgaaatcgattcgcacaatgaagggcatattatctacgaatgcatatccaatcgcttaccaatgctgtccacgttgaaatcaaagttgagctgcgataccatcttcttgtgctgcttgggattgccctgcagggtgaccacctgaatcagattgccgtagcagaccagaatggcgtccttctccacctggtgcacacgcaccaccttcagcaggtcgcgtcgcggcaccatcgtggccatggcgtcatattccaggtcctccgaatggaaccagctggcacctgcaatcacggaattccattatgagcatatcattgactttcaatcactaattgcactcactgttcatgttgatcagctccagcttgaggcagccgttcatggcctttcgcacacccgtacacacaatcgggtactccaactccggcgtgataatcatctcgaatacgggcgtatgtccgttctgaacgcagccatgaccaccaccctgaatgctgatggctggccactcgcactgcttgagcagcataaacttgttcagtggatcgtaccactgcatcaggaaaatgccgctgggtgtcgccccacagagatatttgtatccgttatacggattccgtgtgacacagcactgtgtgcagcactttgtgtccggcaccttggtggtgagagcgaacttgcgcggcaccagtcgctccgggatcttgttcatgtgcagcgagaagcgtaccgtctgcttggagtgcagggccaccaggtcgtgcctgtagagctggcaggattttcctgaaaaatggattgcattgggttatgtacaagttaatcctataatgcaagaatcgtgtacccacctgacaaactcatgagcacatccttgatgacatacaaccaggtggtgcggcgcgggaacaactgatcgatggccgcgtcatgcagttcgttcatgttgaggttgtagatgccctcctcggcgccgatcagcagatgctggtcccgcgtctccggatgaatccacgaggcggtgcagtggacgcgcagtgggcaaccgttgaagatcttggagaagcaggcgcccatgtgcaccttgggtgtgggcggcagtccgttggagatgggtcgaggtggcgtgtgacggcgtttgtgggagcgcttcggtggtaccggtggggtgttgttcagcagatccggttgcgcctccttctccgctgttttttatagagagaattataattaatttacgtttatattgggcatttcacatgcactcaccttcgtcatcgtcctgggtgccaccatcgctcaggctgcgtgtcctcggagacttgcccatgttctcgagcaacccaatcagctgatccatggagctatggcgtcgaggcgagtcctccagaccattctggaaattaatatacaagtttgttaatacctgaaccccatttgatgggttatatttcctcacctggttgttctcatgccggtaatcacagttattgcccgccgagctcgatcccgctggcgtttcaccagagctgcttctcagcaggttctggtagagatgcgaagagttgctcgacgagggtccatcgttatccctggatccggtcgctcccgcaccggaattcgccgttgggctattggaatgcgagaagccatcgccggccgactttgttgccgcttggggaagagcatctagctcgtgcttatccaggaggccattggtgccacttgatgctcctccgctgctgcttatgttgctgctgccgcctccgttaccgcctacgactgcatcgccgctggaattatcgaggagtaggaggcgattataaaacgaagctgatgacgcagaggacgagatgctggatgtgatcggcgcatggccatggccgttgttcgaattcgaattggagttaacgtgcggatgtgccgcctgcgatgcctgagccgcggcggcggatcggtagttgctgctgtaacgcagatagtgcgccgcagaggcggagcatccggatccggaaccgttgccagcaccggatccgttcccaggaacggcggcagcagcattattcatggccacatcggcagccaccagttcatcgtcgtcggcatcgatgctggtggtgcgcaggttggacatgccgagacccatgccaaatcccatacccatgtggccaaccacatgggagcgcatgcccaggtaggcactgagacctggcatggaggccagcgaggcggacgagctgatgttgttggcattggcggtcaccaagccgctggatatggacgaggtcattggatggtggtgatggtgttcctgctgtgccgcctgatgtgactgctgctgctgctgttgcggcaattgatgggactgatgctgatgcagatgattcggatggtggtgatgctggtggtgctgttggtgctgatgatgagtggtgccgactgttgcgcctccgctgctgctgctgctgccgttcgcggctgctccgcctgctcctactccaactcctcctcctcctcctcctccggcggctcctccattgtgggaggagcagctgcactcggcgccgagtggatctttggtgtcgttgttcagtggcaaggtcgctctgcggagcgtttcagacaagcggagggattcgatagatcaagagaagagaggcgagagagagaaaagagagccgagatgttgagcttccttcttcgatcggttagataaacactatatatatagctatatagcttttcgatatcttgttgttcgggggggttggtgagatcgtgattgggtgggttccggtggttctgttgtggtggttgagttcgagttcgagtttcatgtaacggaggaggcaggaggagctgacccccggctcatcctgactggcatgcaattggggtaccttatttgtgtttgtgtgtctttttgtggcatgcaatcgaattgataaactcccgatgggcaaaaccgcaagggtggcagtagagtgttaagcggattacacttttaatgaaattattcgccacccgcgagggttaagcccacttattggtgtcctagttggtagttgtttttttttttttattggacgcaagttaaataaataaataaatgaactaatatgaagccataaattatgcatgagatgcaaaacacaaatgctcaaagatacacaaaacacatcgcaacacattcacaatcacacacacacgcaaatgaaaatggaaaatgcttgaatagaacattgcctcgcacatgaatgcatagaaacagaaagagcatgggaagcaaacacaaacaataaacaaaaaaatagcagcaaaaaatttacaaaaaaaaaaaaaaaaacaaggaagagaattacaaaaaaagcatggaaaattaattctaaaaacaaaatgccaggaatgttggccaaataaaacaagtcggaatcaagcaaaaacaaacagaatttgctggaaaatctcaacagctgcttgcgatgagggcaagacaaaaagttggcccaaggaatcccattttccatttgccgaattagtttgctgaattttcagttgatgttagcataattgcaatttgttttccatcgtcttgtttccgaaggccaaaaacagcttagacccctcgaaatctcctcaatcactgcgatggccaataatgctgcatatttcagaggattttgggtcctacgttggacaaatcaacactggacgaccacgactacgtgtggcattactggctagcaccgaaaccttagctgtccaataataataataacaataaaagcaatgcgacggccatttgcacacacatcaaataaataaacaataaacatgggaaaaagggtccagaggctggacaaatcgagcgcttttcatggcgacccatcgatgtataaattctcccttaaaaaaaaaaaaaatataaaccaattgttccgtataaattagttgagaactgcttttctggttttgcgattgagccataattgagccatcgaaggggtcatttcgggcgtcccacggtgcgtatgctcaacgtgcgtttttctatctcacttggttattttatatttgctctcttcctctctctctatatatattttacgaaattcctcgcatttccccatggctttccatcgatagacaaaggcaaaagtttaggcggaataagaggcaaaagtgaacaaagcctcgcccagacaataaccgacaaaacaaagaagttggccaaacaaagaatgcgagagcaccaagaagaactaacttataagatggacgatggaggaacagcaaccgtaacttaatacggtttaaatggacgcagaacgagccgaaaaaaaggaacgtaatgaaaatgtagcataatttttgtttttttttttttggctctataactaaatatgtatatgggatgggcaggcagatggccggtaataaaccaaggtggccacaagatgagctgctgctcctggttcataatgataatgatgcagcagctctggcggtgaggattttgcgtgtgtgtgggtgcggtttggcatctgacggctgccaggatggcaaacactaatttgcatgtgtgtgcatacatgtgagaaggtggcgcagaagaaccaaaacataacgtattccctcagtgagataaacttaatgctatatcaaagtcaaatgtggaatttgtgaagagaaagaaaagcctttcaattatctgcgaaatcttgcgtgaaaatatggtggagttacaaataaccaacttaaatatgtcttaaagtagatagatctaatgtaagatttttttttaattattcagttaagtaatgattatagattgcattttaaattcgcagtctgaatatcaaaatcattgatttgttatcataactagttatagctttcagtgtataggtgggagtgcttatgagtgtaaaatatgagaaatgatggggttagtgtgggtcagctagatctatgtgggaagtgtgcttttgtttaaggagcgggacacaccgagagccgaggctcgagtctaaaggaatacattggtaggtgggtgtagttaccttagcttcagctcctcatcaatatattgtaagaggctcctacaaaaatcaaatacaaaaacaaagatacgaaaaaaaaggaaaaataaaataaacagaaaatttcattgtgtttagtttgacataagaaagaagtggaacaaaatacaaaagtaggaaaagtaacaaagttagtttcgaaaaattattcgtcaggcccaaatagaaaactaaagctactttcagatcacagcgaaagttataataatctcaagaacttgtaaattgtcagagtgtgttgtaaatggggttttattttgtgtgtatgtgtgtgtgcgtgttaaatttaaatcattatcctttaaggtccgcaacaaagacatttcctaattcgattaagtcgctggaggcatgacaaacagtcctaacgcccaattaaacgcatcagctaatttgccatgttcataattctgcctaatgtcatctggcgcagcccatttctccacttaaaaagcagccccataaacgggatattaaaaatgtggcatttcttgcctcattttctaccatcataatcttttcccgctgccgcctaggcaattaataattttcccttttttgtttgagcccttcgccgcaaaaataaaacaaaacaaagcaaaaaaacaaaataaattcctgttatactttctgcttatgacggtttaaatgaaattaaccagaaggaaaggcgtaagacgagccgccagcttttgaaaacttttcgggcgccacaaagcaagcggatgtgggcgtagttctggggggggggagggggcgtggcacttagccagcaagtcgcttgtaagtagcgctcagtacattgaaattggcgcagccgtttttatggcttcaataaaattgggcatcagcatcgaaagtgggcttccttacgaggagctaccaaaatgaggaggagacccttttgtagccgccatcgcatgcatatagacagagtgacttggctttgttgtctgcgacgccactcgaacggcggctgccgcaaagtgtttgccacataactcaaatcgagcacttccagactcccgttttccgacccaccatgcgacccaccatcatatcggcggagggcttattaaacgtgccactcccccttcatcggcggccaacaatgtgtaatcgtttaaaatgacaaatggcgcctcattcgtctagtacactaagaaaaaggcattttacgaaaattgtatgctaagtcgttcactaaaactaagattatataaacgacaatttaaagagcctgttcctgcattcaacttaaggtaaactttagccaatttatgaagttctgagatctacttttcctagccagcattgttctcactgcacttgacatattgaagctgcagttgcgtgccaactcggcgtatgcttgatgtgccatccatctatcctccgcttttcccgctccagttagctgttgcgttaattgatttcttggaaacttttgcctgctccccagaacctgccactcactgctcacagctagtttcaagtgctgccatctatctgtagctgtagccccaatttttcataggatttttcttgcaagtttcttgttttccggagccacgttgatccggggagctgaaggctgcttattattattatgttgcaggatacttggcagggagggttttttttttacgccccgacgtaattacttctggctggcaattaaatagcccacaagtttgaagcgcccgcctggggaatcgtggaagccaggttgcaattatacatccaagaatggagtaagggactgggactggtgctgcgattcgccactcgtccgtggagtggatgaaaaatgcacaagttaggaattttccggggcagagacacgtagctgcaactaagcgcaagcgtgtgtagcagccatatacacatgaaaatgcagcagcatttcagcaaaaatacgaaagtaaacacagctccccagaaacgtgcaagtaaaaaaaaaaaaaaatggactgtgccacaagcccaaagtttcgagcaaattacacagggcgcgtgctgtggccttaagtttccatttgggccagcataaaaagcgcaacatgcaatgccgttcggaatatagcccctttattttggctaaccttaaggacatgttcataatcagggtgccgctcaatttcggttttgatcgctcggcgctgggactacaagtacacaaaagagaaaaacgtagaaatgtctatagaattgtttaactaatggcatggccaatggttcgcctgatgcaaccacacgctgtgtgggaaaacttccatatggatctgggtgattttaaagctggtgaatccacaggcagcatttacaagcatacaagtgtaaagtgtgtgtattatgtacatagtgaagtgtgtttgtttctgttttcgttgtgtgaaatagtgtgtgtgaactgaaaccgaagtaccaaaactgaagcggatctaacccgtttcgcaagtaagaaaaaccatagacaaaactgtagcataggtccaggcaaatcggaggaaaaaaaaacagtaggaatagggttcgtcggcacttacatgtcactgggtaacgtttcgggactagaagatcgctcattccacgtggagttcgtcgtcatgcctttgtgtgggagaaaaaaaatatagaaatttgaaaatttgaattattttcataatagtataataatcatagaacttgagaatctgtaagctgcattgcgaaaatgtattacaaagctttccaaagcaatacacgtagtgacgaggcgcaccgcataaatctttcacaaacaaacaacacatttctcaagagctatgaaactataaacgaatcttcaagtttaaagctcaatagctgtaataaaattctatttcctgatttttgcagatttcacctataaactcacctgtttttagtgtgtgattttgcgctggcacgccattggtgcgtgacgtcattttgctggcaatgcgttgtggcactcctgccacagactgaaaaatgaaaaaaaaaaaaaacaaacaaaatggtaaagaaaactttataactcatacttcgaggaatggaccttcaccaacgtcgtcactcatttggcgacaaaaattttctggctgcgataaaatctcataaatcaaagtcatattggggatttttgagcgtgatgcgttacttctttttcgcagcaaagtaagcgagctaagtaaaatttgaatatcgaaggccagggaaacttatttgccaccggctgctaaaagtttgccaaaacatccaaacaaattgaagatttatgacttgtaaggcagccatgaaaatgtctttaaaattggctgcccctgctggtgaagcgattaaacttaaattcgatttcacatttgcaagtgtcgttaaataagcttagggaccaacagtctagacagctgcattagtttcgaccgactttggtggccaattaattaggtcgagagcagcaggagccagaagcaaaaggcccccaaaagtgtctaatggcgcactaaatcgttgaccaatcccgaaacgcagcagagctaaagaattcctagagttcttagctttagcttggttttcccaactttcctctggcttttccgctttgccccactaaaagcgtaaataaattaaaggcaaaaggtgccaagtggctgctgccatccccagacttatctgaccccatttctggccagcactcacctcctcatcgccatcgagatagtagtagaactgcgggttgggactctggtacttctgcagcagctccttggccacccgcaaggacatctcgcactggacgaagggatgctgcagcaggcgctcggcggtgggtcgcttcttcggattcttcgtcagcgccgtcttgatgaagttgtggaacgtggggctccacttgtccttgttgttcagagtgggcggcttaaagccgctcttcgacatcaggaatagggcgcgcatcgggtgcaaatcgaacatcggcggttgcagttcagccagttctgttttttaatggtggacaggaaaatatgaaagtactaacgattatctaccgctaataaaagcaattgtcaattgaattttgagtattttggaatttaaagtaaaccaaatactactttattattcatttactatctaaactacttaaatgaaatttggaaattcagcatattacatcgttttattatttaacattaaatattctgcaataaattcactcaccgattgcggttatgccgcaggcccaaatatcacatagttgattatagccacccttgcgttccacggctgccacctcaggagccatccagtagggcgtacctaaaataattaaaatatatatatacatatatatgagttaaaaaactgattatattaatatccaggctatcgatacccatatggttttgctgcctcagctaattatgcaacattcacacatttaatttcattgccgtcgattatgttggtctcatttattcattgtgccgcgcaaagcgcttttatttaatttaattagagttttttatgcgacaatgtgacaattgtgcaaataaacaaattgctgaattatgcagagcgtggtaatcaaagccggttgggtggaaatggcatttgcgacacattttgctcttcatttcgggcgcacgttttatgatcgcaacaaggagtggagctaatgcgtccattactcatacgccatgttgcagccaggcaacaattttgccgcgccagcagcagcagcagcagcagcatagtaacagcatctgctggagtagtttccttggatggatggcagtcacgagaaaattaattttcctctcacttgacaagtggatgagtggaagtcgtcgtggcagttaattgtattttcaatttaattaaaccacaacgaaggtggaaaatcaggtttgatgccggctctttgataccttggccaagtttaagttacggttttcggtttccccaggggaaaaccccaacgccctctcctccagcatcacctcgtcatcatcattgtttccgctcttgtttgagcttcgatccggcaaagtgatgcggaatcgaaaggctgaattgaaagcagtgaagcaatgcgaattccctgaactgaactttcgcatgcattttaattaaaggccaacacaaacaagtgcaaacacacacacagaaaaactgatacaaaagaacacacacacagtgagtggaaagcaattttatccacaaagtgacagcaacaacagccagtcaagtatcattttgttaattgctgaaaaaaggagcaaaaaaacggaaaaaatcgtcctggcattaaaggagacagcagctgaattaaatgtcaaaaaaacaaaaaaaaaaaaacaaacggtggcaggcttttacacacacacattcgcatattcatgtttatggcataactgcggctgaatgagcgaagtgggcggaaaatggatgggaaatgggtgggcggcacggctcagggccaccgaagtggaagtttctgctcatcgtgtgttgccattgacttgttaatgacactaaacacaagcgtaagcacctttttattgaataataaaagaggcaggctgtcgccaccaccgttttttctcttctcgttccatcttcctgcctgctccaactcctttttcatctcagttgtttgtttatcttggctacaaggacgaagattcactaagaaaataaaacatggccttaatggtgacgacttcttggtgcagtatcaactctttaagataatgctcggaataataaaatattgactactactcggctctaaaaacaagcatagaataaaggattcgagtgttgtgcatttatttatgtttagcaggtcactcttatcctgtacatttttctcagtgtgtcgcctcaaaatatgcaaccttaaagtggttgaatatctgccattgtaacaatcgatagaagctcagcaattgacttatgtgcatatgcatggagtacaaacgattcgttgttgacctcggcctcctatgcagacattgtggatggggatataaaagagcgtggtgagcgtgtgggtgtgtacttatcaccgcatttgtcacagcagtcgtcacaacatctgaaatggcaacaactacatagacacaatggcattgtggagctggagtgaagagcactcggaatgataacagtaagcggacgtcacattgtttgacagcttcacacaaacaggggaagatagtcccaaacaatcgaccacctaaccacccacccacccattcgaatcgctgtcactaacactgcacactctgccacattgacatgccacaaaagatgctcgctcagctcgaaaacgtcatgaaaatgcagccaaaagtggcaacaaagagccaaaaggaaacaaaggatcctggcaacctcaaggtcgttaaacttgaagagttgagttgcctcccgcctttggttttgtctgtatgtatgtgtgtatatagtgcgtactttttgttggcatttttcgttgcacaaattgcaggccattaatcacatgcactgccaaccaactgcggacttgtccattcaaataaatctggaatcaaattagcgctgcgggagcttgctttatggcagctttacgcttttacgacgaactcaaaggacaaaagtcggcattaaaaattaaactgctttgtcgtagtaggataaaatccaatttggcgtaaatgaaatcaaatcaaatgacggtttttatgatgcgccttcttcaacgccatctattcactgcgaaaatgtcatgaactttaacttggtttagattttattagcgccaggactcatggctcttttcttattcgaactgaaggacatgaactgagtgaagtgagtgaagagccagctgtcataacttaattagctggcgagtgtcaacggcccgatgaagggttgtgcgaattttaattaagtgcagagcgaaaggcatttcaaataattaattgtgcgcggacagtgggttgtggcacttctgggtagcttaactgatggccacgcgtaaccgcaaaatctcatttgcaatgtcttgaaagttgaaagtccctgtgatgacgagcgaaaaaatgttggctcatgcaaatcatcgctgcttcgttcgtctgttcgtccttagattgcaagttgtcatgacaaactacagccccttgcaggccaccaccaccatttttaagtcgcacatggcatgtgactgataagttcctatttacattcaaattgcgtatacgccacgttgctccggcatcatcgccttaaagcccttggcaagaattttatattagatagcatggtgagggaaaatacataaaaaaaaaaggattgaggattccttaaacaattttgtatcactatttgcataaatatctttatttatgttcctataaagtctttcatagctgctatctaaccatttttaatatttttacgtgtatctccttttaaaaatatcttcactgatattgagaaagcagcttaacgctgctcattgtagcagaaaagctgcaggaaagctgaattctattagtggcgaaaatacttagctaaagtggaagaagggaaaggttaaatgcgactttgaagcctgaacagcccacaaaagatgtagccaccgaactaagacgtcggactctccaattgggatatttttcacaaattatttgcttttgtgcttcagtttgagacgttgacaacaaagttgggcggaaaactccctccttttcttttccccactcaggatggcaaacaatgagccagactggccacctgctggtcagtaagtctctcccagccttttgctttttgtatattttttttatacgtcgcctgcatttgaaatattcttcaaattgaattgttccctttggaaccgccgccatcgttttttgattatatttgagaattccgtgcaggagccattataatgctactcctaattgaattgcattcaattgaagattccattcagggaatggaccgcatttccaagtggttgtgaaatggaaccactcggacgtatacttgattttccctgccgtgtctaattttcatctttccttcctgtgttattttctgttatttgtgctttgtcatttctgacagctgctccatgggtgagaaacgttgagaagcgttaaacgcaattgttgctcctgtcaggacactttcctcgcatttttctgctttgatgcttcggtttgcttgccacaaaatagcatttcataatgataaacactttgtgtgggaggacaccttgccccgcctttaaatctgactttgtcgacgaaagtccttaatgccaactaatattgcagatgtctcttctgctaaatgttgtgctgaacaatcattttcttaatatatttttacgtaaaatcaattgctcatacttgcataataactgaccaccgaaaatgttataaggatgatattcactcacctatgaagctcttgcgtttgttaattgtggccgtgatctgagctgaaacgccgaaatccgccagcttgacatcgccgtactccgtcaacaggatatttgcgcccttgatgtcccggtgcatttttcccatggagtgcaggtactcgagtcccttgagagtctctcggcacatgtacgcgatctggacttcggtgaggggaccggtcacttggtaaatgtcctgcagactgccaccaccacaaaactccatgcagatccagagtttatccctgcgcaggtacgaaccgtagtaggcgatgatgttcggatggcggcagtccctcatcatgataatctcctgctggataatctgtatatcgtcggaaggctccagcttgatgaccttgatggcagccagctcattgctctgtattcgtttcgcctgcaagaaatcagagagattgccttgaatcaataccgatggttctcaaaaagtcaatgaaaatatggagattatgtggtggctttttgagcgccgctggcggggatggaatttttgattggctgcacacctgcagcatctggggcatcgcctctctgttcatcttcattcatgcaaatattcctgctcgttttcaataaattttttggcgcgcgctcttgcacataaaaatgcattgtaaccacttcacaatttccccacccccagccatcgaacagccaatggtccatattatttgcatagaacaatcgcctgcaggttgcaggttcatcccacccaaaatctcttctcccacccaattccattcccattggcaaaaccatatcatcgtcggcgtcatcaagtggaaatctgcaagtgcctgcaaggaatattaaaaggttgccaggcaagacggctgagttaaatcggttttatgttccctcctcactgttaggcaatgaataattgtgcaaaaataataataataacgcggaatagcagaattattaaaataaaatccaaaaatacacaaaggtacacctgtaaagtgtaatttgtacaggaaaacgaaagaattctttttcaaaagtgtgtatctgagaatttaatagccccacataatgcatatataaattacaaatttgcaatagaagataaaagtgaaataaattgggtgattcatcatttaagataaatagacattttcaagggaatttatcattttttttttttaataaaagatgaattggatacaggttcttatgcatttttgtagtctttaatacatgattttcagtaaaattttaaaagtttttagtactattcatccgattattaggcccaaacgtactattttggccagaaagtgaccgctgcgaccagtagattccatttaagactggcttttcgcttcgaaggctcgctgcaataatttcgccacggttcgcttcgtttgcgttgaaccaagttggggtaggaggcagtaagggggtagtggggggggggcaggtccttcgaggacatgaagttgaagcagcgcacagactgagtaagagatacacccacgcagggacaacaatgcatgtggtatccactttcagcccttcacctgccatccggctacctttatccttgacgtccgtgtgcctgtgtacgtgtacacgattccaccatttatccctgcgtcatgtactttatacgcccacgccactttctcctcccttcgccatctcctctcgccccactttgtgctttctccgcctttcctccttcgcagagctcttatttttattttcgttgcatttattattcaatgcggtagctccagctcacttgtttgtcttccccgtgcaaaagtgtctgtgtatgtgtgtgttattttttttttttttttgcaatgatatcttgctcgacttaatgaagataaagcgatttttattgcactgcagcagcttcaatcgagtttagtttttgtttatttttgctttgcttttttttcgcagctgattgcttgtccttgcttttctgtacctcgttttccatttactcgtcctgcagcagcattgttgcatttttgatgtttttattgcaatctgggctggcttccaaaatgctatgccatactttatcgcagcaggtcctccatatcctgccgccctccacagtctctgtctgtgtggcattcccttctatgtctgatttttcccattccagttgacaggcggccatcgtcggcttttcttgttactcatcttgtttatggtaaataaattatgcgtgatttttagacaagttccctgcggctgccggagcacaaagatgaaaatgaaatgtgttgaggcagcagcagcaagctggaaatgggaaaaggggagtggcggaaaactgtcccgccccaaaatccgtttcccctccctcttcccatcaaccccacagctgtggtaagcataaaaagctgctgatatgcacaagccaaaaagggaaaggagctgctgcttctgggcttctgcttcgatggctcgaaaggaagcgagcacagcacatcctgccatcctgccatcctgctatccaactattctgccattctaccatcctgccattcgtggagcccaagatgcagatatgcagcatcaacaaatttataatgagctgcgccaacgtcaacgtcttcgccaacattttcgcaggatttgttcggcgcaaagtgcagtgctgcagcacttcaaaagtcatggcaaacaaacttttaatgacttatttcgggttcagttacacgagtgaagcggcgattgattccggcaacacttgacgtatttattttaattaaatttgcaataaatcattgtccgaggctcgttaaggagtcatttcaatacggtaattattatggaaatatgcgaggggaagagcaaatttgccccgtaatgtatgctacacttttcacgcaaaccgagatgtaagcaatcaatgaggatcatcagtggatgggtggttggcaagttgggcggttgcatggctacgccatttcctgtgtatgtgtgcgtgtgtgtccggcatgtaatcgttacaatttccgacatatgctcatatgcatgagcaggccagcagtacccaggagcagcatatccttccttctgcctcttcgctccttcctttgcggctttttgcattgggcaaaaaaagggtttacttctccacggcattctcccttccgcttttcgccctacttttcacattatgtccgtaatggatattacgcgttaagccggaatttttcatcctgcattgtttgctaattgcatgggccgacgaaaaagtgtaatgtttataaagaaccccgaactcaacatgtccattcattcagaatctcattttcttcgcaattatgattaccctataatattattaaattaaataatctgttttacatacataccaatcatgtgtaataaataatatggacccataagccatcgatttaatttgtattaaatatatgcattaagatatatttatattcttattcacgaaaggcattgaatgctattgtaaatacagaatagtaaatggtagaattatgtataaataaaggggacttcgtaggactttctttattgtttaaaaatttatatatttttggttacttatactcaaccatatatgctcggttttaaaaaggacaaaaaaggccgtaatactggatgtttactgtgcgccgtgcaaaaggtgggtcattggccactggacacgcaggcttaatttcatttcagggctttcacgttgaaattaatttagcggaccaaaatgaaaagagcttaaaattgtacagctcaaaattgtgcacgtttctgtcgccgccccctttcgacctcattcatttgttttgcatttgacggaaataatttatgatttaattcgagaaaaggtcgcgcgctgctgccagccccaaattgcgatcttaattcaatttgaacggaaatttaaatgcactttgttcttgctcacgtacaattgaaattgaattacgttattgatcggccatctcagtcccaaaatttcacactcctctataaacgaacacttgatgccggacggagcacttgagagacttttttttcgagcgactcagatagcttaaattagccactcgagtttatcgatgagccgcaatttcccagcaattttcacgcaatgccaagagcacaaaacaaaaaaaattggatagcccggggaatatctcaagtggctctggtgttctctgggtcattgccaagggacaacgctggtatctcgtcgagcgtttaccagcccgccgggaaatgcgaaccagccgcaggcggtacaataaaaatgggcgggaaattgaacaaatttgtcactcggcgagacaatgggctaatggttcaagggctgaccaaaaaatatgcggcaatcaatcaatcaaaatgcccaatccatattggatgagcatccgcagtatatgtgtgcttgaaacgataagcgaaactacacaggaaacaatataagtatctatcatcaagtcgtagaaagaactaagtactttataggaaagttacttcaacaaaacttatagccagcctttttcgtatgaaagtcgaaatctcactgaagctacattctttagtttttgcaataatttaaacaaataatacaatattagattctgtataatattttatgaatattgtgtgtacataaattcaacgagattaacacattttcgcatatatgtttgtttctgaagtctcgactcttcatttactcgatttcagactaactatgttcgttttgcgcataaatctgtttccacagaattcggttatttgttccagggcctatcccaactgattcaacattgcgagcaataaaaataaaattgtgcaatattttcatgcagcgcacaaaattcagtgtttggcagtggcacgcccacttcaacgcctctgcccacgccaaatatagaacagtgttttttttttgtttttttttttgccatcctctttttgtttcgttttctttcgcagcttatttgggaaaagcttctttcactgatgttttctgttttccgatttcggctccccatttgccacatgtacgtacgagtactttccgccgcaaatatttgccatttttcgctgtcggttttgtcggttaatgcgggcattatgtcagctttccaaattgtttattcgcgcatttcgaatggagtgggctgtgctccaaacctcccctttaaaccccccctttaaaaccacccacatacccctagctgggtggtaatgaaccacaagttctttgtgcggcatttgaaccccgcatgaacctccggaatgcatgtgcaaaaaaaaatgcagctaaatatgcctttggtttaattgcgagataatcccacattcggacttctgtttagcatgccgccatgaaatatgcaaactcttatcgccgacactcaataaacagttaaaaaccacgcagagcggaaaatgaaacgaaaatatgctgggaaaacgatggacctgatgtgggtgggtggctggtcgggctggtctccgcctgctgccatgcgataatgtgtataatgagcggtacacttaaacgaggcgccagataaaaacgagtcaaatatgacgcagaaaaccagacactgaaaagagacagacgacgcgcgaaaaggggagacagaaggtgaggtctgcagacagacaacaaagataaaattggaggcaacaaaaaaaaaatgaagagcggaaggggggcaaatggggcgacacaggaacaaaattgccagagtagtaatgagcaaaatgtccagttaacccccgtttagtcgagtgctttgaaccctttggctgggtcattagcaagggtgtagcccatccccaccaccctctttttaaccacccacacacatgcttttgtctctgcacatcacccacgtgacttggcgttattagatccattattgtttatgatttgcatgtgagcagccaaccaaatgggaaaatggcgagcagacgcagctgccatatttattttccacttaaaggcttagagacaggcgttttctttttcgtgatactaaaaggacacatgcacaataattgcattgtttcatgagtaattttgtcattacattgaattcctttcaaataacaaacacaattatttaaaaaaaaaaaccataagcatgtgactaatactaataatagcatgatgatatttattttaagctttaaacattcaaatgtatgtctttcttattaaataaaaaaatcaaaatatgcaagtattaaatttattttagtgcagacagtgggtcacgtagaaccaacaatgtagtttttaatggcgaaatggcttttcactgcaacgaaatgtaactgactcgaacatgagttttccattcagtcacatgcaagtccttcgaactgttgtcctggtcagtgggacaatctgtgcaccaccccccgctacccttgccccttaacccatgcacgcccctggctgtgctccactttgagcgtctcttgattaaccgtttcacagttattaatggcttctacagtcggcgtctgttttccttttttttgcacatctacagctcgtttacagtgtgttttgtgtttatgtgtttatgtgtcacatgctgtacatctgccttctcacttccacactcgtgcagcagcagcagttcaaacaactttggtttgcttaaagcggttccctcatttttacgctgccattttgttggtattcactatgctgacccaccgcaagcgtatgtgcacagaaacaaaaaaatcgaccgtaatgcgatttaaacatggatatttaagtactaaaagaaatgtttagttaatcgaatctatagcaattccgggaagagcatatattgcagctttcatgatttttgcattttacagctagctctttgcaatttgtattatttttcttgcagtgcatctactttgtatctccgtcagttctccacccgccacgtccagctcgtgctatttgcttttaatttccaccgttttctgcacatcattcgcgacgacctcatcgccaccgccatccatctctaccattcaccattagagccggggcatctgggtgcccatctttgaactggtgggcgtctcaatctcgtatattagggctaatattccgctgcgtttgccgctgtcggacggaatgtttgtttggctcgcgtcggtcagcaggttcaaaattagcgctttaatttcatttcgagagctttgctcataaatttcaataaatgcctgagctgagttcattcaatgggtgggcgaaagagaggcacgaagaccctcttacccggtcattgagtctacgggcagagaaaatgctaattgaaaatacaatatcatttaaatttaaattagttctcgaacaaggtcgaaaatgccactcacgaggggaggtaaaacttttatcgccactcaggtgaaggtcagaaagggaaaacccatcatcatcatcatcgtcatcatccaatgtttctctgtatctattgcacttgtcataacacaggcacatcacgtatacgacgagtatacggttgccagcgagcaaaacctttttgccattttacgcccacttgcacctgccgttagttatcagaataaaagtttatcattgcccagaccgccccaacggtggcgccacaaaatttttaacgaactggtttatgcatgagctacttttgtcgtccaacattatgcattgacaacatgtggggaggcatttgggttgtaggccgacaaccttaaccgacatatgcggaaggtacacagggaaaaatgaatattaaatcggtcatccattgggatgatcatatatcatatatcataatcatagaatacttaacgcttgcagtgcactttactttcacaaactgttagtcttcactttacttaagcattgaatgaaaggcctgccagaagaatcctcgcattccttgcttacaacaagtaactgataatattatttatttgcataataatattattatctccattctaggccagcatataagctcgtcttagttttgcccaagtaaatatgaaaccgtgtcattcctcaccactcaagtgtttccgttttcgttttctggttttcaagaggatttttgtgttttctttgcctttttttcttgaagcatgttcactcacctttcaactcgctgcataaatgcatgagcttcgtgggattctgcggatgggtatgggctaggatgcccaaagtgaacccttcacctgcacctcattaagtcagtcagtcaaagttgtcgcacattttgcattcagctaaactaatttgctctggtcgagtgccacgccccccccctgtgtcaactctctagtgtgacacctcaagcacatacacacacacacacataaacttacacccctggggagaaaacacaagaaactttacaggtgacagccgactcgggaaggagaagaagaagctgcttggccaggacgatagttaaaacagattcaagtggctcagttttgttgcatgaattaaagtttgcccttctccgctgcgccacgcccccttcatctggtaagctaagtgttgccggcttttaggcgacgtcccgtcggatgtccgtttctatagcgaattcgtgttgcgactgcaaattaagcgttgggggcacagagaaagtagaaatggaggtggggttcacagcgaaatgcgacgcaaaataacacttttttttttattgcagttgaaagggcttagagatccgccttcactagctttttgtagcatcctcctcgccactggaaattcctatccatttctctcctgctttacgaccaactggttcgatggtacaacgtggcgtatgattcatttttgcatgtgtttcgattttcaaagggtggtatcatggggggaggggggcataaaagggtggcgagtacaaatttccttttttgctgtcgttatggcgcgggccataaaagaaaaatcgctggcgtatttaaaatggaagccaaacgtaaaatggatgattagctgtgcgaaaattcatttggccataaaaagcgttcactgaactcgggcttgaagaattcgcatttcagaaaaaattataataaatatctgtgcataatgaattttaaattgtaattgaacatatttattaaatgatttcatttgtagcagcattcggtttatacgctttaatagaaaaatattgtttgattttaaaggcaaaagtttcttttgcgaacaaaaattaattaccataattgtattgagtaaatatgttatcaattaatgaaaacgtactcttgtcttaatagaacaataggttacaacggaatataatttaaatgggtaaaggcaacttgcgatttattaagcatttagtaatttggtttagtttgtattatggtaaatctaaggagcattaaggacccttgattcttggaacccatcgacgcaatttcctgtttcaaatctttgggtaagccccaatccctaagcttttggctccatttggcagcgtccagcttcaattagtcggcaaattagactacggcaggcaagggacaaatgaaattgctgacctcaaatcctggccacgcacgcaacaatccaagaggctgcaggatatgggcgaggattaggactgagcctgggcccagactgaaatcgatgccaagaaatgtgcgtgggaaatggcaatagatggagagacttaaaggaacgtacgtgtgtgtgtgtctgtttggccagaagctatttcttgttttttggatttcctgcctttgaaccgccggctttccttatgcccaatgccaggcttagtacaacgatctgactggcatatggccaaggagcacggtcacgatcccgcaggataatcatgtaaattaaattatgcttttcccatgcatattaaactacaaatcgcacgaggattacgccgccaagcgaaatccaactggtgcacaaaataaatgtgtcctcccacaagaaggtcgacgacttaggagccaacaacaagcactctaatgaaaatgctttagcgagagctcttgggggtttccaccgccctcgtcaacttgttagccccactggcagcgccatcttttgtcatgacgttgatggaattaaaataatttctcttggcaattttcctcgttttccttgcgttcacctttcctagctaaattgtggcttttccgtctgccgcggcacctgagtgtctgtgcttaacccactctcgtcgcccgttcaccttaacccgccgcagtgccgcagattccacgcccattttcctgattcaacaaactatcagctgcgattgaacgacttggtgatggtgatgaggttgtgacagcgaatttgtgacactgtcgcatgcttctggattgcaatacacaggacgaaatagaggtatgtgaggaaactccaacttaaatgtgcatattaaatcaaataatttaaaaggactaacaaaattcctttaattacggttaataatattaacactggttttcattttcattgctctcttttttatttgccatgtgcactatatctgtttgctagtggcgtggctgaaaatagcgcggaatggcaacaataatgtgaacgggaaaaccgggaagcggactaaaaacagccagcgatgcgtttgcggtcagctacaaaaatagcaggagaatagcagaatagcaggcagcgggcaaaaagtgacgtcctgggccgactgaaggaattgggtcaactgcaaccgccagttggcagcagctgcggttgcataaactccacgctcccagcccgtccgattgccgttaaagaaggagaaggagctgaaggctggatacgaatttatcacctccattgcataaattgataagcaatttccagcagctgacgcggaggaagcaacttaaatgcaattgccgcacgggtaatacaaaatacgccataaatttccagctaataaagcaaagtgcaaaggggcaggaaactgtgaatcgggtggattgagtagcctgaccaaatgaaatattcatgggctgggggtagctggaccatcggatcgttccacctgatgacagtgtggcggaaatttaatttatttaccccgcccgaccaaccaatcgacagcagccgtgtcgaatgtatcttgcagatacacattgccgctcattgagtgcctgtctggcctattacttatatcttttttttttatcgacgccaatgccaaggcgcaatttgttcgtgttgtaatcatcaatcgctggctgaatggtcagacgagtcaacaccaccaatcaattgctataatcataaatggcttatcaagccaacgagacgagagaggaaatggggaatttgcctggtcgtacgcattgccaatatatatacgtatttcgctcagacattgacacacgcctgactgaatgactgaacttctgaggacactgaagagctgtaagccttggcctcctggtcttcttactcgtgccttccagctgcccatcagcaatctggcgagcattgcaaatgtgttaaagtctcaaggatttcgtgtacttctcggaaaaagcaaagcgagcaacggaaaatctcagccaaagtggaagtggaagacaagacacagctagtttgagtgctgctgcactcgaaagtttgccccataagatattctctttttgcgaagaattgaatttccagttcctccttatttcatttacctgcgaacactttgagctcaaacaaaaaaggctttagtattaaataagtttcaatggaatatttaaaaagtgatgcaagtttatatggaatttacaagtttttgcacactttttggttcgagtgtggctttccctatcatccatccatccatcggtgtgtttgtcattcgcctcaggcgcaatcagtttcaaattttgcgtagtttactttttacatttcaagctgaaaattgaacaaccagcgggggagtcgaggaattgtgtgagaaggggcagaccagcacacacacacaccacacaaccccccccccccctcccaaaggaatttttccgggggaaaactatccggcagtaatcgattgagagagagagagagacactggcggtgaaaggaagtcaaagtcattggcggcactctgcgggagatgtttgtcgtgcacttgcaaatcgaatttatggccaagggactgaaatggatgtgcttcaaggatctccaaggtgctgcgatggcagcaggagcagcatccgcattagccggccctggtgcagctgctcccaaagcgaaacgatatcgtatagcccacatccaacatccgcatcgaagccaatttggttccatcgttttttaaactttcgctaaattgaattttttattacgtaaatattgaagtagctgcgagtcattgtgtgcgcgttactctctcctttctccttcggttatccctatcctactttctcgcatactttctccacctcgcgtttcttagtgtccgacatttgccttttgattttcgcacgaacgcccacgacaaagtgctggcgccaaaaagtatgctataatatttaaagctcacgcaagcaagcgaattctacttgtcgctgcttcttttcttctttgcaagggaatggaatcagtacaaaatgggaaaaatgacatcggggcattaaaagaatcttcattacagttttaatatagtcaatatcaactattacctaaaaaaaaatataattcaagctatgtgcacatcatacttctagaaacctaaatcaattcttttaaagactcatgcctttctttgtaaattagatatgaacttgtgaaaataaaagaattcttaatgactgatatgtattatttttttgtgtgtattttttcctttcgcaactttgtgcgatttttattggccagcaaagcagcaccacagcacgcagctgtgcgatgaataatagaaaaggattgaccaaacacgaataatgtaatagtcgcaaacgtcgaccttgcccatcagatggcagcagttcaattaatcgctagcccggaatacccgcaatattcagcggtttcccgtcgccgtgcaagataaatttatttatttataaatgcgcttatctcgactgtccgacccagagaaatgcctttgatttatgggccagctatttgtttcctttcttctttttttctcacaacaaagaaaaccacacaaatattaaggggtgatggccaaaacgaaagcagcaacattatttttcacacattcgactaggccagtaggtccatttgcgaaagctaaagcccccaattaaatgggaatgcacatcatcagtatcacaaagtattcacgtcattatcgttcccattgatggggccaacggttccatcgatttttatgctgattatatcagcatcatcttgcttgggattttccaaacaattgagccaatattctaattattttcactgctcgcagatttggcacacagaatcaagcgataaaacgcgtgcgaactcaagagcggaaaatgtgaagaggaaaagtggaaagctgaagtgaacaaagcaaacgggagagaaattagtttgtcgacaagagttgattgagattgagttggtttttcgatggagtgccaccatacatacagctcatagcccttcaaaactgaactgaataactgctgaaaagtcatcgttatatgaagagtataacacacactcattcttattcggtttctgattcagattcagattcgctcccatcatgttacgtttactactctattttttgaagagtttgcccagattgctgcacatttcttgcatatttcataacccttttgtgctttggaaaaataatgaattttactcgctattcgccgctgttgttgctgatgtttgagtgcattttagatacgttggccaggccacttttattgttgcttttcgcgattttccaaaaaaggggcgttgggcccccagcgtttgtccctcaattttccatgctccattcccgctcaccaccatttcccattatccgtttgcagtttcctgctgactttgccattgacgctggttgtccccagttgccagcgggaaaattgcaatttaattaagctgctcgactctgctcagtttactatccacgccccggcaaattccccactttaccatgcaatttttcgggtcgcagttcaaataatttcgatcgtcgaatgtgccgcctttgaagtgcacaattaaaagcatactctaaactataaactcgctagaggacagtctggaatggcaacaagtccacttttatgttttcagcttacctgtaacgataggaaaaatggaggaaaatttgattttagttgctttttctcatcgataacttttctaataagctagaggtaatggtttaagggtgaggtcctttttttttttaggtaacatatttgccaaattggcttgaagttggcttaatattattccattatggcaaaacaatttgctcggatttcctcgaatctccttggatttgccagaatttcaacgtatttcttacaaacatttcgcgctgttcatcaagtgtctgaatacgttccccctttttctcatccatcacagcggcgcatacatcgaccttttgcatatttttctcgcttcggtttcaatataaacaaattttatttcatagtccctccactcttggaagaaaaaaaaaataaataaagaaaaacattgaggcacaaccaactgtttgtttacgctgtgcgcattttatttttggatgagtggaagaaaagaatcacaacgtagtacagataaattcttgactctttctacacggtatgtgtttgtacgcatttctcgcattgctcgccatatgttgagcctcaattgattgcgagttccataaatgccatccagacatccatctatccatctccatccatctaaccagacttcaacttcaatgcgaaaagtttcagtgggacattatactaatcgatgctccagggagcagcacttaaaccacttaaaaactttaaattgtcttatcggtcgtcagcagcgatagaaacaaattcagtggacagcaacaaaaactagcctcaatttcaatatacgttcaaataaagggtataaaaggggaaaaaccgaagaaacttgttcgctccaaagtatgcaacacacaaaggggattatcctgtttgtatgttagttagagatgagcacgtgacttgttggccttaagtgttcatgttttgacaaattaatttgaaaactcttacagttaaggtttcatatttagttggaagttagagatattaaaggcaaaataaggacctcagttttcatcggactgtcacctctatcgtgcgtgtctggttttcaaacaattggaaaaattagtgcaaatggccgtgctagacgaacaaaaaacaatctacaaaaaaaaaaacgacagcgaacaatgctgaaaaactcggtttaaaatgaatggacagcgggaattggacagcggaaaactcgcaaaaatgtcatttgaaagtgtccacaaacgggaatacccgccattgtgaaaagccaaccaattttggcgaatagacgatgagtttggggtaaaaaccagctgaaacaaagaaccaacgccaccacagaacagacagaaactgactgagttttccacccgtttccacgtcccttttccactatctcgcaaatgatgacaaatcacacacgcagactcatgtaaataaagttattctgtggcgaaattagaacaacgctgtggaaattgggactaaagtgtcgcacttaattacattgggaccacaatcatcagaagatacaaacgccaacaccactgaaacgattctattgcaactcacaaaataatcagctcctagaacttgtgtactacaagtttttacgccaaaaatgcaataaaaagttttccattgctttcgaatgacaaataaaggataagaatgcagaacgctaatatatctgcaaacttcagataagctgtatctttcgagtactggatgacttcaaaagcattattctatgcatttccaggatccattgttttcttgcaggagttcatcgtccttgccatcaattagagtaggaaaaagtttcaagtcccagccaacaatattctaactacccagaagaagttccgttttcattcctcaattgcacacggagaaaaaaagtttgtattaaaactatgataaaatatgcatgcttgctttaaagggatactaaggatacgtatacttttattaatattattgaaaaggagtagttgtttttttttttaattgcagccctagatctgcacttttttgctctctcttacccaagcaaagggtaatttttctcctctgattggagtagtttaatttaaataatatatacagttttgtgagtataattttctattgctgttcaccttatgcagacgatagtttctgctcctcgggtgcctccattgttattggcatgccgaggagctgggcttgcgtgctaaattaccttcctggccagcaggactcgcgtttcctgttccattttctgctccttgtctggcgggaagcttcgtttgcgttattaatacagttccgttctaacccattttgtgctcgggcacaagaaatagtggcttctccgccatttcattctttatcgattttagcatttcaccgatttttctttgtttcttattttcttttttttttttttaagacacaccctcagtggtcgtaaattatgcaacctagtggtaagcagctcgcatgatgtttttggcccgcagcccagatttacggccaccaactgtccagactggcaattaaaacttacgcttccgcctcggggcgttcgctttgatggccggacggatggtgctccaccaagggccttggatcaggagtcgcatcaatcaaattatacctttgagccggaggaccaactttgccgagccgattttcccaattagcgcgaacagcgtagagtccttgcccgccagcctcttcagccgatgaggccagactgtttgaaatgggcgcaacgaaaagttgcagatttaattaaaacgaatttaaaattcaatgagcgtaactttttttcgctaacacaaaaccgaaatcaaagctgtgctggtccaaattcatgtatgcaatatctttttacacgggaaaatataagatactcaaataaaatgagttgtaataaaaaaagttttttcgcataatatacccgcaactactattaaaatatttgcactaaataaatcagttccaaaccagagatttcgttctttcgcataatgagttttcttagaatcaacagggaaatttgtggcaaattgtggaaaaacgaatcgagggaaggaaaacaaaccagttgaaaaaacagagcggaaacgtcctaaacgaaacgaaaatggaaaagggaaaattacaagaggagtaaattaatttcggcggtaaaggattttccagtcattctctcactcgtcgtcgtctctgtttttggcctttgtgagaggacctggtcagtaaaaggacttcggggctggccacaagctcctgggctccctaattgcccccgaaaagtggaaaggacggggacgggggaaattgcatggcggaaatggaaaatgaagcacaagaagcgaactgtaatgagttcgatgaaaggatctcgcggcgactttttaattgaacccgcttgctcctctctttcttgctcacatggtaactctttgcaatttgtcaacgtttctggtggcaatttccgcctcatgctttgccggcttatgcctttcgatcatcgtgagccttttaaactaattgagttcatgttttattaattggccgactcaaaggagcagtcaaccgggtccagacacgcttttccggctacggctcggtctcgtaaataaacgattagcataggggacacacacgcacgcatgcaacaaaatttgccggagcatcaaaaatgttaggtgaagtggaaagagtctggaaaatcctagtaccacactactagtgaacccgttgacccttaaagctggaatgaagtcgacgagttcccacattaactgttcggcataagggcctttcctggccagcctgcttgtgcaacgcacaattcaattagccaaaactaatcccagtgcccaactctttccagttgccgtttccggtacctatcatctatcatctgtaagccagctccaaaaaggtatcaactctcccgcacacttagcccaattgcaatcatagtacagttgcacactgggcaaaattagtcagaaaatggattataaaaattataaaaatatggtacattatcaaagtacaaagataaaaactttaaattatgtaaaatattttttatctaagctgcacaatttttcttgttgtgcaaagcagtcgtttaattcgttttttttttttttttttttgagttccaaacccaaggtaatagaaaaaaggacaaacatgcagacacacagtcaagtgctgggcaaagtttttgctcctcctggaaaagttttcgagcgaacagctacaaatacaaactgatggccagaatggagccatcaaagcagtccactatccctgctcctttctccgagccattggctttatgcatattatgttttccggcccctcactcttcgcctcttatttgtctgttagcctagttctcattttgttgttttgattctgcccgcctagaaaacattttctacaaattgaatatcatttgcagcagctgtgagcttttcccggcagtttccccttccatctgccctttttcgatgtgctcctaccttccagttttgtgtagcgacctgggaaaatactttaattacttttagtcatcggggtgcgcccacctgctcttggacccgtttaacgcctttcgtttggcaatcaaattgaaaagttcaactgcaaaaagggaccaacactcttttcaatgtcctgcgcgagggataccaactcgaagccccaaaggccgagccgaccacccactccattcaattgagtcgaccgagccggaacgttgtcgaaatattaacaagttgggcacaaatattcaagaggttttgggttgggtggtttcgttgaaggaccctcctcctccatcctgtcgacgttctcccccactgcacttgacaggagacacgtgtaaaaaaaaggtaaccccaagccaggtgtggagtttgggtatgcggtatgcaagggatctcatttgggtgccacttggcctttggcaacatgcatgcgcaggggtgaaaggtccttgtccttgcccgttacatttacatgttcccttcgatggcaaatggtatttgaacatccagaaaatttacgaaattcactctttacactacgaactttgtcactctgaataaattcgacccttttacctcaagatattttcgaaaaattggcacagcaggtgcatgttatggaaaatgcatatacagcatgcgaatcagtgcaacgcatgtgagcaaaaatcaaattgtctgtttacaatgtacgttttgaatgaagtagaaaaaaaaaaacagtaatgaaatatacatgaatttacccaactgtggttaatgcttctctcagaagtttattctgctctctagtattgtttttctttgttatacacacttgaatttactttccggagcagtgcttctaaataaatagatgcagaaagtgtacaaaatacgtttagcataacaaattgaattgaattccccgagcgagtgtcattgatggactaacaaacccacacaagcacacacacacacacacaggaaggataatagaactaggccggaagttgccggcaaagatctgtagtcatcaataaaccataatcagcttagcaaactggacatcaaactgccagggaattacgatgtgacattagcagtgaacaaagagtttgtttcatctctcgacgggccaacgggtcgcattaaagttgcgcatacgcctcgtgtggcatacgcaatgcaattaaggcagggttatataaatggcaaacgttgttttgtcaacatcgtcatttaaacccccccccctcatatcatcgccatggtacacactcccccttaagcatatgctaattttcctgtttgatgcaagctctccagcaagaggtgactcaatagctggggagccagtgaatgagcaactgaatgaatttcaagcacggttcttgctctctggcttaatatgccaagcgataacatttgtggagggtgttccacggtctggtatcttggttactacactccgcaggcagaattgatgggtctgggctgggccgggtggggaagcataaactgggaatgccaatggcacactttcaggcccccagactgccagaccatgtgtgaatgttgatgcgtgtgcacccgcctgtactgagtataagtacccatatagacagtaagagataacatcaaggcagccacgctaattgttgttgctttgttgactttgccatcgctaatagagatgagagcgtgagtcacgacaatcactaatgtttaattgagtttcgaaatttattttcgatatagtacttttgagaaattgtcataaatttgattagccatttcctctactctctattggttgaaaaatgcgttgtattctccaattttacatgcgttttatcattccctttcgctttgcacacctgtcgaatgtcaacttttatcactcttcgccttcccattctcatcaatcacattcgaaacgaaaccagcaagcaccacaagcagccaccagcaacccaaaccccccattttccacctgtttgtcacctgccgccgggtggctcctcgggcaaatggaacgtgaccatttgaccaacgtgccgagcattgggactcaacaaaatgcgttaggagaagggttacgaggggaatccgatgttcttaacggttattgcgttttaagacagcaaacagttctcggctgccataaattcattgaaagtgcctccgactcataattcaagattaagctcaaggagaatttgaaaacttttcagctgcccacgaacccactaccgctcgactatttcccggaaaatttatcagctccggcggcattaaatggcgagtgcttaacacaaatccagaacttttcccgctccattgacaatatttccataagatttactattttaatatttacttttggcgccacaacaaatcggagaaataaaatcttatggccagttggaaatttctctcgcttttgaaatcgatgttccggaaatatggaaaggggacagatgttctaggcaattattttacagcacgaaaaaaaagctataagaagccatttccaattattacattactacttttattcctcgtttgatttaataatagattcttcactatcatataggtcaaagtacattaatttgtttgttcggactctaagcaattggtaatcactgacataaagtaatatctaagtgctattaatgttcctcgataagtgaaatgcagtcgcttggcaacatatattgataatttctccctgtgtcgttagtaattctagtttttgccagaattgatatacaaaagcgatacaagggaaattgatttgcaacttgaatagagaaaagcgaccacctcacctgccgcacaaaagaaaatatttattttcgagatcagcaatcgggagcttcaagattgaggacaaaccatatgtacattattgagaagcagacaaaaatgtttttccatcccggaagcgctgggaagaggaaaggaaaacccaaatcagaattcattttccacctgccagcgaagataggagttgtgccaaaaactgggccagcaaaaaaaaaaagggcgatggaagttcggtttcaatttgttggaaaatagaaaattgcataattgagggattcctcgttgtgggagtcacaaaagctaaaaaataggaacaaaaacgaaaaaaacacagcaactgtggttgggcgcctcctgcagctctgatggaaattcccatttccacatttccccgcccgcaactgcaacttccgccctttatttctcgcttttgtttcggcattgtttgtgaaatattggtcagcggttttcactcttctggccttttttttccccttcccctctcttcatcctgcaggaatttttacccagccagaaacgagcaaacgttattatggttgcctgcaacgtgaaatatttgacaacagtttcggggttttgcattaaattacgtaatgttttggaaaaggaacttcatcaagctgttcggcgcagttgagggcataaatcaaacgaaaaaaaaaaaaccgggagaaaactcagcttttcacgcggaggcgcgactttcgtgaaaagcttcgcttccgggcagcttcatcatcatttaacgctcggtggtcgtcatctgtcatgaatgcggattgccgtaagttgctcagttcgccatttatatttcactttagcttggcttcagttcaaggtcaccttgatagctgcttaaaatagaaaattcacaaaagaatttttaattgaataaaccgtggacacaaagtacgtagaatattttttaaatagctaaactttatattaagtatttttccagacctcctcaagaccgaagcatccaactcccgtccgctttgcccgctctttcgatttaatgaagcgcatttccctggcgcaaactttgaacttgaggcaaacaatgttcattatggacccatggaaaactcaactcaatccaacggggagagagcaaatgagatggggataggcgggaaagccccctcgatccctcgatggtccgcagacaaaggcacataaattattagatgaggcaaaagcgttgctaaagactttttatttgacttgaagtttcctttggctcatttcacttctcgtctgccgcttattcgtttcattctcttgccattgccattgtgatatctggctcctagtgaccagttcatttttatcatattttttctccacactttcatagctaccaactttaccctatcatctgttctataacgtttttttctcatttcgcactccgtctgtttcattcttgtacggctttttatggttcctattccaaggcttagacttgtttgtcaatttggccagcaaatgtgttacccattagaaataaatccccttatagcccctgcccccttattatccattaatggatgttctcagtttttttccacttctgtttcacttttgacgcacataagagaaaatacaaagcgcgaatagcaaaaagtaagcttaaaagtaccaaaacttgcttgggacttaaggcgaattccattaactaattgctattacacacatacagagagaatttctaaattctaaattgattcattagtaaacaacttaaaaattgtatagaagtaacataaaattaagttacaaacttattgtagataaggatttcttataaagaaagatttattaaaatcttatcagaaagtcattaaaattaataccaaaaacatgtttttaaactttttaagtgagtaaaaatgggcaatcactatgacatttctcagagtgtagaaagaacttgcagattgtactcacatatggaaaccctaagagcatttctcgttctgttttctataattcttccttctctcaaaccaggaaaaaagtttatttcaagcgcaattatttcgcttaattgtgtttctgtgtctactacacacttattctactccatccctttctctctgcatcttccatttcgagtttgtcaacagtttcgtcacgcttgtggctccttttctctttcacatctctttgcggcggcctgcctgccataataattttcataatttcgtcatgtctccctcaattaaagtcagtttagtgttatgcggtttacgcgctcagcacagaatttcttcgcccgcaggggcggcagtggatttcgtcactcattaattatgctcggtgtgggccgagttcttgccgtttatgcaaattactttaaggttaatcattattattttttgttttgttttgattatattgtcaactgctaggtcgggtcgaccctccagcatccaggaacttatcatcgttatgatcctgctgactgctatgagtggatgcggtttttcctgcgagacgaatttcaaattttctaattagcaccgcagttgcttggcaacttgagattatctcgaatcggtggcttaagacatctgcgtgctccagcaattgcaatcagcagaaaaacaaaaaaatctacttatatttgtaaattttttggctttgagcattggtttatgcactttcgcaggagccacaaataagtagtgccttttgccaaccgtaaattggaattacacaatttaatgggaattagtttgggctgaaaacttttcggactcccggcgcggtaacttttgccagctaatggaattatgcaaaacaacaaaaacagggcaaggcaagtcaactttggacggcgattaccagagttcggtactacaaacgaatctgacccacccgccacttgttaagcagctcatttccctggcataattctacaagtttttaatcatctctcgctgaccgcagggagtgcaactttttcaagtggcaaaaattgaatgcaaatgcaaatttagctgccaatgatttcatctcaagttgttgtcgcagcaaacgaatgtcacttgcctggggattattatttttagactacacggaaaacaatcaatacgcaaaaaaaaacaaacaataaagaggaaaagcctttcttttaaatggctttgttattttatataattatttaaatgtaaagaaactaattacagatataaactggtcagttttgttttatttttaagtttgcttatttttctttctgtgtaccgcggccattgaactttgagaaatgccaggggcgaaaaagaaaaagggggcggtcggcattcatcgcgacatcgataggtctctttttcatctttcagcttgactttaagtttcagtttcgtttgttgtttaatctttttttgtttttgctgccactgcaactttgcaactctgtggcgactgcgaaaagtgtgtgtgtgtgtaggctggtgccacgcccacttggctcaagtttatgacggcatgcctgaaatattcgcccgttttatttctgcctcaatttattcttacttagcttcttatataagttggatgtttggacgccgttgatgatgattttaatatggcaaactctgacgttgcaaagtttagcgtggccaaggagcggcaagaagaagaagacgaagaagttataatgaaggacaaagtttttggcagccccacacacacacacacacactcaaggccatacatatgcacatgtgcttgcacatatacatatatgtatgtacatatatcccggctaagtacatagcaacttagaaatggataactgctggagagccgtagaaggaagccctgctaaatcctttacgaaattggccaaataacgagcttgaaatgctgtaaacacttccccccttttcctcttctgcatgcgtttttccacctaactggcgtacatccaattgatggctctgcgcccgagacttttccatcggataaaacgaagagtgagtgaagtagctgctgctgctgctgctgctgctcaatattcaaggaaaatgtcaaacggaaatgagcaaggaaatgaagagaaaaactaaagaaaccacagggtggcaaaggaatcgccacctcatctccttttacttcccactcaaggggcagttggagcaagatgaatggtgacatttagacgttgcacaggctctagggtcaaacacaaaatcatagggattgcagaggaaaaacttcaactgaagcgtcttaaagtattactctttattgttagtattcaagtttaatgtttttaaactactaaaagcggcaagtttggttaatcaagaacacccaagatcgtttatggataaggtcattttttaagcactttatttttctcccagtgcagccagagaagatagctcgagtaggcacactatgaagaagaaagaacagtgggggaaattagccaggagcagctgccacttcctatgctgagcagtgccaaagacaaggcctggtgttttctccttttcctggacaagtgacaagttccaaaacaggaagactcaggaaagcgcattcgccccacggtcatgcccacaacagccaagtgtctgcctacgactgaccctttctcaacattttcccaacccatttttcccgacccacgcccagcgccacccaaaaaaacaccactttaagcacggccaatgaaaacaaaacatatatattccgatttagagacggattctcctttattttgcgctttttttttttatttgacttcggggacgtctgctgatgtcggtgaaaaagaggacgagggacctgtgttatatttctgatatgttttaaaacgaaaggatatgaaacgggagcagcaggagcagggtgcagggcagggatgtggcttccccaacagacagtcccaatatttgcacaactgggatttttcggttttgcggggaacgaacagccggaaaaaaggggcgaatttagggttccctggagttgggtttttatttaaatttcgtgcatttgagttgatttggcgagtggattagtttaggcatgaaaggatcccagataaatacggggaatggagcaaagggttgtccgtctggtctgctaaccctgctgggattttcatgcgaaaaaacataaagagactatcagggagcaatgggaatagggagtcggaacacgtgtccctgttggcactgttcctgctaattgcaccaaattgtaactattcctgttcctattcctgatccggttgcctaattcactaggacaccatttaccatgttaacgcaactcaattaagttgcctttcacatccacctacacacctacaaaacagtccaattgaaaatggaaatcgtaatcacaagtgggcagctttgttattagatggtgtgccacaatatgaaatgggtagtatagaaaataaaaacggttttaaactgatttaatcgcttatgcaatgcgtcacttgttggaaaaacaaaaaactatttagataacggtctcttttaacatgacataagtcaacgatttatagaaaccctctgacaattgagttatgtactcaataaattgttcctaaattgttcctgctgcataaagttcaacaaaaatggttttaaaatgaattgatttataactattagaatagaaatgactttaaattcttttactacagcatcagtaaacaagctttatctacgcccaagtgccatttttattatgtggattttattaatcgtccatctaaactatcattaagaattcatattgcactataatgatgctaataatacccccaatttgtggctccatttgttctcggtgtggtaatcaatatctgcttatgtccgcaagtcagtgaacaggctaatgagcgaacatggaatacattctgctatagtaaccgtagttaactcgatttcactggccaacatcagccaattgttgttgcaatatttgtttttgctcaaggggcggcggggcggtgtaataataggtgcggaagggttaaagggcgggggagagagagagagatactgagatagaatgcagccgcaagcctacaaagcattgcattgcattggaactgcccttctaaatacccccagcgttactcatttttcacccacatttcccagcagcgctgcccgcttttccgcttatccccccatattccttgttctccctttcccccttccaaccccccggcagtccgtagaagacgtgcaaattattgccacggcggaattgggtcaacatggcgaccctttgcaccgcctgactttccccactccgcagctgcccacgctaacaacccaatcgtcacttgttttgttatggcgctttgttgttgctaaattaagggttgccattgccacccaactttgtctacatccccacactgaaagaaaaaatcttcacaattggaaaaaacaaactttaaaagttcacaaaagttccaagttatttactgagaaagtacctatttaaatatggacgaaaactaaaatattcccatcttaatttaattgatttgtaggatcaaaattatttcttcggtgtagatttgttttccctgttctaggaaaagttctgcgttctatgcgtttcgccatttaacatttaaatgcggcgaaggcgttgaaagtgcgtctccctgctggtttgctggcttgcctgtttgccttccgcccatttcgcggcgtgggcgtgtcaagatccatttgcatattacccccaccaggagccaccagaatccataggatctctaggcttttgctttggctatatagctgcagtcgatgcgaatcgcgggaataaccctttgacatttttcaatttgccttggctgttgttttcgtcttttgtttttacccgtcgcctagttcaaggcaaacatttttcggctagtcttggttaaggtttccttttgccctacactttttcatcgctttcttgctatttccttctcactttttgctttgttgtctgggccgacaaagttgttgggcttttagcgcaaatcatttggctgtgaagtttggtttttgcgtaggacagaattttggaaattcagagagtcctcgtagaaacaatgacaacattttcggcaaacaaaaggagcggggggaggggggccggcgtcatggaactgagctttatgtttagcagcagagccaactgcaattgcaattgcaatttgtgtgaaaaccgaaaccaaacaagcagcaaatcagcaaacataaacacatactgtcagacagacaaaacgcattgagccacgcccactaccaacacacacacacacacacacacatgcgttgcctacgtgacctccttaagcgcccaccgcctcccgtccctagccacacccccttgccttgccatcactttgctgctacaaattcacttcacttcgttcttttctctagtaattttctcaaaaccttcctacatccctcctccaacctaaaaaataaaaaaaaaacacaaccaccacccactctagatgagagctttgcgccaattttttcatgttttcatgcgtgttgcgtgcacaacaataacaacaacagggcaaaaacaaaataaagagccagcagcaacaacaatgacgaggatgattgttaaagtgtggcaacaacaactacaatggatggcgaagtcaagtgcctggcaaaggcaatcacacacacacacaaacgaaagcacacgcataaaatatgtatgcgcctatgcactagtatttgtgccagttttcattgcataacgctaggtaacctggcacttttccttttgtgctccgtgaaaagcacagagttcactattttcatatttctgttattttcttttacccacttgcgtttcgctctcgaatttccggtaatgaaaacccggtgcaacagcagcaccttcctcttgagtcaaagtttttcccgtcttgagttttcccacccgccatgtcaggtgccatttatactccaagtttttctccagaggaatactcgtacaaattaaaaacattgcaataactttttatatagtgcatatataaacatgcataaaataactagaagttaaaataaatattttttaagaatattgaataagggtgaaatatggaaaaaaaaagagcacagttaaataaactcgaaacaagcacgtaatattaaactgagtcactagtcaaaaaattatactttagtctttaaatctcactgaaaatataaatatgtacatttcatttatcatctgcattcgttaaattgaacatctaaatttgcatgtcaacagtccagcaagactgaatcacataaatttttaaagctccacccattttctccagctgaacatttatttgcggcgttgcactaaatttttggatcattgtgccactaataagaatcaatgagtgtgttgtggggttagaagggggtgtggcatatgggaggaggtggagcaaacaaattggagcagtagaaacccaattccattcgtaatagcctgtcaacagggcgcattgttgttcatttcgctgttattatttctattgtaaattgatatcgcgaaacgagttgcgaaaaaaatgagaggaaaagcgagcttttcgattgccctgcacttcaagtgctcgatgtgtaataatggtttagccaaaaacttatgcggaaaaccaaactgcaaattatccccaaaaccgattgttttcatttggcgaacttgtcgcttgtgtaaacagaatcgaaatgccatcgtctcctttctagatgtgtggcatcataaattcccttgacaaccaaatacctcggtgtgaaaataaataaaaaaaaaaccgaagtaaaaagcagggggaacgaaagagtgtaaattgcatggtggattgaaaccgaaaccatgggctttggactcatggcatgacgcatctcatggatggaacatggagaaaagatacagaaagcagaacggaacgggctctaaaaaacaaaaacgagacacaatcagatggcaaaatgagtagagggccacaaaaccagatgtgggcaaacataaataaataaataaataacacattcgaaactaatccgaataatcaatgcaagcgcgtggctgcttatcgaataaattgaagtgaggcaaaatgaatcaagtcccaatatcagtctgatgagcaagaataagcataatctcaacagtcttacgctttgatgactaataatgattgcctgagtttacagaaaaacaagactttagtcaacataaaacgttattaacaaaagccaaccaaaaaactgcacatattgtttaaaacctaagcattcaaattaagcgagtcaaaaaccattcaaatgtcgtgcagaattgtggtgcacattatagacatattgatttcattgtgcgctgtcaaaccaagttatcaatatgccaaagcaaattaattaacaattctctcattttctacaaattaaaatctataaattacgatatacttaatatcgaatttcaaaagtgcacaaactaattgaattcccatcttttatgagcaatgtgaaatttaatcaatttcaatttcgtcaaaattaatcgaatggaaaacgttcgaaaagctgatgatttatagattttgggttgccaactagaatgcaataaatcgaattggggaaatccctcgaattcaaaggcattccatatggaaaatgaggaacttaacccttggtctgcacatgagaaataccataatatctcccccgatatattcccatataatcccgcccctggcaacaacaattgcaacgtgccacgcccccccgcccaagggcaacttctctggcgtttcggggcatttgtcatacttcccttcgacgggcagcaagagtaaacatggaagttggatggtataaaaagaacgatccaacagagaagaagatggaaaactaaaattgcgcatatttttgtttgtggcggggcgaggggtttgggggaagggggtgctgaaagggatgtggagtgaagggggggtgggggtagtgaaggaatgagaaacatgctgtggcaaacagatgtacaaatgagggtctgcaagtgggtggcggtggggagatcgagggggtacatgcactcttgcactggagcaaaaaaacattcctcctttatgatttaatgcgttctacattttaacgcacatacaattttattatttatgtggcgtggtgagcaataatgatactccacattgagatatgtaactaaattcattttctataaatgcataacggactagaactagttttaccatatggaacacattcaactttaaaatttattcttgattatgtgtccaaaaattatccaataagaacattattcctaggttttgcaatccaatgaggcaatagtgttacataatgtgtgatgtctctttattgaacagaaaacttcctgatacaattcaaagtgaattaatcgaatttgagaactgttggataattttttcctgtgcagacggaatgcaaaaattgcagtgagggaaactataaaaacttacggatttttggggaaacattctaaatccaaagagcacactttgcaatttctttgccttttgtttgctgttgtttttatttagaagtttttgcctttcccttcctaataccactttgtactacagctaaaggcttctatttcgactcaccttatagacgtcgccgtaggttcccgagccaatcttttggatgagttcgtactcgtcctgcggatttcggcgagagatgtccgagctgagcatattggcattgtggtgactgtgggcggcggccatcttggcagcttccgtatccgtatgccgttgccgtttccgcttccgcttccgctttcggttcgaggcgatcgagtccttttggctggacctctctttactgggtgggtatactcttaatatttgattgacactcttactcttgacgctgctttattcgttttttgggtttgactgattagcacacgtagcaggcgaaatttagatacttttgtggatcgagatgcattttggacgctttgaaatacacacaattacgtaaggttaactggacttttgtatattatgtattaaacatatacatttatttcatatgaatcagattctgatcagagaattgaattgatacacacacgaaactagagaatcgcgaattatgacgcagaataaaaaaaaaagcgatgaaaacaaaaatcagcaaataaagcagcaacaacaaatttgataaaggccagggtggagaagaaggtggagaaagcgcgggggtgggagcgagagggcaagtgaacgatgtctcgttttttgtaatcccctctctcgttcgcgctctctctcttccactgcatatattctttatcttctcgtctcctcttccttgcttctcaatgcatttgcactttaattactttttattagaatttatgaaggccacttttgtttttgccagcgaaattgcctaaataaataaatagttgctgtgctgccgagtaaaaaaacacgcgacaacaaaaacaacaacgcgaggcgtgtcgctttgtcgcccgttcgtggtgttgttgttgctggtgtaaatactacgtttattattttttttttataattttattccgattttcgctaagcgctaggtgagcaccacaaaccgttcacatattacaccgacacgtgattgcggggcaaattcggccagtggataattaacaattgtcctacgaacacgaaaaatttcacatgcacttcgtcaacgcgcagcccacaaatgttgttgttcctctcacccctcgctagcgatggcactctgcccgcgggcctatcgatagcagcgctggtcgttcggcggtggcaactctgtcgggctgtcgtttcgaagatatcgatattagttggccagaaggggtggccagacaggggaaatttttaaactgctgaaggacattcgaaattcaataaaatgaatcattgaatccacatgaaagtacatttagtagcagcgttaaaggaatacattagttaaagctctcaaatctacttcaatgtttctttagttattaattagaatgtcatacaaatgatttgtcactgtattgccaatcagcaatgttttataggaacttccccttaatctttcctacgttactaagacctaaatcagccacaaactgggaaaactcctttgtgcagaccgccgttcccaacaacaacaattggatcctaaactcgaaacaagtgaaatgtttaatatctacacgcaaactactgccaactgctttccgaaaaatatccggtattattagtgatcacaactttattgattcaccgaatttgttgtttaatttaaaaaaaaaaccctaattcacttttattttgtacaattattattcgtgtttgtagaaaatacaaaatatcaaagggctcgagcacgttgacacggagaaatgggttaaaaacgaatccaaagaacttattgcacatgtgtgtgttcgcgtgagtgtataaataaataacgtaaaatgtatcgagatgttccatagcagaagaagatggttagcacagctccttccttcacttctatgtaactagggtattatttcgattaaggtttctcggcttggggctgtctggcttggattccagggtattccccatattcacagcttccgtatgctgcgatctgccgccgctgaattgagtttagttctgtgaaaataagagaaaaacgaacgttagatatatctagacaagtgcaatatcaatgg

SEQ ID NO: 14999 - DNA, 3997 bp, DROSOPHILA
tgggctgcgcgttgacgaagtgcatgtgaaatttttcgtgttcgtaggacaattgttaattatccactggccgaatttgccccgcaatcacgtgtcggtgtaatatcgtccaaaatgcatctcgatccacaaaagtatctaaatttcgcctgctacgtgtgctaatcagtcaaacccaaaaaacgaataaagcagcgtcaagagtaagagtgtcaatcaaatattaagagtatacccacccagtaaagagaggtccagccaaaaggactcgatcgcctcgaaccgaaagcggaagcggaagcggaaacggcaacggcatacggatacggaagctgccaagatggccgccgcccacagtcaccacaatgccaatatgctcagctcggacatctctcgccgaaatccgcaggacgagtacgaactcatccaaaagattggctcgggaacctacggcgacgtctataaggcgaaacgaatacagagcaatgagctggctgccatcaaggtcatcaagctggagccttccgacgatatacagattatccagcaggagattatcatgatgagggactgccgccatccgaacatcatcgcctactacggttcgtacctgcgcagggataaactctggatctgcatggagttttgtggtggtggcagtctgcaggacatttaccaagtgaccggtcccctcaccgaagtccagatcgcgtacatgtgccgagagactctcaagggactcgagtacctgcactccatgggaaaaatgcaccgggacatcaagggcgcaaatatcctgttgacggagtacggcgatgtcaagctggcggatttcggcgtttcagctcagatcacggccacaattaacaaacgcaagagcttcataggtacgccctactggatggctcctgaggtggcagccgtggaacgcaagggtggctataatcaactatgtgatatttgggcctgcggcataaccgcaatcgaactggctgaactgcaaccgccgatgttcgatttgcacccgatgcgcgccctattcctgatgtcgaagagcggctttaagccgcccactctgaacaacaaggacaagtggagccccacgttccacaacttcatcaagacggcgctgacgaagaatccgaagaagcgacccaccgccgagcgcctgctgcagcatcccttcgtccagtgcgagatgtccttgcgggtggccaaggagctgctgcagaagtaccagagtcccaacccgcagttctactactatctcgatggcgatgaggagtctgtggcaggagtgccacaacgcattgccagcaaaatgacgtcacgcaccaatggcgtgccagcgcaaaatcacacactaaaaacaggcatgacgacgaactccacgtggaatgagcgatcttctagtcccgaaacgttacccagtgacatgagcctcttacaatatattgatgaggagctgaagctaagagcgaccttgccactgaacaacgacaccaaagatccactcggcgccgagtgcagctgctcctcccacaatggaggagccgccggaggaggaggaggaggaggagttggagtaggagcaggcggagcagccgcgaacggcagcagcagcagcagcggaggcgcaacagtcggcaccactcatcatcagcaccaacagcaccaccagcatcaccaccatccgaatcatctgcatcagcatcagtcccatcaattgccgcaacagcagcagcagcagtcacatcaggcggcacagcaggaacaccatcaccaccatccaatgacctcgtccatatccagcggcttggtgaccgccaatgccaacaacatcagctcgtccgcctcgctggcctccatgccaggtctcagtgcctacctgggcatgcgctcccatgtggttggccacatgggtatgggatttggcatgggtctcggcatgtccaacctgcgcaccaccagcatcgatgccgacgacgatgaactggtggctgccgatgtggccatgaataatgctgctgccgccgttcctgggaacggatccggtgctggcaacggttccggatccggatgctccgcctctgcggcgcactatctgcgttacagcagcaactaccgatccgccgccgcggctcaggcatcgcaggcggcacatccgcacgttaactccaattcgaattcgaacaacggccatggccatgcgccgatcacatccagcatctcgtcctctgcgtcatcagcttcgttttataatcgcctcctactcctcgataattccagcggcgatgcagtcgtaggcggtaacggaggcggcagcagcaacataagcagcagcggaggagcatcaagtggcaccaatggcctcctggataagcacgagctagatgctcttccccaagcggcaacaaagtcggccggcgatggcttctcgcattccaatagcccaacggcgaattccggtgcgggagcgaccggatccagggataacgatggaccctcgtcgagcaactcttcgcatctctaccagaacctgctgagaagcagctctggtgaaacgccagcgggatcgagctcggcgggcaataactgtgattaccggcatgagaacaaccagaatggtctggaggactcgcctcgacgccatagctccatggatcagctgattgggttgctcgagaacatgggcaagtctccgaggacacgcagcctgagcgatggtggcacccaggacgatgacgaagcggagaaggaggcgcaaccggatctgctgaacaacaccccaccggtaccaccgaagcgctcccacaaacgccgtcacacgccacctcgacccatctccaacggactgccgcccacacccaaggtgcacatgggcgcctgcttctccaagatcttcaacggttgcccactgcgcgtccactgcaccgcctcgtggattcatccggagacgcgggaccagcatctgctgatcggcgccgaggagggcatctacaacctcaacatgaacgaactgcatgacgcggccatcgatcagttgttcccgcgccgcaccacctggttgtatgtcatcaaggatgtgctcatgagtttgtcaggaaaatcctgccagctctacaggcacgacctggtggccctgcactccaagcagacggtacgcttctcgctgcacatgaacaagatcccggagcgactggtgccgcgcaagttcgctctcaccaccaaggtgccggacacaaagtgctgcacacagtgctgtgtcacacggaatccgtataacggatacaaatatctctgtggggcgacacccagcggcattttcctgatgcagtggtacgatccactgaacaagtttatgctgctcaagcagtgcgagtggccagccatcagcattcagggtggtggtcatggctgcgttcagaacggacatacgcccgtattcgagatgattatcacgccggagttggagtacccgattgtgtgtacgggtgtgcgaaaggccatgaacggctgcctcaagctggagctgatcaacatgaacagtgccagctggttccattcggaggacctggaatatgacgccatggccacgatggtgccgcgacgcgacctgctgaaggtggtgcgtgtgcaccaggtggagaaggacgccattctggtctgctacggcaatctgattcaggtggtcaccctgcagggcaatcccaagcagcacaagaagatggtatcgcagctcaactttgatttcaacgtggacagcattgtttgtctaccggacagcgttttggcattccataagcacggcatgcagggaaagtcgttgcgcaatggcgaggtgacgcaggagatcaaggacatgagtcgcacctacaggctgctgggcagcgataaggttgtggccttggagagccagctgctgaggaccggctccctgggcagcgaggagggacacgatctgtacattctggccgggcacgaggctagctactaa

SEQ ID NO: 15000 - protein, 1218 aa, DROSOPHILA
MAAAHSHHNANMLSSDISRRNPQDEYELIQKIGSGTYGDVYKAKRIQSNELAAIKVIKLEPSDDIQIIQQEIIMMRDCRHPNIIAYYGSYLRRDKLWICMEFCGGGSLQDIYQVTGPLTEVQIAYMCRETLKGLEYLHSMGKMHRDIKGANILLTEYGDVKLADFGVSAQITATINKRKSFIGTPYWMAPEVAAVERKGGYNQLCDIWACGITAIELAELQPPMFDLHPMRALFLMSKSGFKPPTLNNKDKWSPTFHNFIKTALTKNPKKRPTAERLLQHPFVQCEMSLRVAKELLQKYQSPNPQFYYYLDGDEESVAGVPQRIASKMTSRTNGVPAQNHTLKTGMTTNSTWNERSSSPETLPSDMSLLQYIDEELKLRATLPLNNDTKDPLGAECSCSSHNGGAAGGGGGGGVGVGAGGAAANGSSSSSGGATVGTTHHQHQQHHQHHHHPNHLHQHQSHQLPQQQQQQSHQAAQQEHHHHHPMTSSISSGLVTANANNISSSASLASMPGLSAYLGMRSHVVGHMGMGFGMGLGMSNLRTTSIDADDDELVAADVAMNNAAAAVPGNGSGAGNGSGSGCSASAAHYLRYSSNYRSAAAAQASQAAHPHVNSNSNSNNGHGHAPITSSISSSASSASFYNRLLLLDNSSGDAVVGGNGGGSSNISSSGGASSGTNGLLDKHELDALPQAATKSAGDGFSHSNSPTANSGAGATGSRDNDGPSSSNSSHLYQNLLRSSSGETPAGSSSAGNNCDYRHENNQNGLEDSPRRHSSMDQLIGLLENMGKSPRTRSLSDGGTQDDDEAEKEAQPDLLNNTPPVPPKRSHKRRHTPPRPISNGLPPTPKVHMGACFSKIFNGCPLRVHCTASWIHPETRDQHLLIGAEEGIYNLNMNELHDAAIDQLFPRRTTWLYVIKDVLMSLSGKSCQLYRHDLVALHSKQTVRFSLHMNKIPERLVPRKFALTTKVPDTKCCTQCCVTRNPYNGYKYLCGATPSGIFLMQWYDPLNKFMLLKQCEWPAISIQGGGHGCVQNGHTPVFEMIITPELEYPIVCTGVRKAMNGCLKLELINMNSASWFHSEDLEYDAMATMVPRRDLLKVVRVHQVEKDAILVCYGNLIQVVTLQGNPKQHKKMVSQLNFDFNVDSIVCLPDSVLAFHKHGMQGKSLRNGEVTQEIKDMSRTYRLLGSDKVVALESQLLRTGSLGSEEGHDLYILAGHEASY

SEQ ID NO: 15001 - DNA, 3650 bp, DROSOPHILA
gctgcagcctggactcttttgatatcgaagctagaagatctatggtggatcaagtggttactaatatcatttaagggttgccggagtttcttactgcagaaagtaacaacgatcgatttcttcaactggtataaaggtctcgaacgacctattccggagactgcaatctcccagggttggtacctttgccacggcaaagcgatagagataggttcgtccaatggcgtcgtagcggcagtggaaggagttggccaccaacttactgctgagcactcggatgggaagacgctgtttgttaagggttcggttgagcacaccagttaatatagttgtatcatagggctgcccattaggccgctccaagtccacctgcaccgtggagtgcagggcgtgtacaccggcgtctgttctgaaagttacggttactatatgactgtatagatgttgtgtatattgtcttgcaccaaccgactggacagcacggtgtgtatttcgtttgttgggtgaaaaacctgcaacgccagctccaaacagccttgtatggactttgtgtccaggcgggactgctccagcttgttcaccgtcttttgaataccactgtaggggtggtaagtcttgcttcaacaattaatttccacaattcgacgcacttaccgaaaagtcgtgccgatgtaagaaatgttcaacaaatacctatacatgttatagagcacgacccacaaccaccatccatatcgctagagatgggcttgggcagctggttgatctacactcctagaggtgggattgtaaattatgtgttgaataatcaaaaaagcaacatttaaaataattaaaaaagctgtatatcaagaaagcaactattttttatgcaactccctgcaaaaacactttctacggccaagctctttttgggccagagaatgagaagatatcgattaatcgatgacgaatcggttcacggcattaggcaacaacaaagtacccggccacattgctgtcagaagtatattgttttgtaataaaaaaatataattttgcaacttgccaaagccttgcaaccctgtaagagacggccaacggtctaatactttttctgtcttttgcacagcagtcctccaaattaaaggctacagagttgggccctcggtataagcagtcaccagaccacccagtcactccacccaccacgtaactagaatggccggctttcccgagcacgcccgcgcagaggatacggaggttaatgtttggatccgctttggtcttaggctgggcgtcagcgccgcccttcatccgttcgaatattccaaaaccctcatccagctgggttacgaaccaatcgctcctctgcccggcaagtcgatactgggcaagccgatcatgaagttgccgaacatctttcagtacggtaggtacaaagttcctttttgccgaaacataactaatatttccgctgcggctcctgcagctggccacattcggcggatcgacggcttctacggttgctaccgcggtctagctcctaaattggtgggttctctggtggccatggtggtaagcgaccgagtggccgatcaactgggcctggagcagccagaggagaataaggacgactcgcagcttagtgatgaggaattgcaagtctttgattttcaagtgcccaagaatctccgtacaactcctgatttgttttcttacaggtacgtccagttcaagaaaagtctgaagcgggatattgttttgatggtgagcggagtcgtggcctcgcatccttttcacgtaatctcgttgcgcatgatggcgcagtttgtcggccgcgagaccttgtacacctctattgtgggctccgtggccgagatttggaagtctgagggaatagcgggatttttcgccggtcttgtgccaaagctgctgggcgatttggcctgcctagtgctcagcagctccacgatctacatccttaacaaatatatcatcaaggacaagttaggcaggcaatacaattccggattcacacagtttgccgtatctagtttactgtatccactgcaagtggtgtccacctgctcagcggtaagtggctcacgcctgatggctgcccaaccgccaattatgccggcctacaggaactgggtagactgttggaatgatttgcaggttcgcggggagcttaagcgcggcagctcccttttctggcggtgggtgttacagtgaactttatgtttaaattagtaactacaaaaaacgtcgactttccaggtcacaatccatcagttctccagtaatagccacctcattcgcgcccttgcctaagctggcgcgttaccagtagccgtcaacaacgaggctggacgaccacggacgggctccggtatgacaagcttcaatccaaggcaactgcatttttctactgtctccaagcccagccataattctgttaatacaagtttagatctacattgaagtggattttcatcgtggtccgttagtcttgcgcgatgttttcttttctttcagcaactacgagcactgaaatcgtgaaaaaatctttcccaatcttgtgcagactccgatataattgttgttattgtttactgcaaaattttggaaataaatcgttttgccctactagtggaacttttccatatatatgtttttttaattataatggtctactggtaacgctcttatcgttaccttattttatttttaagtaacacgtattaaagctcaggagttaaataagacatatggtttcattgaaaccccacttttttaaagtagattttatatttactttgaatagttttgttgcgcaatttatatagtactgaaaaaaatattttcctgttggagccattaaaaacaaattcaattgacaatctttattcagttaaggtttaatttctgctatatttttatgtatataatacaaattatcttattgattgttgattgatccttacacgatttttgcagcccaataaaagcttaattaattaatttgtcctgtgctaactataatgcactctagtatcattttttgtaatatttatactttgctgttactacatctccagtaccaccaagcaaacaaattttgcatctacaacaaattcttatttgtaattggtctgcaaactgtagtgaataaaaataaataatttacatctacgaaaattattttttgtagttggtctgcaaccagcatttcgaattcacatcaccaagttatgtttctagaaatagcatttgctttgtgcaagcatcctgcagttgtacccccacataaatccccttaatatccatcctttcgagtccttttgcttctgcagtaattgacaagtagctaggcgtcgagtatatgaacatttataataagtacagattaaaaaggaaaagaaaaggtcaggcagttctgaagaatgttgtttttaaataaggctttttgcttttattaaattttcgctaaaaactagaattaaaattaataatcataatcattaattaatcattagagttaacgtaatagtattaattaaaaacattttttgcgcacaaatatttacaattacagaagtgtcgttaacttctaaatttatttcttgcttggttctttacacaattatattagttattctctattt

SEQ ID NO: 15002 - DNA, 1466 bp, DROSOPHILA
tcagaagtatattgttttgtaataaaaaaatataattttgcaacttgccaaagccttgcaaccctgtaagagacggccaacggtctaatactttttctgtcttttgcacagcagtcctccaaattaaaggctacagagttgggccctcggtataagcagtcaccagaccacccagtcactccacccaccacgtaactagaatggccggctttcccgagcacgcccgcgcagaggatacggaggttaatgtttggatccgctttggtcttaggctgggcgtcagcgccgcccttcatccgttcgaatattccaaaaccctcatccagctgggttacgaaccaatcgctcctctgcccggcaagtcgatactgggcaagccgatcatgaagttgccgaacatctttcagtacgctggccacattcggcggatcgacggcttctacggttgctaccgcggtctagctcctaaattggtgggttctctggtggccatggtggtaagcgaccgagtggccgatcaactgggcctggagcagccagaggagaataaggacgactcgcagcttagtgatgaggaattgtacgtccagttcaagaaaagtctgaagcgggatattgttttgatggtgagcggagtcgtggcctcgcatccttttcacgtaatctcgttgcgcatgatggcgcagtttgtcggccgcgagaccttgtacacctctattgtgggctccgtggccgagatttggaagtctgagggaatagcgggatttttcgccggtcttgtgccaaagctgctgggcgatttggcctgcctagtgctcagcagctccacgatctacatccttaacaaatatatcatcaaggacaagttaggcaggcaatacaattccggattcacacagtttgccgtatctagtttactgtatccactgcaagtggtgtccacctgctcagcggtaagtggctcacgcctgatggctgcccaaccgccaattatgccggcctacaggaactgggtagactgttggaatgatttgcaggttcgcggggagcttaagcgcggcagctcccttttctggcggtcacaatccatcagttctccagtaatagccacctcattcgcgcccttgcctaagctggcgcgttaccagtagccgtcaacaacgaggctggacgaccacggacgggctccggtatgacaagcttcaatccaaggcaactgcatttttctactgtctccaagcccagccataattctgttaatacaagtttagatctacattgaagtggattttcatcgtggtccgttagtcttgcgcgatgttttcttttctttcagcaactacgagcactgaaatcgtgaaaaaatctttcccaatcttgtgcagactccgatataattgttgttattgtttactgcaaaattttggaaataaatcgttttgccctactagtggaacttttccata

SEQ ID NO: 15003 - protein, 316 aa, DROSOPHILA
MAGFPEHARAEDTEVNVWIRFGLRLGVSAALHPFEYSKTLIQLGYEPIAPLPGKSILGKPIMKLPNIFQYAGHIRRIDGFYGCYRGLAPKLVGSLVAMVVSDRVADQLGLEQPEENKDDSQLSDEELYVQFKKSLKRDIVLMVSGVVASHPFHVISLRMMAQFVGRETLYTSIVGSVAEIWKSEGIAGFFAGLVPKLLGDLACLVLSSSTIYILNKYIIKDKLGRQYNSGFTQFAVSSLLYPLQVVSTCSAVSGSRLMAAQPPIMPAYRNWVDCWNDLQVRGELKRGSSLFWRSQSISSPVIATSFAPLPKLARYQ

SEQ ID NO: 15004 - DNA, 7499 bp, DROSOPHILA
atccgggatatttaattttaggttaaagatatctatctgcatccggatcccttctcggtgcaaaacggactgctgacgcccacattcaaagccaagagaccgcagcttaagagctattttaagccccagctggaggatatgtataaacacctggattaaagcaatgcctatatgcatacatagacatcaacaacgaatcgaactcaagaaactgggaagcattcattcaaatatgcctataccattttaaactgatgataacaaagactacagatacagatacgaaagcgaactgtctaattttgtagtatcgtcaattcttagcacgtaagaggagcgcaagatacaccagatacagatacaatacacataaaatatacacaacttcaaactgacaaggagaatccttttggcagccgcatttttttatataatttaaccgagaagcgaaccttaattaatatattaactatatatttccctttaaacacttatgagctagttcaaaagtggatagaaaacaattgcgtagtctgaaccaaaacatatataataacatattgagcaaattgaataaaaagaaagctttaattaactattgtatactacactcagcgctagatggaaactaaagtgaagaatcaaatttttaactatatattagatacgctaaaactaaattaatgggaatgaaatgttcatcgcaaatgctgaggaattacttttaacttacaaatgaacgccaatcgagaagcagatcaaacctaataataaatatggaaaagatcaacgtctttggactgcactgtctgccttactaaataccaaatgaaaatttattaataaattgctaaaataatgaactatttcatattaagagctaaacaataaagtaaagcagcattgtattaaatttattaaatagattctttatgtagatacgaaagcaagttaactcaaaataatatgaaataaaaccaacaaaaatacaaattgaaatactgagatttttgaaaactttatttgaatttggcgttgccacctaacgcacatacgcagtcaccaaagcttttcgagggggtaaagtggcctgaccatcccaaataaatggttaataaaatacgctgaattaattactatttactccaacttttaatacatttgacaatcttcaacttaaaggcgcgtatttagtatgatgacatttaatttcggcttaacttaattagtagctcttggaatgcaagacaagaaaatcgttcgaaatcgagttacaaaacacaattcagactttagtgagctgttttctttttgagttgggtttacgttatcaatcgcattatgttctaattaaaatgtacaaatgtgtttagtcgttatttcggagatggctcttagctaagtaatcaagtgtttatccatcgatatttaaattcactaaacatgttgatttaactacgcgttcatcacagctcgccgtgcttgggctcatgagaaggcgtcacagtggtgacctccaccgaatcgtcaaccgaatcatcaactgccgagtccctgctatgcgaattctcatgatcctcgatgcgagacatcagggtcttcagctcggcatcgtagtccttccattcgggcacaatcctctgggcggccgtgagtttggcctccttggtctgcgggttgttgcacaaatcaatcactttagcagtcttgaagttgctgtcgctgcaccacgtttggcaccatagccagtcgtcgggcagggatttgatggcgacctggtggatcatgttgttgggcaagtcctgatccaaattggataagctgttcggatcctggctaagtgcctggtattggcctcttagcctatctcctgccgcaatcttgcggaatctcttcaagtccaccacgtacaaggcggaaatgtggtaacgcctgcccatcagatggcttcgccagtatccctgcttccagaatcggaagccctccatctctttgcgggaatcgcagaatggcgtgtaggcatagggtgctcctccgaggtccatgtcatacaactcctttatatccgttcttacgatggcatcggcatccacgaaaatgattttcctcacattcagcgggaagagcacgtccaggaaaaggatcttgtagccccaaatggtcctctgtttttccgtttgctgatgcagccagcggggccatttgtactggaccaattcgtactggaagttgtactcactggccatgtgaggaaggaaatccgtaaattgcggcgaaagatagttcttcaagaaccagaacttcacaggtgattttgtgtgctttagcagcgaaaccatcatgatccttagaagacgttcgtacaagtgtcccgatgccacagagaaaatgttgatggtttccgtatcctcatcagtggctgcttggttggcactgccgccgccaaaactgctggcgatgctgttccacatgcctgattgcgctgcctgttcgttgtcatctgacaggagttccgcctgctgcatgcctggcttcttagacacccttaatttgacaacatgggatcgcaaggaggttataagaacctgaacttcagaagagccagccgaatgatgggtatttgttccttcaatgtggctgattgcataaatatccgccgatttgccttcacgcaagcgtagggaccaagctcctggattggctttaagttggaaataacccaaattcgccatcacaatagtatctaccaaggtaggttgactctgggtacccaacaccaactgaagtcctctgggcggagcgccgctagcagcatcaaagcagtgaccctccaacagcagatactccagatcgaattcgctgtgcacaggtccaccaatatcggtcaacttaatgttgtccagatcgtaaactgctctcacagcttcgaccaaccagttctcgggaacctgcagctgctgggtcagcagaggattggctggcaatccactgaatttggccaaaggaccatcagatcggcctccattcgcctcgaattggacctccggttccacaacgtatctgtagaagttcttcacgggcatatcgctgtgctgggggacgggaatcaggtataagttcaattggcagttcagcacttgacgaagcaaaataagtattggcgttagtttttgagctgctcgggaggcgggatccaaaacggcggcaacatcaaaatggggaagattctcctgtttgggcggtagttttacaaccgagtgatcggtttttaagtccgttggtagcttaaagcgagttttggtttgcctgggaagcaggctggcatacaacttaagcaatgtatcgctgttgaattcctcattgacatcttgagcagattccttcaggacctgacgcaccttatcgctatactgtagagaactgaacctggctagcaaagcgaaatcggcgctatcaaagctttcatccgacgaaaggggcccataaagccgcccattaccgatgaccaaacgctgggatttatttagacccaacactcgctgggaataaactctcaacatcttcaggtgcagctctgtagatcccaggatatcctcgagctgagtgggtatctcaattttctcctttggtttctttagccacttgagaacctgctccgtggcttgagttggtggaagactctgcatggcagcccaaaccaatcgattaagattcctccggcttgaggcggaagagctttcagtgtttggaatgaatgcgactcgcacactctctccactttggacatagtccagggcatgggtgagcagatctcgaccctggtcagtttccaaatcagcaaacacccaaatcgttaggaactgtagggatgctcggccaataagctccgtagacttcttgccaccaaagtatttaagattatccattagcgtagcggtcatatcccggttagacagacgatttaaaactccaacattgccaagatttttgtaggccacgccgttaatatcaagatatttcacatcctcctggcttaggattcgctgattcaatctgggcatcacgtgaggttgattcatcagataatcaatggctacatcgttgtctgtcagttcacctttgtacacagccttttggagattgctggtgtgggtcataatctcggtgaaaatagcctcctcgaagtcgctatcggcggtcacaacgttgctgggcattggaacaccattcaacaaggcctgaggttgtcccttgtctccgaatcccagccgctgaatgaactctgctgcgagctccctgccatagtcgtacgtggaatcttcctccaggaactcctccgctttggcaaagcttaatgatgtaaattccttcgttagttgcttgactatgtcttttttcgtgaccactttggtctcaccaactgctgcgtagatgtcggtgaggaaacttaaagcagctcgggcatcctttttctgactcacatagttataggcgcacgtgatggctacgtaatctgcaagattatcctcgttggcgtccctcgcatcgaaaaccaaacccaagcgaatgggagcttgatggatgacaaacgactctgacagtttaataacacttctagctgtgggctgcagcgcgtctaccactaggaccaaattgaacacattctttcggatattccttaacatgccaggaaaggttggacgcaaaagatccatcaccgatgagggccacctgcggtactgcacatcgttttcaatatcgttgacccactgtactgcagtgtcacggatgtcgatggcgaattcttttttgctggaggccgtcagatccaaggcgagcaaggagctggcaaggcttcccctcacattattactgtgcagactctcgagaacacgcatctccgagcgcagcgtctcaatcagggaatacagatccattgtgtcagcatcgaagaagagtccattgatgaaaagggcaccatctggaggcgctacattcaagcttcttccaaatgcttccgtattatgctttacctccgcccttaagccatccgtaaccttgtgggccagcagggttctggccaacatggggaaattatgggcagtatattgaagaatttgtagggtttcatcaccctgtatttctgcaatagcagcggccgcctggagacccaaatcctggaactcccatgctttcaattgggcgatctcatcgtttccctgaagaagcctctgacgcagttgatccagcgctctcttaagtgtaggatgcttctgcttcagcaccttgaaatcaaagccctggacgtccgattcattagccaaatcctcatcagaagtggaaccagcttcgggctttggagcatcatcctgactcttgtattccgttgacttcagatggagttccactccatagcccgaaagtcgtaccggtcgcttgtccttcttggccaattgatgacgcaagatgtaacgaatccggccagcattggcttccttttccaatagtttgtgataggtgcggaattgagagcttcccaaatcgccgtatagtaccacagtgcgggtattgttctcactgccagggaaaatgtgatcaaagctgtaggtgacaacagaagcatccaagctatccttggcgagcggcacttccagcttcttctgcagctcgttaaagctgcaggccagttcggaacccacctgggcaaaagtaaagctctgacaagagccactgctcctcagttcctcggccaactggaagtgggtctggatccggggcgtcaagctatgcatggataccaccagcctaagcaggggcaattggggagaactcacatggctcttgaccagctccaaggcggcattgtactgttgcgactcggtatctgaaaagcgaaaacgtaatcagaaaaataaattaccctttgggaaaagatcacattatagggctttgggaataggtgattttatattccgaaccattacttgattttatatggattcgattcacattgaggagaatataaaagctctttaatgcgggttctccatgacttataaacacaaaccatattcgttgagaaccgtgtccaacttggtcacccccgaaacgtaatcccagaagaggcccgcctgctcatcggccagatactcggcgatttccagatataggggcgtctgcgtccatttcgcgttgattagcgtggtgatgggatagctctgactggattccccagaagttggcgtatatagtgctatgagcaccacagacacacacaaagccacggcacgtaacatggtttccacttgttttaacgtagattaaaccacgcacattacgtatactaagcgtagagaggaacttaaggctttccttctccaaatattttacttttcaccagttttcggctggttttagcccagtttttcttaatttgatttagaactgatgtggcgttcgttgatgaaccggcatgccgcagtgtgaccagactacattggaactacatcgggttgaagaacttatttaaatttatttattttacggacaattgtcaatatggaaatattttgctttaaattataaaagaaattattgaaatataaaaatagtacatacttacttcaaaatgcataaatgggtaactaaattcctttgttggtatttttcatacctgttgtgcgactactatcactctaatttgtttgtttacaaatttcagcgcgaatttcgcgaccaaaaacatagtgcaaatattgccaatgaaatacactttagagggcagcaatgcaagaggtaccacataataaacagcaaaatatattgataactaaaagaattcattttttaagtcatcgccaaagccgtacaatcgctgtccaaggtgggcaaggagatgttcatcgagatcgaccagcaatccttgcagatgcgggccataaatgccacccaatccgcagtgggcagcatatcgttcaaaagatccatgttcgaagtgtatgacatgccgccgcactcagatttctactgcaagatctccatgaagggatgtttggccgtgttccgcaacatgaatgaggtaagttcgaaagtctgctcactgggattagttgttaagaatattatgttccaggtggagtactgtgaactcaacttgctggacaaccagaccaacctgcaggtgaatctccgctgtaagctggagaccacaaaggaggccaccatttccatcatagacgaccaaaacattaacacaaacattaacaccgatcagatgccgaatatgtgagttttggtttgtgttaaggataactattaagtttatctccttaccttatttctcttaaaacaactatgcccatataaatccgaatttactactcaacatttcagaatccgtggcgatcacaagctgttgacggatatatccaataactttaactcctcagaggaggaacttactttggaggcaaactcgggcagtgtggtggccaaaaact

SEQ ID NO: 15005 - DNA, 5316 bp, DROSOPHILA
caatgtagtctggtcacactgcggcatgccggttcatcaacgaacgccacatcagttctaaatcaaattaagaaaaactgggctaaaaccagccgaaaactggtgaaaagtaaaatatttggagaaggaaagccttaagttcctctctacgcttagtatacgtaatgtgcgtggtttaatctacgttaaaacaagtggaaaccatgttacgtgccgtggctttgtgtgtgtctgtggtgctcatagcactatatacgccaacttctggggaatccagtcagagctatcccatcaccacgctaatcaacgcgaaatggacgcagacgcccctatatctggaaatcgccgagtatctggccgatgagcaggcgggcctcttctgggattacgtttcgggggtgaccaagttggacacggttctcaacgaatatgataccgagtcgcaacagtacaatgccgccttggagctggtcaagagccatgtgagttctccccaattgcccctgcttaggctggtggtatccatgcatagcttgacgccccggatccagacccacttccagttggccgaggaactgaggagcagtggctcttgtcagagctttacttttgcccaggtgggttccgaactggcctgcagctttaacgagctgcagaagaagctggaagtgccgctcgccaaggatagcttggatgcttctgttgtcacctacagctttgatcacattttccctggcagtgagaacaatacccgcactgtggtactatacggcgatttgggaagctctcaattccgcacctatcacaaactattggaaaaggaagccaatgctggccggattcgttacatcttgcgtcatcaattggccaagaaggacaagcgaccggtacgactttcgggctatggagtggaactccatctgaagtcaacggaatacaagagtcaggatgatgctccaaagcccgaagctggttccacttctgatgaggatttggctaatgaatcggacgtccagggctttgatttcaaggtgctgaagcagaagcatcctacacttaagagagcgctggatcaactgcgtcagaggcttcttcagggaaacgatgagatcgcccaattgaaagcatgggagttccaggatttgggtctccaggcggccgctgctattgcagaaatacagggtgatgaaaccctacaaattcttcaatatactgcccataatttccccatgttggccagaaccctgctggcccacaaggttacggatggcttaagggcggaggtaaagcataatacggaagcatttggaagaagcttgaatgtagcgcctccagatggtgcccttttcatcaatggactcttcttcgatgctgacacaatggatctgtattccctgattgagacgctgcgctcggagatgcgtgttctcgagagtctgcacagtaataatgtgaggggaagccttgccagctccttgctcgccttggatctgacggcctccagcaaaaaagaattcgccatcgacatccgtgacactgcagtacagtgggtcaacgatattgaaaacgatgtgcagtaccgcaggtggccctcatcggtgatggatcttttgcgtccaacctttcctggcatgttaaggaatatccgaaagaatgtgttcaatttggtcctagtggtagacgcgctgcagcccacagctagaagtgttattaaactgtcagagtcgtttgtcatccatcaagctcccattcgcttgggtttggttttcgatgcgagggacgccaacgaggataatcttgcagattacgtagccatcacgtgcgcctataactatgtgagtcagaaaaaggatgcccgagctgctttaagtttcctcaccgacatctacgcagcagttggtgagaccaaagtggtcacgaaaaaagacatagtcaagcaactaacgaaggaatttacatcattaagctttgccaaagcggaggagttcctggaggaagattccacgtacgactatggcagggagctcgcagcagagttcattcagcggctgggattcggagacaagggacaacctcaggccttgttgaatggtgttccaatgcccagcaacgttgtgaccgccgatagcgacttcgaggaggctattttcaccgagattatgacccacaccagcaatctccaaaaggctgtgtacaaaggtgaactgacagacaacgatgtagccattgattatctgatgaatcaacctcacgtgatgcccagattgaatcagcgaatcctaagccaggaggatgtgaaatatcttgatattaacggcgtggcctacaaaaatcttggcaatgttggagttttaaatcgtctgtctaaccgggatatgaccgctacgctaatggataatcttaaatactttggtggcaagaagtctacggagcttattggccgagcatccctacagttcctaacgatttgggtgtttgctgatttggaaactgaccagggtcgagatctgctcacccatgccctggactatgtccaaagtggagagagtgtgcgagtcgcattcattccaaacactgaaagctcttccgcctcaagccggaggaatcttaatcgattggtttgggctgccatgcagagtcttccaccaactcaagccacggagcaggttctcaagtggctaaagaaaccaaaggagaaaattgagatacccactcagctcgaggatatcctgggatctacagagctgcacctgaagatgttgagagtttattcccagcgagtgttgggtctaaataaatcccagcgtttggtcatcggtaatgggcggctttatgggcccctttcgtcggatgaaagctttgatagcgccgatttcgctttgctagccaggttcagttctctacagtatagcgataaggtgcgtcaggtcctgaaggaatctgctcaagatgtcaatgaggaattcaacagcgatacattgcttaagttgtatgccagcctgcttcccaggcaaaccaaaactcgctttaagctaccaacggacttaaaaaccgatcactcggttgtaaaactaccgcccaaacaggagaatcttccccattttgatgttgccgccgttttggatcccgcctcccgagcagctcaaaaactaacgccaatacttattttgcttcgtcaagtgctgaactgccaattgaacttatacctgattcccgtcccccagcacagcgatatgcccgtgaagaacttctacagatacgttgtggaaccggaggtccaattcgaggcgaatggaggccgatctgatggtcctttggccaaattcagtggattgccagccaatcctctgctgacccagcagctgcaggttcccgagaactggttggtcgaagctgtgagagcagtttacgatctggacaacattaagttgaccgatattggtggacctgtgcacagcgaattcgatctggagtatctgctgttggagggtcactgctttgatgctgctagcggcgctccgcccagaggacttcagttggtgttgggtacccagagtcaacctaccttggtagatactattgtgatggcgaatttgggttatttccaacttaaagccaatccaggagcttggtccctacgcttgcgtgaaggcaaatcggcggatatttatgcaatcagccacattgaaggaacaaatacccatcattcggctggctcttctgaagttcaggttcttataacctccttgcgatcccatgttgtcaaattaagggtgtctaagaagccaggcatgcagcaggcggaactcctgtcagatgacaacgaacaggcagcgcaatcaggcatgtggaacagcatcgccagcagttttggcggcggcagtgccaaccaagcagccactgatgaggatacggaaaccatcaacattttctctgtggcatcgggacacttgtacgaacgtcttctaaggatcatgatggtttcgctgctaaagcacacaaaatcacctgtgaagttctggttcttgaagaactatctttcgccgcaatttacggatttccttcctcacatggccagtgagtacaacttccagtacgaattggtccagtacaaatggccccgctggctgcatcagcaaacggaaaaacagaggaccatttggggctacaagatccttttcctggacgtgctcttcccgctgaatgtgaggaaaatcattttcgtggatgccgatgccatcgtaagaacggatataaaggagttgtatgacatggacctcggaggagcaccctatgcctacacgccattctgcgattcccgcaaagagatggagggcttccgattctggaagcagggatactggcgaagccatctgatgggcaggcgttaccacatttccgccttgtacgtggtggacttgaagagattccgcaagattgcggcaggagataggctaagaggccaataccaggcacttagccaggatccgaacagcttatccaatttggatcaggacttgcccaacaacatgatccaccaggtcgccatcaaatccctgcccgacgactggctatggtgccaaacgtggtgcagcgacagcaacttcaagactgctaaagtgattgatttgtgcaacaacccgcagaccaaggaggccaaactcacggccgcccagaggattgtgcccgaatggaaggactacgatgccgagctgaagaccctgatgtctcgcatcgaggatcatgagaattcgcatagcagggactcggcagttgatgattcggttgacgattcggtggaggtcaccactgtgacgccttctcatgagcccaagcacggcgagctgtgatgaacgcgtagttaaatcaacatgtttagtgaatttaaatatcgatggataaacacttgattacttagctaagagccatctccgaaataacgactaaacacatttgtacattttaattagaacataatgcgattgataacgtaaacccaactcaaaaagaaaacagctcactaaagtctgaattgtgttttgtaactcgatttcgaacgattttcttgtcttgcattccaagagctactaattaagttaagccgaaattaaatgtcatcatactaaatacgcgcctttaagttgaagattgtcaaatgtattaaaagttggagtaaatagtaattaattcagcgtattttattaaccatttatttgggatggtcaggccactttaccccctcgaaaagctttggtgactgcgtatgtgcgttaggtggcaacgccaaattcaaataaagttttcaaaaatctcagt

SEQ ID NO: 15006 - protein, 1548 aa, DROSOPHILA
MLRAVALCVSVVLIALYTPTSGESSQSYPITTLINAKWTQTPLYLEIAEYLADEQAGLFWDYVSGVTKLDTVLNEYDTESQQYNAALELVKSHVSSPQLPLLRLVVSMHSLTPRIQTHFQLAEELRSSGSCQSFTFAQVGSELACSFNELQKKLEVPLAKDSLDASVVTYSFDHIFPGSENNTRTVVLYGDLGSSQFRTYHKLLEKEANAGRIRYILRHQLAKKDKRPVRLSGYGVELHLKSTEYKSQDDAPKPEAGSTSDEDLANESDVQGFDFKVLKQKHPTLKRALDQLRQRLLQGNDEIAQLKAWEFQDLGLQAAAAIAEIQGDETLQILQYTAHNFPMLARTLLAHKVTDGLRAEVKHNTEAFGRSLNVAPPDGALFINGLFFDADTMDLYSLIETLRSEMRVLESLHSNNVRGSLASSLLALDLTASSKKEFAIDIRDTAVQWVNDIENDVQYRRWPSSVMDLLRPTFPGMLRNIRKNVFNLVLVVDALQPTARSVIKLSESFVIHQAPIRLGLVFDARDANEDNLADYVAITCAYNYVSQKKDARAALSFLTDIYAAVGETKVVTKKDIVKQLTKEFTSLSFAKAEEFLEEDSTYDYGRELAAEFIQRLGFGDKGQPQALLNGVPMPSNVVTADSDFEEAIFTEIMTHTSNLQKAVYKGELTDNDVAIDYLMNQPHVMPRLNQRILSQEDVKYLDINGVAYKNLGNVGVLNRLSNRDMTATLMDNLKYFGGKKSTELIGRASLQFLTIWVFADLETDQGRDLLTHALDYVQSGESVRVAFIPNTESSSASSRRNLNRLVWAAMQSLPPTQATEQVLKWLKKPKEKIEIPTQLEDILGSTELHLKMLRVYSQRVLGLNKSQRLVIGNGRLYGPLSSDESFDSADFALLARFSSLQYSDKVRQVLKESAQDVNEEFNSDTLLKLYASLLPRQTKTRFKLPTDLKTDHSVVKLPPKQENLPHFDVAAVLDPASRAAQKLTPILILLRQVLNCQLNLYLIPVPQHSDMPVKNFYRYVVEPEVQFEANGGRSDGPLAKFSGLPANPLLTQQLQVPENWLVEAVRAVYDLDNIKLTDIGGPVHSEFDLEYLLLEGHCFDAASGAPPRGLQLVLGTQSQPTLVDTIVMANLGYFQLKANPGAWSLRLREGKSADIYAISHIEGTNTHHSAGSSEVQVLITSLRSHVVKLRVSKKPGMQQAELLSDDNEQAAQSGMWNSIASSFGGGSANQAATDEDTETINIFSVASGHLYERLLRIMMVSLLKHTKSPVKFWFLKNYLSPQFTDFLPHMASEYNFQYELVQYKWPRWLHQQTEKQRTIWGYKILFLDVLFPLNVRKIIFVDADAIVRTDIKELYDMDLGGAPYAYTPFCDSRKEMEGFRFWKQGYWRSHLMGRRYHISALYVVDLKRFRKIAAGDRLRGQYQALSQDPNSLSNLDQDLPNNMIHQVAIKSLPDDWLWCQTWCSDSNFKTAKVIDLCNNPQTKEAKLTAAQRIVPEWKDYDAELKTLMSRIEDHENSHSRDSAVDDSVDDSVEVTTVTPSHEPKHGEL

SEQ ID NO: 15007 - DNA, 17951 bp, DROSOPHILA
ccatagttctgcagttaactttgccaacatttcacttaccaaaatgactgccattggagcagctgctaaacaaaactggcggatgtgtcgagtgtttttaattttcgcttgagcggttttggttccgcttatagctcccaacccccaaaaagtcaattgtttgtttggcgcattatgcaaattatgaaactacaaaagaaaactttcaggatttttacgccatttttttgttgggccccagctgttgacatttgctgccaattttcggtgagcaggcaagcaaaaatatttccccagattaaaagaaaatagttcttacgtatgacaattttcctccgctttatttgatatatgtttatatagtatttgtatattccaagacttaggggtctagtacaattcgattcgtatcgtagaaatgatgcagcgccggtagaaaatgtttaccacagttaatcgtagatctacatctaagctacataataaatatgccataataataattcgataaatatctaaatatttggatgttcatatgtgattcatacttaaaacagtattcaatatgcaactaatcgctagtcgtaattttggcccgatatttcgctcgtatgggtgtgatgggaaaagtttaacaaaaaactagctgacgattgtagcacatacataattaaatctaaacaattgcacaaaacaaaaactcgcataaataacttgtgacttgtgtgatttgattcgatatatgttcgattgttttgtgatctatgtattttggtttctttaagtgttccttgtgagtgttgttgtgtatttacataaatgaactacgaacctagaaaaatgagtgagatataagtattaacaaatcatacatttggcatgtattttatgtaagtgtgtatatggcggccattaggaaacccattttgccaactcatccagatatgagcggaatatcctagagttccgattcaacatccatgtcctgtttccaccgattttaggccaatggcgttggcgacattgtggcacgtgtcgttctggtaggcgacttggtgggcgtggctgctccactgctgttgccactgccgcagccaccatttccatgaagccggaaaagctcacccaccgtaatggccacttggacggcacctttaccctccagcacgtcggcagcgcagcaaattagattctacaaaaataagatttacacaaatacattaagttttcattgtgtggttgagaaaattttggaaatcctcctttgtattttgggaacaggcgtttagcacagaaagtgttattacttcactacggaagtaattttcattgaatgattctattcgaagtatataactttgtgttaataaaacccaaccgtattttaaagttttaatttaatccgaaaaatttaaaaataaagtttcctaaagtactggtactccacagtttgtaagcaactgcatcatgtttcggacaaataattagttggtttgagtcttggctcagacacaattgttataaaactgtaaacgtttagtttttggtatatttgtcgtatattttgctctttgatttcacttgtatatatagcgcttatttgacattttgtgcttaaatttaaatgcaacggggttcattttcatttggtttggaagtatgcgaatggaatattccactgacaaatgttgacaaaaagttttggctttaatttgcattttggagatttcttatatatttttaggtatatatgcatgttaaatacgtgttgattttcataaaaaatgtatgactgattacagctgcctcaatgctttgtcttcccttcaataattttgttagacaaaatatatatttctgattttagacgctagataaatatatatgtttatcttttacttctgagtgttggagattgtgtttcttttagaaatttgattagatttcatttttcatcgtttaagtacaatagtatgcctaaattaataaactattaataatgttaggaatgttgttagcacattatgatgttgggtcatgtgtgatcttggttgcaaattaaattgatagagaaaagcgtcgttttagttgaaaaattattgctttttagaaggagagattgtaatagatcatttgggcagacaagactgtcgccgctcttcattcaaaggcactgttttgtgattattatttatatttaagtggtcgtttctatatgaaagtgtgcgcatttaaattgattcagaaaagaaagttatgtttggtgatgcagttttaaaatattcacatatttatgtattttgacacaattattttgttatatattaaaaacaatgctgcaatgcacttgacaaaatagacttttctctaacttctctctggtcaaacgaatccttttcaaacggctacattggttggctatagttttatgtcttcatttataactgctacaactattttgagtgtccctgcttcaagtaaaaccacacagcttcaccttcctccagtagctccatccttacacttactacaagagttagctgtccatcaaactgtaacaagtctctttcctgctcttcatcctaatcttcaaactggtacatgtatatcgtatcttttctatctctaccataattgattttctttataaatagaacttaaatcgattcagtttcgttgtaacttaggtcaatcatactttgaatggtttgcacaaatttagtgaaatgaagcgcattgttaagtgtttttgttttcagttcagcacgttttgaggcgtggctaagcaaatgtaaatttcgaaattgtttctttaattctaaatccaatttagagttcaatagcttgtacatgaactaggaatatgtggttactcggggggtatttataaatcggctctatttcaattattttctacaggtatgcacaatcgaagtcgttgaaaggtagctttgcttatagtcgagttatatgtaggtgatataaaaataaatatgtacttatgaaatgctaaatatagttcaatttgtagtatacatataaataatataaatatgatatatatattaatgtttagtccggagattattataaaatctattaaattaaaacagtcattattagtcatagtcatcatagtcataaagtatttgtgaatgttacttattttcattaaaatagttttgaatgtaaaacataaatatagaaaaggttttttttgaaaggaactttgggtttaaacgcaaaaggagcatttgtaatttctggaacttatatttgaactattcaataagaatatattttatatatgattgtgcacacccttaaataatcatacagaaataggagccaaatattgatttgaagtctttgcgtttcctctcattaaatgcctcaatgtgttctgcttgtcttttggggaatttcaatttcttaggctaaaaattaggtatcgaatgtttcataaatatgggacgtaatcctaagcagtaaacaaaagcagcctcaagaactcactacccagtggaaaagcgcaaaagcagctctcttaactctattgtttttagatcttaactctactggcaaaccaaggcgataataaaatcaagctgtactatatagactagccaggcagcgggaaaaataccagccagaggaaggtggcgatgaaaacgcatgacaggatcactgtcaatgtatgggaatcgtgctttaatatcgaagatccagcttcgttggtttttgcttttattttctgctcaagctcgagttccttggttttctccttcggcaaatagatgctgaagacctccagctttggttttccactcttctgctgttcgaagaactcgatccgcttgctgatggcttccttggtcgcgttgcccagtgcggctgcatccttcaagtcctctgattttggctggtaagggtcctcctcttgcttttcgtctattatttgataatggcccgccggtcctgcggcggccacatcgtgctcattctccacaatcgtatgcaacattctattgttattattgccctgaaagttatgctgaccatgggcacttagcagattgtgttttattttttcatatgtcttttgcttcgccttcagcagcatttgacccactgtcgctagttgctgctgccgcttgcctatatcatcatcacgatcctcaaccccatcatcattttcagccctcggcaggccattctcatacaaaacgtgctctagctgctgctgttgctgctgcaacagcaacatctgttcttgctgttggctgcaggtagttggctcactgaattgctcttgctcgaagtgttgctgctccagctgaagctgaagatgatgatgaagctgctgatgatacggattttcatccatggcaatcagagcggacactgtgcgcagtagggccaatgcattgggcactctattaatatggttgctgctgctgttgcaatcgtcgctgcattgcaggtggctgctgtcattgctgcggctgatgctgccatcatcttggacataaacatcagcatcatagtcatcgtcagcacgtggcaattgtggttgttgcggttcaatttgtggcacaacatcttcgcaggagcaaatcaactcctgcaaccaacaccaataacagatgcatcagtttcttgtttgtattcttgggtattttatgtgggtgtatgtgtttgtgtgtgtttttgtgtgtgttggggttcaattacacttaaatctaaactaaagttgtctaggacaaaaagcgaatggaaagcactcaggatattaaagcattcaaccaacgccaccttgaaccattaagctaaaccataacttgaactacagaagaaacatattcagagtacagtgcattttgagtgaattaaaaaagattaactttaatttcagtcaatttcaacacgagtatttcaataaattgtctacaacaagaaaggaagcaaacttcggctggtcgaatagaaaccttgaatgatctaaggctattattttgaattaatccctaaatttgtatcaattagaaaacaatctgatcacaaacatcgaaggtaaatttttttacatttacttttcgattaattctataattttatattatatagtgatccgatcacactcattccgacccatattctaccttaaatagaaaaacgactgcaatactatgagactagtgcgcgtaaaaacgaacagacagacagatttgatttctgcagggtataaaagtattttttaataataatttatttaactccctttcgagatatttaaattatctcctttgactttcacatttcaaaatgcactatacttctatgacagaaaacaaaatgttctacgcacctcatctacgccaatgcgtcgacacgcctccagaaagttatccacattccgccggcacctggccattgtcaacttattctaaaatgcagaaaacacaataaatattaatataaaaacctaaaaggaaatccgataacacttacgacaccgggagatggcacatgaatgctggccactgatcgcggacgcacatagttggccaaatgacacagtataaccccatccgtcagagcagaggcaatatccacaggcaacgtcatcttgagacgcgtctcaatgatctgtacaagcagcaaggtaaactatctttctgatttccaaaaattctgcccacacttacagttctcagctgtgacatcaactcagtctcctccctttggcgatcaaactcccggcgcatggtgaagctcagcttctccgcggggatgtcatggttccaggtcaccgaacgatgcgtctttactgtgccaagtttggtggttgagctgactggggatttaatggtggtgctactgactattcccactgttgtttggactcctccaccattggacgtattaaatttgcttgtgccattcttcatgggactctgtggcttaacgtagcccaaacaatccgatgaatttgcggagcgaatgtcggatgtggatgctggctttatttctgtaatccgagagggaatcaccttctggatgggtttctttggtataacaacatcatcgactccatttccgttcgcgcttccatttccattcccattgtgaccaatttggttgctattctgtttcataatagactttggcagtgtgttcgaggaagatccgtttgaaatgctcggcggtgacggagaaagatcctcgtcgtcattgggactgtggttggcattcggatgcttttgcttatagacgctgatctcctggttgcgctgctgcttaagggcctccttgtactccctgttattcgtaaagaaattcgtaaattaaaaatggatgagcacaattgcagtgtacttacttgtaggtctgaatattgccaagaccttttccggatcttccattggcgtggtgaacagtgcgctcctggtggtccagcattatgtcatcgtcctgatctggcgacgatccattactggagctattcgagtgtgcatagcttaacttgcagggcgatgctgtgggactcaaggtgagactctcatccacaatggtgctagtgctggaggtaagggatgcgtccattagatccgcttgcgaatgaaccgcacttggcagcgtcctgggcaaagtggctgctgtcgaattggaaacacaatgcagcggtgaatccgttttcgatttagtaggagcatcgtgcgaccagcgcttgtccaaaccatcgctggtgttgtaacccgagtcgacttgatgcctccgctggttgttagtgctgccagtggtgctagcttcaagaacattgccgctggaattatgtcgaggagctcttcgcaatgtggtgtacccatcgtagttgccacctgaccgggatcccttctcgtccttggtggcctgcgtttccaaaaacttgaacacgtgcaccaggccgcgcatgcatagctgtaaggtatgaagcaaaggtaatttttaagaatatgtattatatatgcataagaattataatataaacttacgcttgctggaggcgaggtcagaggattgttctctagctgaagctctaccaaagtgctcatgtgacgaatctcgagaggcaggctagcgatcttgttgttgctcacgtccagtgatatcaaactcaaacaggtaagctctctgggcagatacagcaagtgattgcttctcaacgagagcgagcgcagggatcttagctcacccagacgagcgggtagattggccaactgattatacgaagcatccagatcggtcagtgtctgatccaatcgacccagttcatctggtaacgaagtcaatcgattgttggaaaccagcagaacctgaagaggcaggaaacaaatctcgcgtggcagcgaggacaactgattgctgcgcaaatctaaataggtcaacgatgatagctgcttcaccgattccggaatgctgcgaatcgtattgtgatacagtagcagggtctctaggaaggcaaacgtagtcacttcctcgggcagctcggcaaatctattccgggaaagatctgtaaatggaagaagcagagggcatatattaatttgaatccagctgagggatgtggagtgaacccgaacccttgttccatttgacacgcacttccatttccatttgcactccacgccacagtggagcgcctgacctcaatctgccggcaatttgattcgccccattccagccaacaggaagagtaatgctaataaggccgcgttactcgactttcgaatgccctctggtgtattcgatttatttatattgttttatggaattagatcaaataataactaatcaaaagaaagaagcgcacagagatttgttttgtccttggggaatgtcgaagatttggaaatcccagcataccctttggcataccggagagaatttcaaaaagtgggcaagtgcgttcggagtgggcaattaatttactaaatgaatttgcatgcaaaatgagcgcaaacagcacgaaaactgcgactttgtgggggagcggttatgaataaatcaaccaaaaaagaaggaaaatgaaaaatactgcggcggacaggcaggaggtgaaatatatgtgttaatttttaattcaatttacattttacattaatatttgttgtgcttaaaatgacgattgtcgccttaatcaaattacaaattggattttaataatttaaaagacaacgttaaattgtgaacaaagaaatgataaattgggcagatcggtataagtgttttcttctttttgaaatatatggatctcaaggataattcttatatttgggtttctacacccggacgatagagtttagttcgtgttcctttaaattttgcggctgcttgtctcagtcgcatacacgttatgcttgggatatttattatcaatatgatccgatattgccaatatcccatatgaggccacttgttttgaagttagttccaagaaaattcagtttgttaggggaacgagatagatttcgattagcggatgtagtgcgtttattccgaaccagctggcccacgatggcatccattagacaaaactagaaggcagcggaggagattgggcagatagatcagaaggctgttggtaaatagccccatacaggtctataaaatttttgatgttactttcaattacaacaaggcatattcaaatggtagaaattcagtatgtaaatttgaataatgcggcctgtctgctggtctacacttcaccttcttcaagtagttaaagtacttggcaaacagtgcgtatgaagttggtgaattttaatagccatatcgtaaaaattaacgacccgcggaccagtctgccattacctcctcaccttccttcgggcgcattttacgcaacttgccaaaaacacagtggaaaccagaaatgagcaaccaaaactggctagcctgaataagtgactgaatgattgactgactgaataactgactgcggactggcgacagctgcgaactgatttacgcacggggggagtcactgagactagacattgtagactatgcacatatatcttcctgcgaacaaaggcgctgaatgaatgggaacttgacttcggtagcatctagacattaacctgccacatggagagctcctactgctgttgcatacaatatgagctcacagtgatgcaacagttctacactaacagaaaaggtaaacttaagaactttaaattatgtgtgtcttctaaatgatttaatgcagattctcgattaagaaaacaacgtagatttgcagcactaaattaaaaactataacatatatactataacatacatatatagttagaaagttacatctagaaaagagttgcattgccacttcttgccacatattttctacgagtgcattatcctttttgtgttgcatcctgttaagttgaataaacccttgccggccaatgacgtcggggtgggatggcttgggttgaaaagttgttcgaggatgcggaaattggatttccctgatgcggaggcatcaatttaggacgaaatgggacaccaggaccgactttgtactttgaacctgcgggcccgtgacgaagatattttttatctcgagcgacacctgctcaattctgctttcactggcaattttccaagagtttccactctatttccccgctcattccccccttttttttctggccccagctggcttttggccaacttcaacgcaatgcgacaggcgaaaatttgtcttttacgtctcgcacaataaatcaaattgtttgacacgccgaaaaaatgcaaagtgccatcattgttttgtttgcctctcttaatactcgcgttactttttaattttcatttttatttgcccgcctgaggctcaccaaaccataatgtcataaatactgcagaaattgtcctcggaccacgcaggcatttcatccaacctaaaaaaaaaatagggtgcgcctggggattcgaaacaaacatggattcgagcaacgcccaaagtcaactttgccaacttcggcgcacgcatggcaatggagcaatttgatgatgtaagtggagcagggaacgtctcggttatgacgctccttggaggtaatggggattcaagcaattgcatttgcataaattcctctagaaaactgaataagcgcgtggaaattaaaggtaaatgacagcaatgtcgatttagtcatttcttagttcagaccacccatattgaactgcctattttcatacatacgtagcagctgattgttgcaatatatttacagttttatgattgaagggattaggccataaaatgatagatatgaggataaagatatggtatatggtatacggtatcagtttgataaggaacctactttgataagctttgttaaatgatatttcaatatttcaaaaacctatcaagaggatcgatgagtgtggatttctaaaaataagtaatataaatataatttcttgctactgaaactctcaaccttaaaagttcatatccaaacataccccggagctggtaaaaaagtttataccacacaaaaataaccccccatgtggcagacattgagtggcatttccattttgaagggcgtgggcccaaaccggaagaagcaaaaaattaaattgatggcgctccaactgtattggcaaatggagctttatatcgttgccctcagctgtttcgtttttggtaacgttttggtctagccatgtgggcggcggattctccaccaggctagaatggacctggagcacgttacccataccgtcgctactttatttggcttgcgtggtattttattttgactttgccgaatatgaatatgtatatggatgtggaagcctctgcatgtctgtacattgatattgactgaccattatgaaaacgaaggggcacaaacgggcacagtggattctattgatggatttattgaaattaatttgtctgagtgttattgctaaattggtgggccttaagtggggcgatgggaatatgaatcattatgcatagggcaggagaaaattattgggtgctctgcaaacatatgctggaacaggaagcaaactatatatatttacataactgggagccacacataaatgctgataagccactaaaccaatattcacattccttaaactttttttttatcgcataacattttcccagaatcaaaacataggcaattcttttagactcgaaaccccaaacgagccacttagcaataaagttttgtttatttatattacactctgtggaattgtattgaaaaccacttgagaagcactctcatatatagggcaatgtcccaactatgtatgtgcgcacatcgaactaatcaaaaaaaataatatggaaaatcgcattgggctcttgccccatcgattgattactttttgatattgaaagctggaagcactcaaaacacagatacacacatgtttagatagatagataccgattttaattcccaacacaaacacacacgcctacttccctagaaaattgtgttctgttccactttgtttattttagacactgcaatttcgcgcagcatttcttcttcatcgccggtctgttctttatgcccatttaatcacagagcaaacattggaaatctgtgttggccaagtgtaaacatccaggaaaacaaatatttaacaaatatttggaagcagctatgaattcgttgtttttcttgctgctgctgattaatgtttttcttccaaattcaaagtgtaacagctgtgtttttctaagtcacaaacaaacaagggaataaaaggttttcctcacagtattacctcgtacgtaaaagactcttgatattttgacattttattttttaccattttgattgagcacatttaacatactaaatatgggttttcggtaattataaaatattcccaatagatatagctaataatccattacagcgcgtgcccactgtaagcaatgcttgtaatcagatctatcttttgttctcttagattctcttttatgagcgcgtgctgtgcacagcaattaagaaactagaaacgttggcccgtcgcctgttaaataatgcttacatttataaattaatggaaatgactcaatgcataattcgcggttatctgtgtcaagtttgtactgccctcaatttgctaagatatgtacatagatgcatacatatatataaataaatacgaacatatacatacagctacataagtcgttcaactgcagataagcaagcgtggagacaagcaaattgcatttatcgctgaaataataatgttatttttaaaccgcaataagcagaatgagggtgcatttaaaaatggatataatataaggggtacgtcgtgatccatatgcaatggccaggaattgtgtatgtacacatgtagtttctattcattgaataatttgtttaccaagaagctttcaacgaggcataatattagtgtgggaaagccaattccaaaatattcccagtaacttttggcactttccacctaaaatacgaaatatttctgtgggaaggttgcctttgaaatgaagatagtgttttttgatcaatagtcagtaatacatttcctttgacatatcaatttcttgggtatttatttcagaaccgattttctgggaagtactttatcatgataccatcgctaagtccgatgattttttttatgttttcctttctgcattgtgcatgcaagccatgaaccgtgcagtttgacagccactgaagataagcgacgtgctgcggcggtcacatttcctcttttgtctgctgcagacggagaataaatagcaataaaagtacaaaaaaccagactagctgtctttttatgctccatcatatttacaatgcaaacaacaaatatacgcgtcggatacacacgacaaaagcatttcccctcgctctataagtttgctgttgttttgtttgccggtactttgacttccccaaacagaaaagatttcttgttctcggtcacttggcagacgttttgttcagtctggaaaaaagagtattgtgactaaaagaaaatgcaatccaagtgtatactaaaaaagcttatgaacccctgcttgctattaatgatatgaattattgttttgacgtaaaatatgaacctctcaatttcgtaacagttaccaggctgcaattacagttttgttattaaataaataaatattattaaaaattcaaactttgccagagcttaatattgtttatcggtatttttaaacaaatcgaagctaaatggacaagtaaggaaacgaaactgcttttttatagtatgacactgtggatccacttagtaacgatggacaccaggggattcctttttttgtgacaaattgatccaaaagattctaaacggcctttttatggctataaaatatccaagggagcgccactgttaaaccgctcagtaacgaaggacaccagacgatcattgctgctacatttccatacatatatatatatttattttgagtgagtttgttatattctgaaacagttttcgctaaactccctgtttatggctataaaaagtccaagtgggcagcacctttgtcagctgctgattcctaagccggcgccaactttgcggtctgcgcagctgctgttgctgctgcgagttgaagttgctgctgcatgttgctgccgctgctgctgctgttgctaccttcttgcatttgcttgggcttctcttctcacaatttctgctgaggccagctgcaattttgtacccgttttgcgctttttccttctcgatgcaattactttaaacaatttcctgctgttgatttttcgcttcactcgattgactctttcttgtgccgtcctttgtctaggtttttgtttatggttctgtttgatttgcgtgacacgcgtgttaattaaacgccccaaaggaatgcacaaaagtgtggctacctcccacccacaccgcaacaacaaatgattttaggaaatgctgacaggcgcctgcccattccccttaatttcatgccatttcgggggttgcaaatggcatgcgtgcaaataaagaaaaaagaaaaatggtcggtgtatacaccccccccccctcccacattttttctgtttcagtttctttgactttcttttgctttagaatcatcgatttcttggaaactcgaaacccttgtggttgcaagccattaaggctaagagccgttgccacctcttaaagtccaccgcccccacttgcgaaaacccttcgccgagggtggcttcattgttctcgaagaggcaatttgtagaggttcttcgctagggtgtatttacaaatattttccccaaagattaacccctaacgagaggttcagcgtatctcaatattccccctgttttctattttccacatgtccattcacaccaaaaatccagcattttaattagtaattagtcacgccttcgcagtcgatgactcaattgctggtgagaaaacgcatgaaacttattcgaaaatgaacgaaaaaccggaagctcgttggctctccatgtggggaagggttttccaaagaagaagggatcgtttccccatttcgaacaaatagcgcgtggccataagtcacggattgtcacagcttaattcgaaaatcaagtcacgtaggcggaaaacggggagcggagtggattggaaggaaattaaaaatatgtttcctaggttagggggagattaagttttatctctttaaacacttctagtatcctaaatttaattgaaaccttccgaaatttgttacgtactcttttcaatatcgaagtgcattgttcaattcagtttcattaattagtcaatttatgtttgctttataaaaatgtaattttaattgaattaatggtagacaaactgagaattttgtttatttttgttgctcttcaattccggtattatccatcatccaaggcactggctaagtggaatttttattgaattctttccctattcttttaccaaattagttttcaatttatgacacaatttatttttatctctcttccacggcaattaatcttcgcagtccaaaaataaaaagtttccttctattccagacatttccaccgaaaatacatcaaaatacagtgcgtcctctgaaaggtgacattccacgttcataataagtcttaaaattaataataacatctcatagttggaatttactttgtgtaagtaattaaaagaaataaactaaaataattttgtagtttataatctgtctcgtttcaatgaacataatcttcgatctgtgaagtattgttagatggaaaattgccatatctcgctttttcagcgattagaatgacaactaaccttatctacgtatcctttcgcctttcagagcgtttactgtatgtgtatacaacaaacacaagtgaaaatcgatgagagacatgtcccgttgtgagaacatctgttcgagggtagcagcagctgtgagagggggcggggtcctgcgagagggcggtgaattttctgggtgggtatttcccatttactatttctccgctggtgcatattttttggtcctaacaaaaacgaaagttggttgaacttcgacaaaattttcgtgccggctgcggcgaaaataaaaataaataaggataacacgaatagtgcaaagtggcgaagagcgaataacggcggtaattattgtccttgagcgcagtccgaaaagggagagaatgggagagccgcagagagaaagagcagctgatgggaggacagaaaaggaggaaaaggatgaacctccgacggctgctgcaaattattgattttcaagcaacaaaaggaaaattcgccactgcaatggagatggaaaaacttcgttagctcaccggcaacaaacctcctttgcttaaatgccgcaccctaaaggtatacacatacgccaaacattttcgataagcaactaatttaattgctttatcagtacttgtacatatgtaaactctacttttactttttctgacgtcaaaagaaaactttataactaacaattttctaatcaactttaataccatttaactttgtaatataaaaatgtatgctttttccaataaaatgttattaacttcgtacattaagtattattaagaacagtttaaactttacttaggaagtaatgaaaacccaattttttccggagctacgaaaccggcttgaagaacaccttttctttgttctcccttacgaatatacactatacaatagcggtacgcacctgcgatgacagtgtcggtaagtgagtacttcgttccagtcctgggaaagtccttcagcttgcgattggtcaggatcagttcgccgctgaagtgcgcttcttccaggattctttccagggagcgcgtcagctgggaatgactaagcagggcagacgaggtggaggaggaggtgtttccagcgtggcctattccagatcccgatcctgttccagatcctggaagggaagccgacccgctgccgatggcgctgccagcggcgctgccgacgccgactgcgacgctatgtaggcgttggtaaaccgttgctgccatttcccgtgtaggcgtggcgacacttccacacacttgcacacacacacgcacgcgctaaactatcacaccgataaggaaacggagtgaagtgccgaaagaaaccgaaactggaaactaaatttgctctattgaaacgcacgcatctcgattatttttcatttagtgtacgtcttcttggctcattgataagatttctcggaattggattttccttttgcggcttccttcttgcttcctcttctttgcctcctcgcacacacgcgcactcacacacgcacaagctcacgcagcagacgagcgacagtgcacaacgaaaatcgaaaaacaactgaatcggtttatgggatgctacttgggcagcgctggaaacgttgctgttagtttaaaatcggcgtgcctttgagtactatcgataaaataccacagtgcgccgatgatacactggctccatttttatcgcaattcgaaatgtcaacaatcttacattttataatgtaatgtaatgtttgtttattcagaatgatctaccgtttagcatttgccccttcaaatttagggcattattagattactgagtcgttattacaccgaaacatttcatataactacttaaagaaaaaatgaacaaatgaccaggtaacctggtattggaacccggcaataaactggttgaatattaaaaaaccatgttagactaaattataaattcgttaatttgtcagttgtgtgggctcagatcacaaatctgaataagctcagcgacgcttccattattggtgacataatttcatattttacatatttatattcacgaataaatattcgccaatttcctacagggtgtttttgtatgaccgcattactctaaaaatacctcgggaaaatatagccgcaactatcgattggcgcgctgcactggagctgtgctaccatcgctaactcagtgcaacaacaaaattccaacgcaacgccaactaagtgcaaaaaaaatctaaaatttgtgtaaaattgtaaaatcccaatcgcgtatatttctaaatcgtattcgcacagcacagtatgtaaagcactccagtttatttaagtactgtgtgtgtgtgcggtaaacacacaccaataagagtgcgttttcgcgtcccttttcccaccctcttctaatggttccctcttctataactgtgtcaaatcagcagcaacaataaaatatagaacagagctacagcgtgcgtgtgtgtgtgtgtgaaatgcacaaattgataagcaatttgattcaatttaatcttgtttaagtctgatgaatatcagcgcaagcagcccaacacaaaattataaataaaaagttacgaatttatataaatagaatac

SEQ ID NO: 15008 - DNA, 3773 bp, DROSOPHILA
cagcgctgcccaagtagcatcccataaaccgattcagttgtttttcgattttcgttgtgcactgtcgctcgtctgctgcgtgagcttgtgcgtgtgtgagtgcgcgtgtgtgcgaggaggcaaagaagaggaagcaagaaggaagccgcaaaaggaaaatccaattccgagaaatcttatcaatgagccaagaagacgtacactaaatgaaaaataatcgagatgcgtgcgtttcaatagagcaaatttagtttccagtttcggtttctttcggcacttcactccgtttccttatcggtgtgatagtttagcgcgtgcgtgtgtgtgtgcaagtgtgtggaagtgtcgccacgcctacacgggaaatggcagcaacggtttaccaacgcctacatagcgtcgcagtcggcgtcggcagcgccgctggcagcgccatcggcagcgggtcggcttcccttccaggatctggaacaggatcgggatctggaataggccacgctggaaacacctcctcctccacctcgtctgccctgcttagtcattcccagctgacgcgctccctggaaagaatcctggaagaagcgcacttcagcggcgaactgatcctgaccaatcgcaagctgaaggactttcccaggactggaacgaagtactcacttaccgacactgtcatcgcagatctttcccggaatagatttgccgagctgcccgaggaagtgactacgtttgccttcctagagaccctgctactgtatcacaatacgattcgcagcattccggaatcggtgaagcagctatcatcgttgacctatttagatttgcgcagcaatcagttgtcctcgctgccacgcgagatttgtttcctgcctcttcaggttctgctggtttccaacaatcgattgacttcgttaccagatgaactgggtcgattggatcagacactgaccgatctggatgcttcgtataatcagttggccaatctacccgctcgtctgggtgagctaagatccctgcgctcgctctcgttgagaagcaatcacttgctgtatctgcccagagagcttacctgtttgagtttgatatcactggacgtgagcaacaacaagatcgctagcctgcctctcgagattcgtcacatgagcactttggtagagcttcagctagagaacaatcctctgacctcgcctccagcaagcctatgcatgcgcggcctggtgcacgtgttcaagtttttggaaacgcaggccaccaaggacgagaagggatcccggtcaggtggcaactacgatgggtacaccacattgcgaagagctcctcgacataattccagcggcaatgttcttgaagctagcaccactggcagcactaacaaccagcggaggcatcaagtcgactcgggttacaacaccagcgatggtttggacaagcgctggtcgcacgatgctcctactaaatcgaaaacggattcaccgctgcattgtgtttccaattcgacagcagccactttgcccaggacgctgccaagtgcggttcattcgcaagcggatctaatggacgcatcccttacctccagcactagcaccattgtggatgagagtctcaccttgagtcccacagcatcgccctgcaagttaagctatgcacactcgaatagctccagtaatggatcgtcgccagatcaggacgatgacataatgctggaccaccaggagcgcactgttcaccacgccaatggaagatccggaaaaggtcttggcaatattcagacctacaaggagtacaaggaggcccttaagcagcagcgcaaccaggagatcagcgtctataagcaaaagcatccgaatgccaaccacagtcccaatgacgacgaggatctttctccgtcaccgccgagcatttcaaacggatcttcctcgaacacactgccaaagtctattatgaaacagaatagcaaccaaattggtcacaatgggaatggaaatggaagcgcgaacggaaatggagtcgatgatgttgttataccaaagaaacccatccagaaggtgattccctctcggattacagaaataaagccagcatccacatccgacattcgctccgcaaattcatcggattgtttgggctacgttaagccacagagtcccatgaagaatggcacaagcaaatttaatacgtccaatggtggaggagtccaaacaacagtgggaatagtcagtagcaccaccattaaatccccagtcagctcaaccaccaaacttggcacagtaaagacgcatcgttcggtgacctggaaccatgacatccccgcggagaagctgagcttcaccatgcgccgggagtttgatcgccaaagggaggagactgagttgatgtcacagctgagaactatcattgagacgcgtctcaagatgacgttgcctgtggatattgcctctgctctgacggatggggttatactgtgtcatttggccaactatgtgcgtccgcgatcagtggccagcattcatgtgccatctcccggtgtcaataagttgacaatggccaggtgccggcggaatgtggataactttctggaggcgtgtcgacgcattggcgtagatgaggagttgatttgctcctgcgaagatgttgtgccacaaattgaaccgcaacaaccacaattgccacgtgctgacgatgactatgatgctgatgtttatgtccaagatgatggcagcatcagccgcagcaatgacagcagccacctgcaatgcagcgacgattgcaacagcagcagcaaccatattaatagagtgcccaatgcattggccctactgcgcacagtgtccgctctgattgccatggatgaaaatccgtatcatcagcagcttcatcatcatcttcagcttcagctggagcagcaacacttcgagcaagagcaattcagtgagccaactacctgcagccaacagcaagaacagatgttgctgttgcagcagcaacagcagcagctagagcacgttttgtatgagaatggcctgccgagggctgaaaatgatgatggggttgaggatcgtgatgatgatataggcaagcggcagcagcaactagcgacagtgggtcaaatgctgctgaaggcgaagcaaaagacatatgaaaaaataaaacacaatctgctaagtgcccatggtcagcataactttcagggcaataataacaatagaatgttgcatacgattgtggagaatgagcacgatgtggccgccgcaggaccggcgggccattatcaaataatagacgaaaagcaagaggaggacccttaccagccaaaatcagaggacttgaaggatgcagccgcactgggcaacgcgaccaaggaagccatcagcaagcggatcgagttcttcgaacagcagaagagtggaaaaccaaagctggaggtcttcagcatctatttgccgaaggagaaaaccaaggaactcgagcttgagcagaaaataaaagcaaaaaccaacgaagctggatcttcgatattaaagcacgattcccatacattgacagtgatcctgtcatgcgttttcatcgccaccttcctctggctgaatctaatttgctgcgctgccgacgtgctggagggtaaaggtgccgtccaagtggccattacggtgggtgagcttttccggcttcatggaaatggtggctgcggcagtggcaacagcagtggagcagccacgcccaccaagtcgcctaccagaacgacacgtgccacaatgtcgccaacgccattggcctaa

SEQ ID NO: 15009 - protein, 1135 aa, DROSOPHILA
MAATVYQRLHSVAVGVGSAAGSAIGSGSASLPGSGTGSGSGIGHAGNTSSSTSSALLSHSQLTRSLERILEEAHFSGELILTNRKLKDFPRTGTKYSLTDTVIADLSRNRFAELPEEVTTFAFLETLLLYHNTIRSIPESVKQLSSLTYLDLRSNQLSSLPREICFLPLQVLLVSNNRLTSLPDELGRLDQTLTDLDASYNQLANLPARLGELRSLRSLSLRSNHLLYLPRELTCLSLISLDVSNNKIASLPLEIRHMSTLVELQLENNPLTSPPASLCMRGLVHVFKFLETQATKDEKGSRSGGNYDGYTTLRRAPRHNSSGNVLEASTTGSTNNQRRHQVDSGYNTSDGLDKRWSHDAPTKSKTDSPLHCVSNSTAATLPRTLPSAVHSQADLMDASLTSSTSTIVDESLTLSPTASPCKLSYAHSNSSSNGSSPDQDDDIMLDHQERTVHHANGRSGKGLGNIQTYKEYKEALKQQRNQEISVYKQKHPNANHSPNDDEDLSPSPPSISNGSSSNTLPKSIMKQNSNQIGHNGNGNGSANGNGVDDVVIPKKPIQKVIPSRITEIKPASTSDIRSANSSDCLGYVKPQSPMKNGTSKFNTSNGGGVQTTVGIVSSTTIKSPVSSTTKLGTVKTHRSVTWNHDIPAEKLSFTMRREFDRQREETELMSQLRTIIETRLKMTLPVDIASALTDGVILCHLANYVRPRSVASIHVPSPGVNKLTMARCRRNVDNFLEACRRIGVDEELICSCEDVVPQIEPQQPQLPRADDDYDADVYVQDDGSISRSNDSSHLQCSDDCNSSSNHINRVPNALALLRTVSALIAMDENPYHQQLHHHLQLQLEQQHFEQEQFSEPTTCSQQQEQMLLLQQQQQQLEHVLYENGLPRAENDDGVEDRDDDIGKRQQQLATVGQMLLKAKQKTYEKIKHNLLSAHGQHNFQGNNNNRMLHTIVENEHDVAAAGPAGHYQIIDEKQEEDPYQPKSEDLKDAAALGNATKEAISKRIEFFEQQKSGKPKLEVFSIYLPKEKTKELELEQKIKAKTNEAGSSILKHDSHTLTVILSCVFIATFLWLNLICCAADVLEGKGAVQVAITVGELFRLHGNGGCGSGNSSGAATPTKSPTRTTRATMSPTPLA

SEQ ID NO: 15010 - DNA, 2603 bp, DROSOPHILA
tgcgaaaagctcctccgacgaggacgaaactataccccagtcacctgagcgccctaacaaggtgcgaaccatcttctcacgttgctttcagaggacctacgtgccgcgggagccctcacccaacactcaggtctatgcgcccaattccgatacagaggattagcctagatttgatcgtttatcagcaaatacactatacgtctaagtcaggttgccttctggatgcttatgtgcgggaggaagttgctggtaataacatcagccaccctgttttgcaggtcctgggcgttcttctgggcctgctgcagggatgtgtgagccgactgaagactatgttgcgacttgatgagcatttgatcagtggttacgagctgctttgatgcactcaacacaaagctgcgagtgaaagcggtaagggatctccaaatggcaatgttgttttcgactggaaaagggcattaagttgaaatgtttgaaggcacagaattggtgacatacttagtttccgctgaagcagattattccggtaaatggaagccgtgctgttgacctggttgctgcttcggccttgctcgtaaatgtcttcatcatcctcttcggaggcttcgcccgaaatttcagcagcaaaaatctgtcacaaaatggttttattattggactgttatttataaatgatatcctcaacaaccttattcttctcctgcagctcctcgtcggattcagaagcttcaccgctcaccaaatcagccatcattcagtttattaaatactattgtaaacaattttttatttactgcagttacggcgctgccagatcagttaaaactgcaaactgttgctcacatgggcgcagttgaaggggatattcttatgtttgtgatatctatgctaacagatccgtagaactacaatcataaaaattattaacggataatgaatggtattagtaacactttgcccattactcagaagacgatgtaatctcaataagcgcaaaacataaattttaaaagcatttattaaggactttgaagattaacaaactttttacataaaacggagttctgaacagagtaagaacactatttattggaaatatttttgcagagctcctgtctcgaacattcgtttgatgtcagtgccaccgccaatgaatttgccatcgataaagacgcggggaacctacacagtacacaggttacaaatgataattaatctttataatgtaaaatatttagtgcacccaccgttctggcaccggtaatctcgcccagaactgcctgaatttcgttgccatcgggatttccatcgagttctattatggtggcgtccacattgagctttttgaagggctggaacgcaaagatgtttatcactgtttgggacttttcaaggtctcgcaactttctcacctctttggccatcgtgcagtagggacagtaggtcttgctgaatatcaccactttgttgctggcaatggtgttttcaacgaatttcgcctgcttggtggacatgtcgactattggggatctcaaagcggatccaactgcacccataagctcgaaatccaggagggggtacggaaacttggggggcaatgcggggagcaatgaaagctgcgacaagtgtaagctgcggagaattatctctaatttaatcagttttttaatcattgattagcaatcagctgttgttgctctcgccagagctgccacgttgtgaaattaccatctcgtaatcataaacatgtttaatatttaatttaatttccatataatcatgctaagtttaaggaatctattattgtgtgtctattaagaaaagagaaaatcgactgttataaaaacaatgtttattcagcgctgtcaaaacatgcagtgacggtgccacatcaacaaatttcatatacactagggggattcctgaaaattcacttttactttgacttcattatttgaaacttatattaaatttgcctatattttgtccgagatagtaaagcaattttgaaattactttaacaaattatgttaaaatgccttgtatgttaaaataatttggcattgataattaatctttgtatgtccaattccctttaatgtaatagtttaacgttcaaatgcagtaagaaaatgttgtgaaaaaattaagttatttttcagaagtccccgttaaaatattttaacaattacactgcttattgcacttaaaggcacaaattgtagtcttttgcgagatgagcaaacaatgtgagttagccatttagaaattgttccagagcatcctttgtctccacttcgttggcttcaaggacgacttcctccagagccaacttgttgctggtggtttgaatttctaaaaaaaaaggggcgttaacttagtgcatcatatttgtttatgttatcagactaacttgtcagctggccgcgctgtttgtactcctccatatcctcccggaaggcgtcgtcgaagacagcctgtcgttccctctgcagcttcaggagggtctgctcctgatccttgattttggattggtgtttctgggctatttgctggcgatactgctccagttcgttcagtttcttttgcttgtgccgggagag

SEQ ID NO: 15011 - DNA, 478 bp, DROSOPHILA
ccgcattgccccccaagtttccgtaccccctcctggatttcgagcttatgggtgcagttggatccgctttgagatccccaatagtcgacatgtccaccaagcaggcgaaattcgttgaaaacaccattgccagcaacaaagtggtgatattcagcaagacctactgtccctactgcacgatggccaaagagcccttcaaaaagctcaatgtggacgccaccataatagaactcgatggaaatcccgatggcaacgaaattcaggcagttctgggcgagattaccggtgccagaacggttccccgcgtctttatcgatggcaaattcattggcggtggcactgacatcaaacgaatgttcgagacaggagctctgcaaaaatatttccaataaatagtgttcttactctgttcagaactccgttttatgtaaaaagtttgttaatcttcaaagtccttaataaatgcttttaaaattta

SEQ ID NO: 15012 - protein, 114 aa, DROSOPHILA
MGAVGSALRSPIVDMSTKQAKFVENTIASNKVVIFSKTYCPYCTMAKEPFKKLNVDATIIELDGNPDGNEIQAVLGEITGARTVPRVFIDGKFIGGGTDIKRMFETGALQKYFQ

SEQ ID NO: 15013 - DNA, 2991 bp, DROSOPHILA
gcaccggtaatctcgcccagaactgcctgaatttcgttgccatcgggatttccatcgagttctattatggtggcgtccacattgagctttttgaagggctggaacgcaaagatgtttatcactgtttgggacttttcaaggtctcgcaactttctcacctctttggccatcgtgcagtagggacagtaggtcttgctgaatatcaccactttgttgctggcaatggtgttttcaacgaatttcgcctgcttggtggacatgtcgactattggggatctcaaagcggatccaactgcacccataagctcgaaatccaggagggggtacggaaacttggggggcaatgcggggagcaatgaaagctgcgacaagtgtaagctgcggagaattatctctaatttaatcagttttttaatcattgattagcaatcagctgttgttgctctcgccagagctgccacgttgtgaaattaccatctcgtaatcataaacatgtttaatatttaatttaatttccatataatcatgctaagtttaaggaatctattattgtgtgtctattaagaaaagagaaaatcgactgttataaaaacaatgtttattcagcgctgtcaaaacatgcagtgacggtgccacatcaacaaatttcatatacactagggggattcctgaaaattcacttttactttgacttcattatttgaaacttatattaaatttgcctatattttgtccgagatagtaaagcaattttgaaattactttaacaaattatgttaaaatgccttgtatgttaaaataatttggcattgataattaatctttgtatgtccaattccctttaatgtaatagtttaacgttcaaatgcagtaagaaaatgttgtgaaaaaattaagttatttttcagaagtccccgttaaaatattttaacaattacactgcttattgcacttaaaggcacaaattgtagtcttttgcgagatgagcaaacaatgtgagttagccatttagaaattgttccagagcatcctttgtctccacttcgttggcttcaaggacgacttcctccagagccaacttgttgctggtggtttgaatttctaaaaaaaaaggggcgttaacttagtgcatcatatttgtttatgttatcagactaacttgtcagctggccgcgctgtttgtactcctccatatcctcccggaaggcgtcgtcgaagacagcctgtcgttccctctgcagcttcaggagggtctgctcctgatccttgattttggattggtgtttctgggctatttgctggcgatactgctccagttcgttcagtttcttttgcttgtgccgggagagctgaaactgctgctcaaggatgaactcttggagctcacactcctcgcgcagatcctccagcttctcgagctcaatctccaactgcttacccatttcctccagggaattaagaacctgtgagctgttttgcagttgggctatcaacgtgggaattcccgccagactactgttcagctcactcatgatcctgtgctgatggctggcctggtcttggatgccggagatttggttagcaatctgcgcagccttctccgcgttcttttcgttggcgccatgaatctgctgccaatcatcctcgtatttggcaagcaaactgcaaccagctgccacatttaggtgactgggcactccatcggttagctggaagggagcactaagggagaggctactgctcctgctggacgacagactttcgttaaggcccagtggcgaaatgggggtcgtaatcccactggcttggctactccccgagtttccggaactgacacgctggcgatattgctgttgcagattctccgagatcaccaggccctcctggatcgcactgctaagcttctttttcaggttcccgaacatcttgcgacaacggatctctatttatttaacttagcgatttctaattgtcttcgcgctggcgttttccatcgaaaattgagtggtaaataaagaatcagctgttcgggcaggtgctgagagaaaatcggtcatagagagagagagagagcaacagtttgttgccgtacacgagaggcatatcaactatggcaagagctctggcacgtggtttttattacttactaaaactaataagtattattaacatttcaaattttgcatttttattttataatttaaataaaaaaatgaacccaaagttgatattataaacagacacaacagggtatcattcggtggtatatttagtatattactattaaacataacttaaaaaaaaaccaaccaaatatgaatctatctatggcagagcttatatctgtaataataatataaaaacaatattcttagtttggttcaacttcagtttgtttcctttaaaatttcattctgatcttacataacgattctctaactaaagtttagcctaattaatcctcggtcaggtccactgtagtgacagctgtgctatcgtccacttgttgatttgtgctatccgattgagacggatattcaggttcagacgcaggttcagtttcacatgccttttttttgggctcttcatggtactcaattatctcaatatcactattatcaccagattctagggttatacagctgcgtacgctgttctttgcttctgaatctgagtccgagcttgatttattgccgctggactcggagctcgagcttactttaatggtgagaacatttggctcttcgtcgctggatgaaatggacagggcctcgggcttctcggatttgtccacctcttcgtcggacataagttcccggaatatatcgcttataggagaggaggagtgttccttagactcgctggctttcttttggctgctcgggtttagtaattgaccataggccatggccactgcaagagccatttgcttggagtggtttaggaacacatctgaaggcgggggtatacgtaacgactcgctgggtgcgg

SEQ ID NO: 15014 - DNA, 933 bp, DROSOPHILA
gaaaacgccagcgcgaagacaattagaaatcgctaagttaaataaatagagatccgttgtcgcaagatgttcgggaacctgaaaaagaagcttagcagtgcgatccaggagggcctggtgatctcggagaatctgcaacagcaatatcgccagcgtgtcagttccggaaactcggggagtagccaagccagtgggattacgacccccatttcgccactgggccttaacgaaagtctgtcgtccagcaggagcagtagcctctcccttagtgctcccttccagctaaccgatggagtgcccagtcacctaaatgtggcagctggttgcagtttgcttgccaaatacgaggatgattggcagcagattcatggcgccaacgaaaagaacgcggagaaggctgcgcagattgctaaccaaatctccggcatccaagaccaggccagccatcagcacaggatcatgagtgagctgaacagtagtctggcgggaattcccacgttgatagcccaactgcaaaacagctcacaggttcttaattccctggaggaaatgggtaagcagttggagattgagctcgagaagctggaggatctgcgcgaggagtgtgagctccaagagttcatccttgagcagcagtttcagctctcccggcacaagcaaaagaaactgaacgaactggagcagtatcgccagcaaatagcccagaaacaccaatccaaaatcaaggatcaggagcagaccctcctgaagctgcagagggaacgacaggctgtcttcgacgacgccttccgggaggatatggaggagtacaaacagcgcggccagctgacaaaaattcaaaccaccagcaacaagttggctctggaggaagtcgtccttgaagccaacgaagtggagacaaaggatgctctggaacaatttctaaatggctaa

SEQ ID NO: 15015 - protein, 288 aa, DROSOPHILA
MFGNLKKKLSSAIQEGLVISENLQQQYRQRVSSGNSGSSQASGITTPISPLGLNESLSSSRSSSLSLSAPFQLTDGVPSHLNVAAGCSLLAKYEDDWQQIHGANEKNAEKAAQIANQISGIQDQASHQHRIMSELNSSLAGIPTLIAQLQNSSQVLNSLEEMGKQLEIELEKLEDLREECELQEFILEQQFQLSRHKQKKLNELEQYRQQIAQKHQSKIKDQEQTLLKLQRERQAVFDDAFREDMEEYKQRGQLTKIQTTSNKLALEEVVLEANEVETKDALEQFLNG

SEQ ID NO: 15016 - DNA, 5775 bp, DROSOPHILA
gcaggcgtgaaattgaagagcgactaactctctcgctaaacaaacttatgatttcccgcatatttatatggaatatataaattttaagatatatatgcttggttagcattgagattctagtcagcaaacatgaagatttcccagacattatttatgcgattttattttagatttcttaaccgaaatcaaacgaatcttaagtctttccgatatatttacgatgtgcgtaaagctatagctataggatatagtcgcggacgctctctcgcaaattgagagagagagagccggacaggaggaaaaagagagagagccaaccggatgcgtgggaaagttgccggcgaaagcgtggaaaacaaaccgctacgaaggaaagtgtcgccgcacaactcgctcagtcgagcattagacgccaacgcgttcggaggcagctctctctctctctctctctcccgcacacacacactctctgtctctgtcgctcaacggctctttctctctctctctttcgttcctccatctccgtcgcactttctcacacccgcattcacgctatcaacggactccagaggaaaagtgtgaaaagttgtacggccaggggctctgctcttatgtatacaagtatgtaaaatgcggggaaaacagagaaatgcatcagaattccgtgttttctttttgctttatgtcagtttaatcactcttgaatccagcggcagcggcagtgggtagtcgtttaattttagacgcatcacttcaaatgcgatctataaatatggcaacttattttcaaactgcactcgccggctataaatcaaaataaatgaaaatcaaaaatttgtgagacgcctttgctttcgattggcacgcgaagaaaattttaaatgaaaattgcggaaaataagaagcaagaaacctttaattttaaatgttataattcaataagaactaactttagactaagaccactttaccacttgtttaggcacccgaacgcggtaaaatgtttctggcggttaaccagagtctacagaataccagcaagaagaagcgcaagcggcggacggccgaggatgatccgcaggaggattctggagaaggaacgccaccagttcgtcccctggaacccagtgcgtccagtgaccagttggtcggagttggcaatggagccacttgccgggtgtgtaagtgcccgggcaggcagtccttgaccctggtatacatctacctgggcgccctcaccctcatcctggccagcctctcaatcgtcttctacacgcacacccaggacgtcgagtccttgtcacaggtggaagataactattcgtcgaaatcgttccgggtacaattccaggcggagttaatgcgctcggaagaggaattaaggagactggtcaacaggataatcgaggaggagcaggaattggttggcaggtgggcggatcactaacttttcaagctcccgtagtttttggcacataattatgtaccccccaaaatagcaccaccgcgagtagcaccacccaatcgagggatcctctgaagaatgaacgcaagttcacggataacctgattagccacacaacgcgtcccacagggaaacgaatgcgccgggacatcgcctcctccgctccggcatccatgcatggcaagttcaggtagcctgactaggaattcacataactattcttcctttcgcacctctccagctgatccgctgatcgagttcttcaatccgaaccatcgcaaggttttggaggagcaagacaccgagatccgtaagcgcacgggtcaaaagggcgccgctcccggcggagatgagtggatctatctgaacacatactgccgtgttccggagaagataatcacgggcttctgcaagggtacccaggactattgtccgccggcaccgcaaggaccaaccggagaagtgggaccaaagggaccaccgggaaacccgggtctacctggcatccccggtccaaagggaaatcgcggtgatgtgggattaccgggagcccccggtgtggatggcgtgggtcatttgggtcccgccggacctcgcggtcctaagggagatgccggggccaccggaagagccggcttggatggacgggatggagtgcccggggagccgggactcgatggcgtaccgggtcgcgctggtgctgatggaaagaatggcctgcctggacgcgatggcaaggatgggctacacggcaaggatggcaaagatggtctgtccatcacgggacccaagggtgcgcagggaccaccaggcgaacgaggtctcaagggtaagttatcccctttatacctcgattattcctagattgtaactatcttctggacaggcattgcgggtccacgtggtcgacctggcaagccgggaaccaatggcatacccggagtgcccggcatcaatgcctggaagctgcaatatcccaatggcagctcctccaacgatctgctcataccgccttctataacaggtaagttagccgaagggaggattaaggggtggatacataagtataaaacgagattttcctccttgaagacatccaagtgccggacttccaacgcacggtgattgtggaggagggaagatccctgaatttgagctgcaccgccacgggaactccgacaccgcaggtggaatggcgacgtgaggatggtcgcaccattaatgtcaatggcgtagagagtaagtatgcgtgtgaccacttccaattgcccttataatcctctccattcagtggcctccatcagcggacagttcctgagattcaccaatatcacccgacatcagatggcggcctacacctgttttgccaacaatggcatcgctcccgtggcaaatgccacctacctcgtggaagtgcaatgtaagtgtgtggcgagcaaagtttgtagattagttatgaacagagagacttcctatcccccagttgctcccatgatatcggtgtatcgccaaatgatctacgcggaataccagagcagtgccacactcgagtgtttggtggaggcattccccgaagccattaggtattgggaacgtgcctacgacggcaagatcctcgatcccagcgacaagtacggcattgaatcgtacccagaggggtgagtttatataccatcttatccgtagaaatcccttttaattatgaagctccctagtttcaagacaaccatgcgcttgaccatcagtaatctgcgtaaggatgactttgggtactatcattgtgtggcccgaaatgaactaaatgccacaatggtcaactttgaaatagcacgtaagttgcaaaatgtgtgaaatgttgaatatctttgcaataaccccattttttagcccaagatccgaatagtgagaccccgtatgtgggaaataacatgaaggtatacggtcaaagaccgccggagagcgagtgtcccgtttgcgatcagtgtccagatcccaggtgggttttccataatcaacttcccgataagtttttttacatctactccatatctgaagcttgtaccagtgcaaggactccatactgaataactttgaaatccaggccacgggcaatctcagctatccgggattacccaagcgaccaaagagtaagtagatgtcttaacatccttaagcatatacaatataatatctcacccattagcttgctatctgtatgccgtgggcaagcccgttttccacaaggtggtcaatgaaaagttcggctcctggcttagagatccatctccggacagtgatcgtgagaagacgttcgtcactaacgaaaacgatccgtacaatctgtttgagttcaccactcgcattcagtaccgaatgaatagcatcccccggaggaaatacgagattcaagaaggctttcatgtgagttatgaaaagttacaagattttccattcctaatttatttgatttcattattagggcaatgcacatgtggtctttaacggttcgttttactatcaacaaagaaactcggatctggtggtcaagctggacttgaccagcctgaaaaagataagtgagtgttttgcaatgtttaagatgcatattactatcaattgatattccccctagccacacaattgccatatgctggagtggctgctgcgaataggctttataccacggactacaactacatggacttcaatgtggatgaagtgggcctgtgggtgatctatagcacctacaactccaacaatacgctggtggccaaggtaaagtttgtgggtccctcaaaaacttcacccaaatgataaatttttccccagttggatgcggagacgttgaagatgcagtacaactttaatatcaccctggaccatcatcagtttggtgagatgttcatcgtgtgtggcaatctgtatgccatcgattcgggaacggacaagaacacccagattcgatatgtagtggacttgtacaagggcaagctgctcaacacgaatctgcccttctcgaatccctttagccataccaccaccgtgggctacaatcccctgactgtggtaagtgataactaatatctcactgtgattatttacaaacatactatgtattcgatattatatattttaggaactctactcctgggacaagggcaacgcactcacatatcccatacgctacaatgagcagcgtttaatctccgacaatagttaggagtcgctaatcacaagacgatcttaaagatctgcagagtcatggctcaaaatctaactagtctaaggcacaataaataaatgcaaactgttttttttttccaaatgcaaatggttctacatttctcttgttcaatatttgggatcgctggcatgttttcacaatttgtttgctcacaagtctggaaattcactaattgaaaggcacagcaagggaaagtgtgcgaaaatagttgggtgtgaactgctaatttgcaaaaggtggagtggaaaaagtgttatatatttgaagtgaagtgtgttcaggtggggaaatatttattaacacttccgattcagacaaacaaatcgtatcatgccatataattgaattctgttttctctagattaaatttctgttttggttaattagttcacatcgtggacatgtcaagcgaaagaatgctcctttaggcttatacacacattatccccatttcccatattccgtgtaccattaaattccgtttcaacatcttggcttggccccaaaccactttgcagctccacgcctctccattgtcaattagctgcgataatgttgacattatccgggccgggctccattaattatgcctgcttaaaaatgcctggacgcagggcactctgccaattgcagcaacaagttcaccttgtggatgtgccaaaccgttgatggaacagcagggatgtttcatgcgagatgaaagatggacgacggaccacggacgaaggcgaagtgggcgggcgacgaggcaggggctctagttaatttccaggcggggaaccagctgccgatcggtttgggaattggtaagaggaccaccgggtcggctatataggccacatgacgagctgaagctccgcagattgacggactggcagagtgacggcctgtcaataggggaaaccaactgagctcggcacgaaagcgtttcgatgtttggcagagccctgtaccaccccaaaatacacaccctcaatcacactgagccaccctaaacgtagcactgtgctgaagtacactgagaaaaacggaggaaagatgtgcgtggctataaaaatgtgaccca

SEQ ID NO: 15017 - DNA, 2898 bp, DROSOPHILA
atgtttctggcggttaaccagagtctacagaataccagcaagaagaagcgcaagcggcggacggccgaggatgatccgcaggaggattctggagaaggaacgccaccagttcgtcccctggaacccagtgcgtccagtgaccagttggtcggagttggcaatggagccacttgccgggtgtgtaagtgcccgggcaggcagtccttgaccctggtatacatctacctgggcgccctcaccctcatcctggccagcctctcaatcgtcttctacacgcacacccaggacgtcgagtccttgtcacaggtggaagataactattcgtcgaaatcgttccgggtacaattccaggcggagttaatgcgctcggaagaggaattaaggagactggtcaacaggataatcgaggaggagcaggaattgggaaacgaatgcgccgggacatcgcctcctccgctccggcatccatgcatggcaagttcaggtagcctgactaggaattcacataactattcttcctttcgcacctctccagctgatccgctgatcgagttcttcaatccgaaccatcgcaaggttttggaggagcaagacaccgagatccgtaagcgcacgggtcaaaagggcgccgctcccggcggagatgagtggatctatctgaacacatactgccgtgttccggagaagataatcacgggcttctgcaagggtacccaggactattgtccgccggcaccgcaaggaccaaccggagaagtgggaccaaagggaccaccgggaaacccgggtctacctggcatccccggtccaaagggaaatcgcggtgatgtgggattaccgggagcccccggtgtggatggcgtgggtcatttgggtcccgccggacctcgcggtcctaagggagatgccggggccaccggaagagccggcttggatggacgggatggagtgcccggggagccgggactcgatggcgtaccgggtcgcgctggtgctgatggaaagaatggcctgcctggacgcgatggcaaggatgggctacacggcaaggatggcaaagatggtctgtccatcacgggacccaagggtgcgcagggaccaccaggcgaacgaggtctcaagggcattgcgggtccacgtggtcgacctggcaagccgggaaccaatggcatacccggagtgcccggcatcaatgcctggaagctgcaatatcccaatggcagctcctccaacgatctgctcataccgccttctataacagacatccaagtgccggacttccaacgcacggtgattgtggaggagggaagatccctgaatttgagctgcaccgccacgggaactccgacaccgcaggtggaatggcgacgtgaggatggtcgcaccattaatgtcaatggcgtagagatggcctccatcagcggacagttcctgagattcaccaatatcacccgacatcagatggcggcctacacctgttttgccaacaatggcatcgctcccgtggcaaatgccacctacctcgtggaagtgcaatttgctcccatgatatcggtgtatcgccaaatgatctacgcggaataccagagcagtgccacactcgagtgtttggtggaggcattccccgaagccattaggtattgggaacgtgcctacgacggcaagatcctcgatcccagcgacaagtacggcattgaatcgtacccagagggtttcaagacaaccatgcgcttgaccatcagtaatctgcgtaaggatgactttgggtactatcattgtgtggcccgaaatgaactaaatgccacaatggtcaactttgaaatagcaccccaagatccgaatagtgagaccccgtatgtgggaaataacatgaaggtatacggtcaaagaccgccggagagcgagtgtcccgtttgcgatcagtgtccagatcccagcttgtaccagtgcaaggactccatactgaataactttgaaatccaggccacgggcaatctcagctatccgggattacccaagcgaccaaagacttgctatctgtatgccgtgggcaagcccgttttccacaaggtggtcaatgaaaagttcggctcctggcttagagatccatctccggacagtgatcgtgagaagacgttcgtcactaacgaaaacgatccgtacaatctgtttgagttcaccactcgcattcagtaccgaatgaatagcatcccccggaggaaatacgagattcaagaaggctttcatggcaatgcacatgtggtctttaacggttcgttttactatcaacaaagaaactcggatctggtggtcaagctggacttgaccagcctgaaaaagataaccacacaattgccatatgctggagtggctgctgcgaataggctttataccacggactacaactacatggacttcaatgtggatgaagtgggcctgtgggtgatctatagcacctacaactccaacaatacgctggtggccaagttggatgcggagacgttgaagatgcagtacaactttaatatcaccctggaccatcatcagtttggtgagatgttcatcgtgtgtggcaatctgtatgccatcgattcgggaacggacaagaacacccagattcgatatgtagtggacttgtacaagggcaagctgctcaacacgaatctgcccttctcgaatccctttagccataccaccaccgtgggctacaatcccctgactgtggaactctactcctgggacaagggcaacgcactcacatatcccatacgctacaatgagcagcgtttaatctccgacaatagttaggagtcgctaatcacaagacgatcttaaagatctgcagagtcatggctcaaaatctaactagtctaaggcacaataaataaatgcaaactg

SEQ ID NO: 15018 - protein, 935 aa, DROSOPHILA
MFLAVNQSLQNTSKKKRKRRTAEDDPQEDSGEGTPPVRPLEPSASSDQLVGVGNGATCRVCKCPGRQSLTLVYIYLGALTLILASLSIVFYTHTQDVESLSQVEDNYSSKSFRVQFQAELMRSEEELRRLVNRIIEEEQELGNECAGTSPPPLRHPCMASSGSLTRNSHNYSSFRTSPADPLIEFFNPNHRKVLEEQDTEIRKRTGQKGAAPGGDEWIYLNTYCRVPEKIITGFCKGTQDYCPPAPQGPTGEVGPKGPPGNPGLPGIPGPKGNRGDVGLPGAPGVDGVGHLGPAGPRGPKGDAGATGRAGLDGRDGVPGEPGLDGVPGRAGADGKNGLPGRDGKDGLHGKDGKDGLSITGPKGAQGPPGERGLKGIAGPRGRPGKPGTNGIPGVPGINAWKLQYPNGSSSNDLLIPPSITDIQVPDFQRTVIVEEGRSLNLSCTATGTPTPQVEWRREDGRTINVNGVEMASISGQFLRFTNITRHQMAAYTCFANNGIAPVANATYLVEVQFAPMISVYRQMIYAEYQSSATLECLVEAFPEAIRYWERAYDGKILDPSDKYGIESYPEGFKTTMRLTISNLRKDDFGYYHCVARNELNATMVNFEIAPQDPNSETPYVGNNMKVYGQRPPESECPVCDQCPDPSLYQCKDSILNNFEIQATGNLSYPGLPKRPKTCYLYAVGKPVFHKVVNEKFGSWLRDPSPDSDREKTFVTNENDPYNLFEFTTRIQYRMNSIPRRKYEIQEGFHGNAHVVFNGSFYYQQRNSDLVVKLDLTSLKKITTQLPYAGVAAANRLYTTDYNYMDFNVDEVGLWVIYSTYNSNNTLVAKLDAETLKMQYNFNITLDHHQFGEMFIVCGNLYAIDSGTDKNTQIRYVVDLYKGKLLNTNLPFSNPFSHTTTVGYNPLTVELYSWDKGNALTYPIRYNEQRLISDNS

SEQ ID NO: 15019 - DNA, 8332 bp, DROSOPHILA
tcatgtttctctgtctaacacttttgctacagcaccgaaacacgatcatgaaggcaggcatggactacaacgagattgccatgcactttgataaaatggtgaggaaacacgacgtcactcgggttctcaatcaggccaggcgtatgttcgtggactaccttaaggcacaaagcagcccacagcgccagagatcgcccagcgggactgtctccactggttccacgggcgcgagcttgacttcatcaatgcctgcttaagagacttgcaatcctaccccgcttccatgaaaccttagtgtcatctcagcttggcaaccgttatgtatgagttactgaaatttcacaaatattcgatgagtgttatgcagaacttctccaattcaacagaacaaaaaacccattacaataaacaattttatcatcttggcattaaaagaaactttgactccacgataaccccatgccctcgatgcacgaacttttcctttaagttttaacatttcatgaaagtgcagctcttgatgtaaccataaactcagtcgattgctcagatttgtcttgctagaggtgaatggcagaatacataaccaaagtcttctttttgtacgtatacggattttgtactttcttattttgaattaaggttttatttatattttattacatatttatctgcacctttgccaaacgatcaaatgcgagctgtttggctggaaattgctttatttctctagtctgctaatgcattccatgctgttgtaaaaactatattttagatttaaaatcgcgcctaaatactattttatgcaaataaattgacggatctataacccaaataaccataatcttattatctcaaacgttctgtatcttaaaaatctctcaacgtactctgaaaacaaaataattttgtaaattaaaatttaattcaaaaaattcgaagtaaagttaacgaatatgctatgtaaatttacgaaaaaaaagaacttttaaacaatcgattaataaacgaattctaaacaactagtgtacaatttattggaatcaaattacgttttaaatacaaaaatatcaaaatgcctttaaacgaaacaataatacgaacataaatcagaggccaaagaattcaaaagttatattttttcttgagtcgctcgcgaatgaggagacccttgatcagcttcttccagtttccgtacacgcgggtttcgtacttctcctgctccttgagaacttgtacctgttgatcctcttcccaggcagcagtgaccacttcgcggaattcctcgcaaacaatgaagccatcgtacatgggatgacaagcgccttgatgaaaatcgaagccaaccactgcattggcacaatcaatattcagcttcttacagatgcgcatcaagccgggcactataattgaatttcgaggttatttaaataaattggtgagaagaaacctttcttacatctcaaatgcaccgtcttctttggcagcatgcagtccttaaagagctcaacattgccgtaggcatttcgcggcacaattccattctctgcagttgggggctcgtattcctgagtttgccaatacccgaagatttccaatggctggtccttaataacagtgcgcgtgagctgaaggatacaacacaataaaatgaagcacatatgcatttaaaaaatgagcacaacataccctatcccactttggacgtgccttaaccaccttgtacggctgttcgccaagcttcaccacccgtgcgctttttagccatatttcccgagaatgcaggaggtgcacacaatctctggagtacaccgcttcaccacggataaagcccaatgtaggcgcatctggtggatatagaccctggaacttaagcaagtgccgctctagcacgtacagcggatggtccttgaactcggaaattgactttggcaagggtttatcggagtgaatgcgacgtagctgatcatcctctgttatatcgcgcttggtgcggcgtccgaggtaaggagcaatagtttcatctagccacgccttttctacacgggctttgcgcacagtggtgctccaactggcgcagtacctggcggtcacatccttcaaactctgatcatcctgaaaggcgaagacgtaggctaatccaggcgttgcatttttctgcgcagaaacaaaaatacaattactggatggagggcacgacatttggcttgataaatacgcacccttattgtgtccacgcagtgtagcttgcctttgaacagatctatacagatccactgctcctccacatctgaccacacttccacccacatgtcagaggcgtccgttttccgattgagcctggaaccgccctcatcatctgttgacatcactcgccgatcttttcgcagattctgtactgacttgggcagtacaggagcctttttcaccggcttggcgggttcaaacacctcatcggaatcttgcgaatttttcaacttctccagttttgggcgctttttcggtagcggcacatcgtcaccgccgtctaattgcggaatggctagactactggctttttgacctcggcttcgtagctgacgagctggcaaagcttcggacagaaagtttggcgaaattcgcgccttagtttccggcgccatttgatgcttttgagggtctgaagtggaatcggctccgtcggatttctttttaaggaaactaggggatataagtactttcggggacttgctccttgatcgagtttctcgtgtgttgcgctgttcctgcagatgtttattcgcaggactagcgttttccgtatcactatgcttggcatttagctgcttaactttggacagcatcagtttaggtataactggtgatccaaccacctgcggtttttcctctgttttgggtttcacagtggctctgcgtgtgcgacctgccactggagagaatgtgtccacaggagccactttcggtttcttgctatcgcctgattcagaaatattttgagtggtgaccctttttagaagggacgattgtactttagttttagtttcggcagggcttgcgacctttttgtcttcgagtttggatgaacttaacttggctgtctcttcttttaaagatttggaacttgatgaggtactgggattctcctcaaatgaagtgtccgatttattggaactaaatgaagattgattttttgattttaaaaccaattttgaggatagagtcggttttaataactttttggataatcccagttctgaatattcttcttttagacatttagagctggacgacgtacttggtttctcatcaaaggaagtgtccgatttgctggaggtgtaggctttttgatgttttgatttttcaaccaatttcgaggagagacttagctcctttttaaccttcggaactgtacctgatttcgtggtttctgaacccttggttgttgatttactgagtggtttagcctcagctttttttgcattgtttttcttttcagcctctttggaaatagttgacttactgctttctttttctgctggcttccctgcctttttatcttttttaggcttctcatcctcgctttccctttcggattccactgtttggcttttgtttttatcatctggcctaagcttaatgggaatcaaatcactggccgccggacgcagtggcattggctggagattgacaattagccgacagtgcatgcccattccccgtgcaagggcaatgaatatgaaaatcatatcctgcttgcagcgggcttccttgcgcttcacctgctccagtaaagcctctaatatggcttccttggtagcaggcgactgcgcggaatataagttgggacttagcagcttgattgatgttttgaaccacgtgacaaacgactgcagatatttaagttcggtgcctcgttcagtaggatatgcgtttcggcttggcaggagtttcagggtagcctgcatcagggaatctgactcgctaagcaggcgattgtactttaagctgcgagctatttggcacattaggctgactttgtgcagcaaaatctgacggtccttgatgtccctgttaaggcgacgctttagggccatctccaattcgtgttgagtcttttgctccttcgtaggacggagcccttccagtcccacgcgtatctccaaatcccctgagatgttcggcgtctcgccatcgtcctggtcactggatagatctgcatctgcaaaagggattcaattcggggtgatgatgtgacactggactgaatgatgaactgtgagatagacagagtttgtttaaatggaggagaaagaggggtaaaatatctaatactcgaacatttcaatcgatataaagaaaattgagattcccaatatgaaccatggatatgatcatatccatgattttgaatttaaatacatttgtaaatgaattaaaataaaccgggtaataaaaatgttactagtagcaagttcggcaccaatgattatgtgggaggattgagcagggaaggcaggcaaaaaatacccagacagagagcatggattcctttcaacatttgcatttatttatttatatcttttaaagtgcatttgaaatttcaattattgagttaattacaatcaacattcactaaattgcgctaaaattacgagtttcatttgatttattgcatccattgttggagtatatcattaataaattagattagaactctgcatgcagatgtttatattaagtgaatacaattttgctaaagtaaattcgttaaacatcagttctaattcgttagctacttgttgatttcattgaaacacttgccattgccataaagtaagtacacaaatagttgactaggacatttcactagcttttacaaattattatttctattactgggctgcgattaaaatccttttgtatctcattttgatttggttaactagattctttttgacttcaacgtgtttcgttgcgtggcaaacaaaatataaaaactgacataataaataaaagtaaatgcattttctgagtaaaatatatcattgtttaacatattattatcaagagtgtgtgtgcagacatttaaaccacgttcagaattcggtagacattgagtttatgcttttgtttttttcatccgtttaacacgcagattgggcttaagctagtgcaaaaacgtttaaaaatgttcatttgatttaatttttttgacattaaaaaagattttaataagcttttgtggtagattttcctatcgatcattgtatagactttaattatttttttagcggacaactaagtagcaaatgccgcaggaatcttgattttggcttggcatctcccaaattcgggctaaacatacaaatgttgcattgaaacgtatgccaagtacaacggactcatgacatggttagggggtataaataggttagtaagccaagattctagataagcgtctgcagcatctcatacgctagtttctcagtctaatcgactaacaatatgttacagtaaataggtatattgtagattcatggccattattttgacgcggctgttccaaatgtacattctagcatacagttgcggtaaaaataaaagcatttccttgtaacttctacgatttgtataaatggggaaattgttagtgtcaaactaggacaatacattcgaatatgataagtcttaacggaaaatgcaatataaattattatataaaataacacgtttaaactcgttaaagaatttgtatacaacactatataaaaccatgctcttatttggaccgcagctgcacaggtaagttagtaatttctatctgttcacatcgacaaataaacttagtacaaacaaaactacacagtctcatacagagcaatttggaagcttatttttattcatcagataccagaaatgccagcgccacaaccaacttggataagcatgctcgactgccttctgccaacgccaactcttccgggagcctggctgtcaaactacttgcattttcgcctacctgccacttcctcaaaatcggagtcatcagtatcaccagcgttggcgaccaccgtggagacgggtcgcgtcttggtgtgtcgctttattcgcgttgacttcgtcttgctgaggcgtgacggttcatcaagggtcggaggcgctgctggtgctcctcttcccgccttcttacgctgattcccttcacgttcctccacctccacactctggtagttttggttctcgcccaatgcaagcagcgcattgacatccatggtggcagcctggctccttggcggagtggccgtgacatttcgtttgcttaaagcatccctagtgcgctccaaactgtttgcgttctccaggagaccgcgaaagtcgaaggcattgcctgctttatcctcgaagctgctctcgttgttatcctccgatccagagtctgaaagatttgtgatgcccgcattacaatcgaattggggcgccggtgacttctctttttggccgccggcaaagaaggttgagtgcagatcaagatcggctggatttactaggtagtcttccacactggattcgctgctggaatcagcaggaccgtgctgattccgtgcaccgctttcattgggcgttttggcgttttttgaacccgaagcccgcggagtgttctccttctgttgcgaaggagaagtgggaaaggtctttggaggcggtcggtacttattgtacagcttggagcgaagtgattgaccagtgggcttgcgtttcttcaccgaagagcccttgatgccacttggtgccttgtgatcgctgctgggaagagggggaatgaaaatttcaaaatgtaccagagcaatggacccttatcccgttctcaccctctttttcccgctacagcggaggatcgtccactggagcccgctgctcctccctccgcctggagctcatcgaaatcgctgtcatcatcgtcggaggactcgcctcccttgacgtccttgctcggcttccattcatcctcgctggccgagaagccctcggacacggaatcctcctcctcgtcggacatcttcctttttatctggggcgttttacatttatgtatcgatgcgtgctacttagttattgatttttactgcgcagttattcagggcacgcgttacacaagaatatcctaagttcgttctcctgatttgatatttgattatggatgttggggggcaagtttaatcctgcctgatctcggttttggacagtttaaatgaattgcgaaattcacattttcgcgcttggtagaaaacagacaaaaagcagaggccgagaacagtagagatgcgcgcccacccacgatggtatcgatactttcggcttatcgggacaatttatcacctaaacgaagatagtgttaataaaataatgtttactagccttataaaaatttttatttttcatttcatttttgagtgactctgggatttctttaattttatttttattacttaatataattacttaattaatattatttttgtattttatattatttattttttcaagaacgcaaaagaagcttaagaaacttcacatagagcggtattaatagatttttgaccgacagtgttgactaaataatttcaacagtgtcattcattttttatctcctaaaatcaccatctctatattcgattagtttggctatcgacttatctccaaacgatatttttgagcactacgcagctctgacgcacatctgcgaaatgtttatttacaaaacgagttagcatcattattgtcaaaaatgaattctcaaaacgaattgcatccaaattggctggctctaacaacattgccactccaactgaagcgattcgtccgagcaggagatccggattttatcgccgagtccccgaaagcagtaaagcaccaaatcgatggcttaaacggagcagaagctcgtgagttctacaaggaggtgttggatgcgcccacaacctgccaacctaaccttccaagtacccacaaaactgcacaaacaagaagagagccagaaaggatcctagtccccttcgacaaaagcaaatttttccgtttggccactagcaacaaagtagaggagctgtctcaaatgaaggcctcagaagaggatttaaattctcgggattcctttggctggactgccttgatgatggctgcctgtgaaggagccacggaggcagtgagttggctcgtgcagagaggggtccaagtagagacctcagacaaatccggaaacacagctctgaaactggcccaacgaaaaggtcacttagatgtagttcatcttttggaatccctacccatttta

SEQ ID NO: 15020 - DNA, 4282 bp, DROSOPHILA
gtgggcgcgcatctctactgttctcggcctctgctttttgtctgttttctaccaagcgcgaaaatgtgaatttcgcaattcatttaaactgtccaaaaccgagatcaggcaggattaaacttgccccccaacatccataatcaaatatcaaatcaggagaacgaacttaggatattcttgtgtaacgcgtgccctgaataactgcgcagtaaaaatcaataactaagtagcacgcatcgatacataaatgtaaaacgccccagataaaaaggaagatgtccgacgaggaggaggattccgtgtccgagggcttctcggccagcgaggatgaatggaagccgagcaaggacgtcaagggaggcgagtcctccgacgatgatgacagcgatttcgatgagctccaggcggagggaggagcagcgggctccagtggacgatcctccgctgtagcgggaaaaagaggcgatcacaaggcaccaagtggcatcaagggctcttcggtgaagaaacgcaagcccactggtcaatcacttcgctccaagctgtacaataagtaccgaccgcctccaaagacctttcccacttctccttcgcaacagaaggagaacactccgcgggcttcgggttcaaaaaacgccaaaacgcccaatgaaagcggtgcacggaatcagcacggtcctgctgattccagcagcgaatccagtgtggaagactacctagtaaatccagccgatcttgatctgcactcaaccttctttgccggcggccaaaaagagaagtcaccggcgccccaattcgattgtaatgcgggcatcacaaatctttcagactctggatcggaggataacaacgagagcagcttcgaggataaagcaggcaatgccttcgactttcgcggtctcctggagaacgcaaacagtttggagcgcactagggatgctttaagcaaacgaaatgtcacggccactccgccaaggagccaggctgccaccatggatgtcaatgcgctgcttgcattgggcgagaaccaaaactaccagagtgtggaggtggaggaacgtgaagggaatcagcgtaagaaggcgggaagaggagcaccagcagcgcctccgacccttgatgaaccgtcacgcctcagcaagacgaagtcaacgcgaataaagcgacacaccaagacgcgacccgtctccacggtggtcgccaacgctggtgatactgatgactccgattttgaggaagtggcagatgcagatctatccagtgaccaggacgatggcgagacgccgaacatctcaggggatttggagatacgcgtgggactggaagggctccgtcctacgaaggagcaaaagactcaacacgaattggagatggccctaaagcgtcgccttaacagggacatcaaggaccgtcagattttgctgcacaaagtcagcctaatgtgccaaatagctcgcagcttaaagtacaatcgcctgcttagcgagtcagattccctgatgcaggctaccctgaaactcctgccaagccgaaacgcatatcctactgaacgaggcaccgaacttaaatatctgcagtcgtttgtcacgtggttcaaaacatcaatcaagctgctaagtcccaacttatattccgcgcagtcgcctgctaccaaggaagccatattagaggctttactggagcaggtgaagcgcaaggaagcccgctgcaagcaggatatgattttcatattcattgcccttgcacggggaatgggcatgcactgtcggctaattgtcaatctccagccaatgccactgcgtccggcggccagtgatttgattcccattaagcttaggccagatgataaaaacaaaagccaaacagtggaatccgaaagggaaagcgaggatgagaagcctaaaaaagataaaaaggcagggaagccagcagaaaaagaaagcagtaagtcaactatttccaaagaggctgaaaagaaaaacaatgcaaaaaaagctgaggctaaaccactcagtaaatcaacaaccaagggttcagaaaccacgaaatcaggtacagttccgaaggttaaaaaggagctaagtctctcctcgaaattggttgaaaaatcaaaacatcaaaaagcctacacctccagcaaatcggacacttcctttgatgagaaaccaagtacgtcgtccagctctaaatgtctaaaagaagaatattcagaactgggattatccaaaaagttattaaaaccgactctatcctcaaaattggttttaaaatcaaaaaatcaatcttcatttagttccaataaatcggacacttcatttgaggagaatcccagtacctcatcaagttccaaatctttaaaagaagagacagccaagttaagttcatccaaactcgaagacaaaaaggtcgcaagccctgccgaaactaaaactaaagtacaatcgtcccttctaaaaagggtcaccactcaaaatatttctgaatcaggcgatagcaagaaaccgaaagtggctcctgtggacacattctctccagtggcaggtcgcacacgcagagccactgtgaaacccaaaacagaggaaaaaccgcaggtggttggatcaccagttatacctaaactgatgctgtccaaagttaagcagctaaatgccaagcatagtgatacggaaaacgctagtcctgcgaataaacatctgcaggaacagcgcaacacacgagaaactcgatcaaggagcaagtccccgaaagtacttatatcccctagtttccttaaaaagaaatccgacggagccgattccacttcagaccctcaaaagcatcaaatggcgccggaaactaaggcgcgaatttcgccaaactttctgtccgaagctttgccagctcgtcagctacgaagccgaggtcaaaaagccagtagtctagccattccgcaattagacggcggtgacgatgtgccgctaccgaaaaagcgcccaaaactggagaagttgaaaaattcgcaagattccgatgaggtgtttgaacccgccaagccggtgaaaaaggctcctgtactgcccaagtcagtacagaatctgcgaaaagatcggcgagtgatgtcaacagatgatgagggcggttccaggctcaatcggaaaacggacgcctctgacatgtgggtggaagtgtggtcagatgtggaggagcagtggatctgtatagatctgttcaaaggcaagctacactgcgtggacacaataaggaaaaatgcaacgcctggattagcctacgtcttcgcctttcaggatgatcagagtttgaaggatgtgaccgccaggtactgcgccagttggagcaccactgtgcgcaaagcccgtgtagaaaaggcgtggctagatgaaactattgctccttacctcggacgccgcaccaagcgcgatataacagaggatgatcagctacgtcgcattcactccgataaacccttgccaaagtcaatttccgagttcaaggaccatccgctgtacgtgctagagcggcacttgcttaagttccagggtctatatccaccagatgcgcctacattgggctttatccgtggtgaagcggtgtactccagagattgtgtgcacctcctgcattctcgggaaatatggctaaaaagcgcacgggtggtgaagcttggcgaacagccgtacaaggtggttaaggcacgtccaaagtgggataggctcacgcgcactgttattaaggaccagccattggaaatcttcgggtattggcaaactcaggaatacgagcccccaactgcagagaatggaattgtgccgcgaaatgcctacggcaatgttgagctctttaaggactgcatgctgccaaagaagacggtgcatttgagattgcccggcttgatgcgcatctgtaagaagctgaatattgattgtgccaatgcagtggttggcttcgattttcatcaaggcgcttgtcatcccatgtacgatggcttcattgtttgcgaggaattccgcgaagtggtcactgctgcctgggaagaggatcaacaggtacaagttctcaaggagcaggagaagtacgaaacccgcgtgtacggaaactggaagaagctgatcaagggtctcctcattcgcgagcgactcaagaaaaaatataacttttgaattctttggcctctgatttatgttcgtattattgtttcgtttaaaggcattttgatatttttgtatttaaaacgtaatttgattccaataaattgtacactagttgtttagaattcgtttattaa

SEQ ID NO: 15021 - protein, 1293 aa, DROSOPHILA
MSDEEEDSVSEGFSASEDEWKPSKDVKGGESSDDDDSDFDELQAEGGAAGSSGRSSAVAGKRGDHKAPSGIKGSSVKKRKPTGQSLRSKLYNKYRPPPKTFPTSPSQQKENTPRASGSKNAKTPNESGARNQHGPADSSSESSVEDYLVNPADLDLHSTFFAGGQKEKSPAPQFDCNAGITNLSDSGSEDNNESSFEDKAGNAFDFRGLLENANSLERTRDALSKRNVTATPPRSQAATMDVNALLALGENQNYQSVEVEEREGNQRKKAGRGAPAAPPTLDEPSRLSKTKSTRIKRHTKTRPVSTVVANAGDTDDSDFEEVADADLSSDQDDGETPNISGDLEIRVGLEGLRPTKEQKTQHELEMALKRRLNRDIKDRQILLHKVSLMCQIARSLKYNRLLSESDSLMQATLKLLPSRNAYPTERGTELKYLQSFVTWFKTSIKLLSPNLYSAQSPATKEAILEALLEQVKRKEARCKQDMIFIFIALARGMGMHCRLIVNLQPMPLRPAASDLIPIKLRPDDKNKSQTVESERESEDEKPKKDKKAGKPAEKESSKSTISKEAEKKNNAKKAEAKPLSKSTTKGSETTKSGTVPKVKKELSLSSKLVEKSKHQKAYTSSKSDTSFDEKPSTSSSSKCLKEEYSELGLSKKLLKPTLSSKLVLKSKNQSSFSSNKSDTSFEENPSTSSSSKSLKEETAKLSSSKLEDKKVASPAETKTKVQSSLLKRVTTQNISESGDSKKPKVAPVDTFSPVAGRTRRATVKPKTEEKPQVVGSPVIPKLMLSKVKQLNAKHSDTENASPANKHLQEQRNTRETRSRSKSPKVLISPSFLKKKSDGADSTSDPQKHQMAPETKARISPNFLSEALPARQLRSRGQKASSLAIPQLDGGDDVPLPKKRPKLEKLKNSQDSDEVFEPAKPVKKAPVLPKSVQNLRKDRRVMSTDDEGGSRLNRKTDASDMWVEVWSDVEEQWICIDLFKGKLHCVDTIRKNATPGLAYVFAFQDDQSLKDVTARYCASWSTTVRKARVEKAWLDETIAPYLGRRTKRDITEDDQLRRIHSDKPLPKSISEFKDHPLYVLERHLLKFQGLYPPDAPTLGFIRGEAVYSRDCVHLLHSREIWLKSARVVKLGEQPYKVVKARPKWDRLTRTVIKDQPLEIFGYWQTQEYEPPTAENGIVPRNAYGNVELFKDCMLPKKTVHLRLPGLMRICKKLNIDCANAVVGFDFHQGACHPMYDGFIVCEEFREVVTAAWEEDQQVQVLKEQEKYETRVYGNWKKLIKGLLIRERLKKKYNF

SEQ ID NO: 15022 - DNA, 3679 bp, DROSOPHILA
tcgcagaggggcgagcgtgatgtaaatgtatctaattactttcacctccttaagcataaacttggttcaatttatgaaatcttttaagttactttctgcttgatagttattcataattgttatattataatgaatcttcgcacatgcggcatttctgcgcaagtgcttgaagagagtgaacaagggagagagcggcaagaacaagagaaatggcaaacaaacaaaagccacagacacagctgtcttatcacagggcggttttctgccacccccttttgactgatagcaaagacaaccgttacttgtgggttgtgtcttcgataattcaattcttatatttttatacatattaagcatttataacaagagagaatgctatagtcgagttccccgattatcagataaccgttgctccgttactaaattaatatattatgtacatttaaaaccgcaaactgttagaaacttggaggaaaaagtatataagaatctcgtatatctccgacataattattgaatttatttcttattaattcaatacaagtatgcacctatgtacgcatgtataatttatcattctataaatcaatatctgttttaattagctgtaagaataaaaagaataagttccttcaaaaactttaatatgcaaaataatagtctttaaatacggggaatgcatagtttattaggttgccatttgtttacacttcctttaagattaagacccaagctttctagcatggtataaataaataatctgtcacttatcattctattaatcaattacactttaaattacattttcatatagtttggatactaaactaccctcaggtccatcctatatgattctctcatatgttgcatttcctaactttccatttagattaaaaggccttcacgttactcgatttgtgtccctgccctgaaaggattccccgtggacgaagctaaacctaatacgggttgggttcaagcagacatacaaacaatgcttctgagaatacagatcttattaaaaatatacaagtatataaactataattttccaattgtcttagcctagcctatgcacggatgcataatccaagttttgttgatcctctaagcggagctaaagctttcgtagacgttggcccccagcgtctttgtcttctcggcgaccacgtagaaggttagcagttgggtgggcagattgtggggtcgcgaagtggtatcgaagcctctcgaggtgagaccactgatgataggaatgagctttgccaacgccaacagcactcggttgatgttcagcaagttattgttctccagaccgttttggctcttcgaggtgctggcgcctaagcttcctgcctggttaaacttgacgctctgttcttgctgcgtttggactttagcttgtggcagatgctgcaaagtttcgcccatgctttcggcgatggcatcgcaggccagcacaaaaccacggcttacattgtgcgagcacacgccaacggcatcctcgctctccaacagatccagcgtctcgttgaccatcttttgcagcagcggcgaatgactgggattctggctgggcagcagatacttgctcattcgcgagttgggatcccgacgagtgtccgcattgatggccatttgcagtgaccaaaacagttgctccaggtcgctaagggaaagctgttcggagagcggtatggtcttggtgactgcgatgacctgggtgcgaatgtaacgggctaagtcccggatgcccgaatccgtgataaagtgtcggatgagggagagatactgctgctttagctcgtcggtgacttgtttttgttccgtcatgatgtcccgatagatgtagccaccgagaagatttagctggaccctcaacgcaataaccagcatggaggaggcgtagacataggttgccagtcttgtgaatgccacaattttcatgtcctcccaaagttccaacttgttcttgggattctggcgcagctgctcgagcagctcgtccgtgctgcactccctcagaaccgcttggcacatctcctcgcccatgcctaggatcacctggttacacgtcttctccgtcgactcaaagtgggtcgtgcgccgcgttctctcgaagaattccctggcctgtttctcctggaactccacgaatcgccgttgtgcataacgtgccgcaaagatggtaccgcccaccagaacgccggtcactatgaactttcgccggtggcgtgacaagaagtcctgcaggcgcgacagcatgttaacgattggaaaaggcctcttctgccggatggacaactagaatccgcttcctgtgtgaaataggccaactgctgttcagatatcccactttttcccgctccaccggcgacctgttcgaggttaataaatagttaatgtgcaaagttcacctgtgtgcgtagggtggtgcgctgccggcgtcgctgccaacagaggagcgtcctccactcatccgcagcgattagattaccaggtagtgctcacctatatacccctgctcggaaactcggatctggtgcgccgccttatcgggtcgattgctggcctttggatcggatctagctctggaatgtatggaatggatttatcctttgttgttgtcgctaaatgtgttatttctctgtttggtgccgcatactgcgtcgtctgtttccgttcaagaaaaatcccaaaagtgcgaggttcgggaataccgaaaaataccatttcgtttagtatatttggtgttactgtttaaatttttattgaaaatggggatgctttttagttatttattttttcgttatttcgaagtgggttcaaaaaaaaatagaaaatataaaataatgttaattcacctataaatgacgaaaaataaaaaacttcgatatgctccaatttccaccgttccgccatcgtcgcaaacatttgaaacgcatgattcaaagggtgaagaagaagatagaaatcatatggtatttaagatagttctgttgttggtggggggtttagtttagttggggtgtttgttatggcgtcgtcagatcgaaagctcattgtagtctccggatttggtccatttctcggtcacgaagcggtcaacgccagctgggaagctgtgaaactgctgccggaaatcctaactcacgatggcatagaatatgatctggaaaagcggttggtttcggtggaatacggggctgtggacgaggcggtggcggagatttggaaacgccagccatatgtaagcatcgcaattgaaccataaatagatagaggccttatgatatcatctttctcccaaaaaaataaaaaacaaaaaaaaaacagcttgttatccatgtcggtgtttcgggcgttgccaagtgtgtatacatcgagaagctggcgtacaatcacaagttccgccgagctgataattgtgataaaaaactggccaacggcacttgcgaactacccaacaatggacatgcaaatgtcttgaagaccgaattagatgtggataagattgtggcggttgtaaatgagaattgcgccgattgtgtgggacccacacaacagccgacacataatgataatctcaaatccctgagcgccacaaaggcatccaaaaatgtgggtgactttctctgcggctatatctatctgaaatcgctcgatatggacagaaaac

SEQ ID NO: 15023 - DNA, 1433 bp, DROSOPHILA
aaacagacgacgcagtatgcggcaccaaacagagaaataacacatttagcgacaacaacaaaggataaatccattccatacattccagagctagatccgatccaaaggccagcaatcgacccgataaggcggcgcaccagatccgagtttccgagcaggggtatatagatgctgtcgcgcctgcaggacttcttgtcacgccaccggcgaaagttcatagtgaccggcgttctggtgggcggtaccatctttgcggcacgttatgcacaacggcgattcgtggagttccaggagaaacaggccagggaattcttcgagagaacgcggcgcacgacccactttgagtcgacggagaagacgtgtaaccaggtgatcctaggcatgggcgaggagatgtgccaagcggttctgagggagtgcagcacggacgagctgctcgagcagctgcgccagaatcccaagaacaagttggaactttgggaggacatgaaaattgtggcattcacaagactggcaacctatgtctacgcctcctccatgctggttattgcgttgagggtccagctaaatcttctcggtggctacatctatcgggacatcatgacggaacaaaaacaagtcaccgacgagctaaagcagcagtatctctccctcatccgacactttatcacggattcgggcatccgggacttagcccgttacattcgcacccaggtcatcgcagtcaccaagaccataccgctctccgaacagctttcccttagcgacctggagcaactgttttggtcactgcaaatggccatcaatgcggacactcgtcgggatcccaactcgcgaatgagcaagtatctgctgcccagccagaatcccagtcattcgccgctgctgcaaaagatggtcaacgagacgctggatctgttggagagcgaggatgccgttggcgtgtgctcgcacaatgtaagccgtggttttgtgctggcctgcgatgccatcgccgaaagcatgggcgaaactttgcagcatctgccacaagctaaagtccaaacgcagcaagaacagagcgtcaagtttaaccaggcaggaagcttaggcgccagcacctcgaagagccaaaacggtctggagaacaataacttgctgaacatcaaccgagtgctgttggcgttggcaaagctcattcctatcatcagtggtctcacctcgagaggcttcgataccacttcgcgaccccacaatctgcccacccaactgctaaccttctacgtggtcgccgagaagacaaagacgctgggggccaacgtctacgaaagctttagctccgcttagaggatcaacaaaacttggattatgcatccgtgcataggctaggctaagacaattggaaaattatagtttatatacttgtatatttttaataagatctgtattctcag

SEQ ID NO: 15024 - protein, 385 aa, DROSOPHILA
MLSRLQDFLSRHRRKFIVTGVLVGGTIFAARYAQRRFVEFQEKQAREFFERTRRTTHFESTEKTCNQVILGMGEEMCQAVLRECSTDELLEQLRQNPKNKLELWEDMKIVAFTRLATYVYASSMLVIALRVQLNLLGGYIYRDIMTEQKQVTDELKQQYLSLIRHFITDSGIRDLARYIRTQVIAVTKTIPLSEQLSLSDLEQLFWSLQMAINADTRRDPNSRMSKYLLPSQNPSHSPLLQKMVNETLDLLESEDAVGVCSHNVSRGFVLACDAIAESMGETLQHLPQAKVQTQQEQSVKFNQAGSLGASTSKSQNGLENNNLLNINRVLLALAKLIPIISGLTSRGFDTTSRPHNLPTQLLTFYVVAEKTKTLGANVYESFSSA

SEQ ID NO: 15025 - DNA, 19403 bp, DROSOPHILA
ggtgcggtaaagtagcaccccaaacaaaaattcccttcaaggtatcaccatcctttgcggtcacctcgaaggaattactgtcgatacgtatgcaatgggcgtgaagtgcatccgaagttagctcctgagtgggtagaacatccgctaggccactctccattagtggacgcaccactagctcctcgtgctcttgccacattccttctccgtcgcggtaatcactcagatttataggaacatcgatgagcatttggcaatcgccttttgtacgaggattctctagcagaagaaggagctttaggagtccacatatgccaaagttcttcacaagaatatccttgcagagggcttttcctgctccgctggtgaaaaactcacactcgaattcatcatgctggttgcagtccatgcacaggggaaatacctgacaccttcggcatatcacataggattcctgaaggcattgcgcgcacttcagctgatggcattcccagtgtggagctaccagcaagggtcgctcctccaatatggtatctcccggttcgatggctatactagccaccagatgcctgcacagaattacactttaactattgttttagaaagctatttgaacttacctgcccaacttctcatcgtgagcatgctgaatattttcgccaaattcttgcatcgattacgtctgttgcctggcgagaaaagtaatttagtgattctgccatcgccgtcgtggcttgtggttcgtctactcacctaaaacgcactgagcaattataaatatactctgcagtgctgctggctgaggaatatccctctttttcaggagccctgtcgtattgctaagtacttttgctaattgcgtgcatagctcgaacgagatgatgacttatttatagaatcactcgtttggaagaggtgatgccgcactaacgtgtctacttttcactttattttccctttacgggaaagatatgtatatggacatttttgtgctattcttctcaataactatgttgtttattgttctttataaatgtatcaaacattgtgtgtttatctgatattttttaagtcgataatatgcatatatatatgtatttaattagttttacgaggggacaatgttagacttaatttaaagtgttatcggctcttgtggaatacataatattttaagaaaacaaatgaagctacattaacagtagtaaaaggcatgctctaagaaaggctactcgtaaaacatagacgccgccaattcaattggtcaaatgcgtgcgggaaaaacaagaacaaatatgtattttatacaaaaaaaaattaaacaagtttcctattcctcatcctcagtgctagtaatcctcatggcttccgctgtctctacctggccgctggcgcttggtgatgctgtgggaatcggcgtaggcgttggcgtcagcgaactgttggaaatggcgtcaatatcatcgtcaaactctacatcctcagcatgcatcagcttctttagatcaaacggagtttcctgcgaaaagacacagtatcaacatttctgatattctactttatttattttgagtcattacctttacttcatcaactcgctgtcgatcatgcagcgcactcaagagctcgcgaaggtgttgattctctttacgcaatcgctccctttccatatcgcgttcgttaatttttggctgttattaggtaaatagaaattatagttcttatctcggcttaaataagttagaacctaccaaaagcatggaaatctgctcattcagtattgttacaatgctgctgagtgcatggcagggcacactcggctccagcacactagcgtgctgaatgcgattcggcccacaggtgctgctcgatcctccagttaacttatccgtctctttcggcgattcagttggtgatgtttgagtggagctatcgaccgtggatgccacaccttcttcgatctgtaggaggacattaattaaaagataacttgtcacaaattgataacattttgtatacttacggtttcctcgttgtcttcctttttgtcagctacagatttgcttgcgttttcagccgtttttatctcccggctctggcttggtaattcatccaccgatgctgcagcttcattcttagaggtcgttggatctgccacttcctttgtgatatccgcctccacacattgcctctcttcattgcatgattcacttagcttatctgacggcacagttttcacttcattatcttcacccttggtctccgtcttatcgccttcgagtggttcttgttccagtaatccctccggaacggcatcagtggattgacgtttcgaggcatctataacagattgtgaagttttcggctcagtattgaaaggagccagtggcgttgtgggccgctcatgtggtttggacggaatagccggtaagcgcagttcgtcgatctcacagtatccgtcatcgtcttcgtgtatggcaacttcgtcaagatcaagagtttgtagtttgggcatcagccgcgatggcggtatctgggcctgagcctgggcatgctgcctattgggaggcggcagcggtggtggtgatgaagaaaacgatgaggatggtgccaccttcttacgaagcttttccttctcgtgacagtggccacaaaccgccgtggacaccgctgagacctcttgctcaggcgtgacgtgcatgtactcgttcagcatcttggtcagggtttgaatctgatcgtaagcagctaaagcaatatctgcactgtctttcggcgcctctggcatcatggcaatgtccacaatctggtcgtagtgttccactggcaaacggaagatatcacaaatgattttctgcttctccagcaaatcattcctaatggaggcgtccaagcggcgtaacttctctcctggtgtcaacacaggttccgctgtgtgagcgggactaatgctgacctgaatggccgtagggtccaccaagggactctgcatcagaagggtgcgcgtgttgttcgagttgttcgagcagacaatgctggcgctgtcgcgtttggagttacctccaaccataccatacgtggagtttcgctcctccccagtagatcctggtctaaccgattccctagtcgactgagagtgtcgtaaagtaacgtcgtttgcttccgtcccattcgccgaatacttctgaatgggttcgccagtgcttcttatggacatagtgcgattaacttcattttggctcgaacgcggctttggtgtgtttacataatccgcatcagattcacttgctgtcgcatcccgttgagggtttcgcaactgaactccagtaagagagctaacgttactattattggtcgctggagccggtgtaaccgtggctataggcagcattggggccaatggtgtggtagtcaatgtggctgtcgcagccaatggctgtactgtatcagtgctcaactccaacgactctttggtgttggaatgcggaatagcggcgagagctggatcactaatactcgtgtcatggttgcttgatgcgttctttgaacgattcttagactgacgagcagccacatccgagaagtgtttaaaccatctgcgagaaaacattgaagaattaagaaatgactgactgatggaattcagggattactcacgtcttgcactccgagctactaggcgcgcgtagctccaacatttgtgatgtcttcatcttgatgaggaaaaaggaatttttatcagccgcctcctgccggatcaaagtgtccgcatcaatgctcataattggactgactggcttattggtgatcgatagcggggtgtgcaagttctttagataatatttatcatcctaaaaaaataattgtaaacggttaattaatcacgtctttgagaagttactatgactgttaacttgcctgcttggtcagcaaaacaatcatgttttcaaacagaagtccatgtagctgcacgctaggattcttcttgatcgtcagattgccgtcatggatgaggtgatgttgggtcaggtccaatttcttaaactcttccttgtcataggaggatctgtctaacttacgctgaatgttttgcagcctgttaaaataataaataaaatgtttatttaatataattaatcagcattttttttataggcacatacttgtgagcatcctctgctgtctttactgcctggttgacctcgacaagaatccttttagaggattccactgcccgttgaatggcttccgcctcggtggtgttttctggcagcaagcgcacggtcaccttgtaaaggttctcaaacaaaagcggatacttggtgaggcgctgcagcacggtgggcagcaagtcctttagctcgaggcggcgacatgccttgtgtgactccgactttttcaatagcttttgcagcatctcgtccttgttgcgcttctccttgagtgcctccaaggcgatttgctggcgggcacagaactgagccgcaaactcgcaaagaacaactccagactgaccatcgaacatgtcggcgagcagatcccctatggtgttcaccacgtggttatgctcgatgcgtcgttgcttaagactctgctcgaaggcgccatgaatctcacggagcgacagcaaggcgggcgggaacaacaacagcaaatgatcctgggacagcaatccactctcgtagagtggcaggaagaataatcgatccagcagctttagggtgcgcacatggttgcgttcagtttgatagatttcttgaaataattaagcagaaagcatacatacagtattgttatattaaatagagatgtaaggattaatttaccatttataatctcctgacgcttcttctcagcgtccgttaaggctgccaacacctctgcggccaccatggaactccagtccgcctcgttcacgtcgtcttcatcctcgctctccagcgtccaacgagctacaggcaatgggtggccagcattccagaaactagagttgctagctgcactgctcccagcggcccctgccaaacccgcctgaaaggaatcctgctggcagtactgctgggcgtgctgctggatgagcagatgggggtgctggttctggttcaatcccattggcggcacctggacgccacccgctgctccgggtgcagcaaagtgctccattgacgtgctgggactctcgctgccgccagctgaagagagactagaattcgaactgcccacataagtggcattcgatagacccaagtccagttgttcatcactgcgttgaaagataaaaaaagtaaacaatattgaatgtgttcgttaaggtatcataaaacaaatgtgctccgagaaagaaaaagatatacaagtctagtgcaaatgcgattatgtaagcttaaaaaaaaaataaataaattcaaaaaaatgctggtcaataaaattagcagttgtatattttgatcatttcgaatgagttcaatttcgatcgaattaaatttgtgcacacattttcccagaattataagtgtaacatccgaaagctctatttttagatttacaccaaaaaataattccatttacatgagcgactttatcacgagcattctgtgatctactaatagaattggggttcacacatcaaaattcaattaaaatattgatttacttgaagctattaaagttaagggtcgtcttgaagcttttactgcgattaaatcgaatgtttctttccattgccactattttgattttttttgcgttccgtgtcggtctgatgagtcaattccaacgcgagaaatgccactgaaagggcagcagttctggcaggtgttggtaggaaaatatgtcgggagcagttgctcaaacagtttgtcaacaggaagcaaagaaacgaggatagctggaagccaggacgcaaactggcattggctaacatggtcgggagcggactggcgtaacctacattgcgctgcaataagcggggcggacaatataatcgatgtcaatgccggcgtctaatcaactatcatatccacagtgccttctaaacgtatacgtatgcggtaatggtcaccgtaaacattagtcgatgtctgtggtaatgataagtcgaaggctggataccctggtccgacggcccagtgggggcgattccacgaaaacgttaatgcattgtctgctaatcatatccttgccaacttgaatatagtttaattaaaaactcaaactaaagcgaatctttaagaataaacgtggtggaaagtctttggaaagttggcgccacaagaacgcgacaacggaaagcagacagcatatattgattgcagtgcgtcgcaatacacattaattagtaaaattaatatccggttacttggcggccacaaaaaggcgtaggaaaatgctttagttgagaggatctagggagtgcctcagccaatgacaatggaatgaaagaatttatttggtaagctgagacggcgaaggaggacaagaaataaagacagtaggtcaggatttcccattctcatcctagatgacagcgaaatcgattccttaaacttacttgggacgcgacgacaagcttggatcagaggtcttgcggcgactgttgcggttcctcttgttggacaagcgctccttgtaggattccgaccgattcacagagactggtgcacttttgtgcttcggatgctgactgtaactgcggatgataaggtatcttattaaacggaaaataataaaacagaaattattcgtaccgctccctacgcgcttctttatccactgtatccagggcgttcagttcggcaaaagcactcagaccggctgccacggatccactggtcgacggagtcgttgacgccacgctcgtggataaatccatgttgcatccggctccaccgccggggttaatactgtcgttggcacagctgccgtgaaaagaactttgcaggtcggtggtgttcagccccgaagtgttgcaggaggtatttccattcgaccttatcgatatgttcgcatccggtcgccgatcagagggttgacgcacaatcgacgcctgaccacggtctaaaaagaacaaatatcagaattgtataagttgcagtgtttgattttgggtttaattaacgcacctggagtcaactcaacatccaattcctcatcttgacgacttcgcttttcatctagaaaataacataaaacattcagttccgattcagtgtaagattctcttacttacttccaatgacgtcgctggtacgcggtcgaattttgcccatgaatttactgatcttgtcgttgtgggcgagacgttttgcctggggcaagggaccgggacaactctcgtccactactttcgagcactgacggtgtatgttcaatttacagtctgcaacagggatgtcgaaaatatactcatcattcatcaaaatcaaatttaagagagatgctcacctgtacaatgataaccttgcgggctcacgccccagataatcgtctgacaatgattgcagtgcgtcacttcatagtattgacgcaataccaatggatgaccacgaacattcatctgcagggtgatcgatttttatttcaaaaataatttagaataaatacagcattccaaatctctcaccttgcgatttttgcccataatacgcgacttgaaactcttgtccctgctcacaaagtgatggacccgctcaacgatgctgcttggaggcggacgagtgttgaaaatacggtagatgacggtggaaagagcagaacacaacgccaccttgcgtacatcctccggcggtgaaccgttctcatcctcactggaaaggtaaatgtttaaatacaaacaaaagctaaatatatttgcatactcacataagcgcgtgaagattgggcattaaatatttgtcgatgatttgctcccttagcttatccgtcttcgcctcggccagcttgtcgtccgtgggtccgtaaatggttcccaggccggcggtgcgcttctgctgaaactcacgcagctgctcactgattaggtccttggcccgctttcggctacgcagaaaaactgtccttaggatctccactttgtcatactccaactgcaggacattatccacctcgcgggccagcgattcatcttggcgataccatgacaatggagcccgcggcacgaggaatgtggagtggatttcgtaggcccatttccgcatgtccttggaggtgccctccttgtacaactcagtaatcaggtaaaacagaagtggcgcgggatccgagtttgagatcacgtagtttaggaagatggctaggaaagtgacgttctcggcctctaacaaacgagttagattgttaaagggtccgttctcgtcaatgaagggctcatccaagtccgagttttcgtcctccatcgagatgatctccttctgcgtatcgttcgactgggccgcatgcatgtggctggaatgtaaggatatcgggatcggagaagaggctcccgccatcggcgtaaactgatgcgactcgataaagactccaggtccggctgctgctgctccacgattgttctcattcggatcttccagcacggtcatgtgggagctggatagatatggaggcggcggtgttccgggcggggaggattcgccatccttttcaacaatctcccacgagcccgaagtcgttttcgttatccgatctattgatgatttcatatgtacataggtttacattacattacaaaaacgtaaatccaattgtatcatacctggatgacgtggatgcatattgtccggtgaagaaccaacgcgtcgatgcttgttttttcccaaattcggagtctgtcccagagcctgtgaaggtagaggcgtatagaaattaaactgccaggataaataatatttggcccaaattacacatgaaataagaagtaatttaacctgtaaatagcttttcaaaatctacatctccgatgcaaataatatacccaaaaaaagaatttcctgcgtgttattcattgtttagtgagtaatcaaaagtgttttcgtttgctgttagttgagctagcggaaagctaattaaaagtaatattattaacattcgcaacttatgatggcgtcaattaattaattagaagcatgaaacagagaaatgttagagaatgaaaagggtgtaagaaataaagaattagaaggttaggatttcggcagtgcttttcttggcagagagataaagagatcgagtgattcgttggctacttacgcctgtggcctggccaccgctcatttgatgctgctgctgctgttgatattgctgcagctgctggacaatgttgggtcgttgggacaaaggaaaggcaatgttcaggttatcgttctgcaccgctgttgttgtggacaccagaggatagttgaaggcagtgcccacggaattgggttgagcgagattctgacagctgccgcggctcatatcctccgtcatcatgccaggcaagcgaggcggtagcggtggtggacccccatctacctcgatggaacctccggctgctccagctgcactcgccgattccatttgcaggaacatctgagtggacatcttaggatccgatagggccttcgttttgatcttggaacgcttggacttggcattgctcgggctgttgtcagtgctgctaggcagttgctgttgttgggatctatttaattggggacttgtggcgcgatccagatcggaaactggagccactagatgtgacccacccggcgacgcgtttccgttcttcaggtccaaatttaactgcctgggcggattcctctgcggcagtggtggcggcacatcctcctcgatcaaactcctcgaaattaggaacttgttcttgcctttcgacgtcggtccagtttccttaaagcgatgttgttgctgatgcggatggaagaactgctgcgaggtcggagtgctggtgtgctgatgcatcgattgagacatcgactccgcttggtggctcatccgttgctgctgcaggaaatccgtcgttaggccaaagggagatgaagtcgttaggtccttttcggtcttgtttttgcgcgtgcccagcgacaaggacgaaagggaacgcggcaggagggacaggaatgcgggtgaggtgctagctggctgttgctgtggcggataattgttgttgtggagattgtggtggtggtgaagatgatggaattgctgattgctgtgagtggcggacgcggacaagtgttggatttggttgggcgttagtaatgctgtgttcttattgccagcggccgcctgaagtttaacagtcggtgcatcctgtgttagggtttcatcatgggagtgcgttagaatgccgcgaaatggaagagaaagatagagatcatgtagcatcattcggtttcaactgaatccctttggaactctcgtttcatttagcgctcaactcaaactcaaaacggttacgaacagcgaaagagcattgttagattgtattattagctgggttaacagagctgcttggcatctgcttgcggcattaatataatgttttggaagggacaggaatcctgggcttatggagatttcgccttcgacctcctagcttgcctgaggtacaaatagatttacccaacagaaatattcccttactcacctcagctcccacttgatgaagttgctcgcgcagcttacggatattcgcctcagatagcttgtagctcggattattttgatcgctttttaatcgctccagatttagtttctcctgctccagcattttctgcaacgtctgaattttgtaagtctccatctcccttcgtttaatactctgcaattaaaaaccaatgaaattgatgagatctaagactcccattcgagatacttacgtccaccggctgtggcccagttattgaagcggtacgatctcgtccagagagaatgggtgtcgagggcgttaccactgataccgaagagggtcgcgttagcttctgacttcgcttcaccgccagctcaacagttgtcgaggcttaaaagtttaattgataaatgataagaagttttgattagtttgtcaaccattaatatttatttggacttttctacaaattttctaataatatattcaaaatatttcctttttcaaattcaaaatgattttgcacaggctcattaagcttgtgctattttctagtaccatttacttggtcaaagaactaggagtttgggaggatccattcgaagccagaaacagtacagtcggtaaagaaggagaagaacctttggagacgaaaaattcaaacgacaagtcagaggagggcgcagatattggagccactatatccaaggaactccagaagaaaaaagaggatttggagaaaaagttttgccccaaaggcaccttctgcgagccaccaccaaagcccctaagcaaaacagttggcgaggcactatctaacacatggggggtcttaaaagggattccgtcctactggagcgaaaccttcgaaacggtgggcgctaggatttgtcagtttttcaggggagataaatgagctttatatttaaatcagcatctataaatgaattcagcagaattcaactttcccatacacttctaggcaattaatggttccgaatttttcgaaaacttagtaaacataatctttaacttttgaacaatattcaaaattctattgaaactaaagtcaaaaatgcattaaaaattttgactacccattttcatccacatcaagggtcaagctaaaattataaccaaagtgaaaagatttagtttcaaaattaaattctctattggattatatatacggaataggcatgtctgtgagtcaacttaagccggaagagcaggtggtcattgcagcctctgagaatctatcaatgggtcctttcccacttggagaaagccagttcagtttcgtggctgcaaacaactgcagtgtggctctccagcggggattctacttctcccttcggatgcccgactgggctaaggactttaagcaccagacccagaagatactatcccatggttttgactgcccaaggagaagtttcaaaagcagcaacgactcggagatatcgaaattctatggagattatcgttctgaacgttatggcgaaatcttttcggagagcagtaatgcaagattctttgaaaacattcccggagaaatgcaagtttccaatcaaacgaaatcaaagcgagcactgcgatcacccaagattaaggacgacttaacgtgtggcaaaaaggtgccatcctaaataccctggcattggctgtcgaaaattcgaggtcacacaggaaacatcataaggagttcgggatttcgaagcttggtaaaatggttgtgggcctgattttgcgagcgggcgttgtctatgctgtggtaatggtcaccaagaactacggcgtgtgggaatctccaaacaagacgcaagatgtgtacgatgaaaccgtggagcgcatcgaaccctacgccgatcaggcgcgacgtaaactaaatatatgcccgcctaggccgccaccggagggagaatggtccttctttggcatctactactacaacaaattagttaaatcggttttcgacttactaagcgtctttcccgctggactagctgcgtttttggagaaagtaccaagctatgtcaacgcttttaacgaaaccattcaaaagtacattaaggagagccagtctaagaagaaagaaataacgatatccaagggacagctggacgagactcctctggtcagacctcccggactggtgccaccgcattgcaaagacaagaactgtccgaaggctcctctgattccaccaggatgcgaccggaacagggatagctttatctacgagccgcgtttacccaagaagccaccgtgcgagtgcgccaagtgcaagcaacgtcaggcggagaattggaaggacaacaaacgcaagtgccccagaataccgagcagtgaagccaagtgtagatgtggagagggtccccagtcggaagcccgctcggagcccatcaaatcgtgcaaacagtgccgaaagacgcctcgagaaaccgctacctagaaatcccctgaaccaaatctcctcagaccattgaacaaatttattgtaccatcatctagacaatataaatttggttgctttcttgaaaggactatgttttcataccttttataagacccactacagttggatgcttctctagtcgcacttcatggccgtttacctaaaaatgagtagtcaagaatataagaatttggggcaataggagaatttatcctactcacccttagtatcatatcgccagcaaccaggcctgcaatctccgctgcgcctccgggtttaacgctctccacaaacacaggattatctccggaaacctgtaaatgatttagataaatgtaaaaatatgttattttaatgtcagctgtttttaacaacactaaatttaaaagtttaaaagagaacacccttaaatgttaaatcaattattataatgacattttagagtcggcagtaacagacatttgttgccttagctaaaggttaaagcctacaactaagctattgtatatgacactttttattgccagtaaattctaacgtgttaagctcgttgaggaatggagtagtttttaatgctctacgttaaattctaaatatccataacaaagaaagcattataaagggttgcactttgaatgtataagcacataccttcatcccgtatccgttgctatcttttcgcacagtcagggttaaatactgaaaattttttggtaatgctaggcttggcgtactcggcgtggtcgctggcgtcgtggactcctgggtgtggccaccactcagatcccgggagaggggagtcagattgaggctactgcgctcccccggcgcctggagaacggggttggagttgtccgattgattcaattgcacgcctccgcccattatgctgccgttgttgtggctcgcattgttattattggcggtggtgggcgtggctggggcagaaacaccaccaccagctgcagccgtagagtcaccattcatttggttctgcttgtagctcggtggcaacggcggcgtctgcggcggcacggcgttctggttctcccgatccttgtcccgatctttgtcccgatccctatgaccactaaggctgctggccagactactcaggctgctcgccaacgaaggagatcgtggaatcttcgatttgttcgccaactgcttttgcttctgtttgctcttcgagttcttaacagatttctgcttgggcgctggcagctcgggaaccgagtccacaacaattactggtgactgtggcgcacccgctgacgggcctgcagatgtcgctcctggtccagttgcagttccagggcctgagtggctggatccgtttgtgctggtatggctcgttgatgtctccgggggctgaatgcttgactcttctggtatctcttgaacctcatcgtattcatgttcgtcagtatataaatctagtaacctgacggaacaaaatatacatttagtttattcaaaactcttatttattcattattataataataattattattaattcagtaagctcaagtgtaattaaaaccctgcccgcataatatgaactccatcttgatatctggcagcagaaaagcaacaattttttcaatatgaaatagcgctgtggatatttcattgttttaaagtcttcgctttgagtgactaattttctatccgtcgttatctatcaaatctttatcttcatttactcagattagttgtcaccaataccattttactaatcttgtaaaaccttttatcgcctttttatacacactgatttggtgactaccgtctctgtggttacaattaattcatttttattgttcctttactaaaccatgatggttgattagctagttagtttgtataccctttaaaatactagacttcaggcattgaatagaaccagcggattgccagctcaatcatctatgagaggtaatcaatgctgaataatttcatggcggaactgcttctgctcttcgccaacgattcccatgtggtatgctgggttttaaagagcagatagctagattagtggctaatcaagacctcgctgtgaatgcgacaaacatgtaacgaaagtcacggccaaagccaaagccaagcgatttgtcgtcgctggtgggtctcttttaattgagctaaaattaaatcagccagaagaatagatacactttaattgccgtttatttgatcattttgcatgtgaatggaatggataaacatacatatgtacatatgtatgtcccagtatacagtgtgtaccaccttcggacccgttcatataccggaatataataaaagctcatttcccgcctggtgaattcatcattatgatgagttatttccataacagccgggcgggcaggcaagacctccaaaaatcaaatgtttacattaacttttttgactgattggcccatgtcaatagcatgtctctccgtttgatccaagtgaattctctttctgtctaaatttagctgcctaattttgaggaaatcttgctgcagcccgttgacgggctggcataaaacctgttaaggcccacaaatcagacgacaacaccagtggtggtgagctgttaatagatttaaatcattttgcataggtatattatacaattcgtggttaagacaccaccaccaaatgcacacacaagcatgcttagaaagtcactggtttcgccaatctatttgggctaaaacttccctaggtggcaataaaagaaataaatggtaaaatgtgaaaactggccgctccctaagttggtgagcgtatatatgtattaagtcatccgtttggcagtcgaaaccgcacaaaaacaaccccaagcttgggggaactattggtataaacaatcagcaaacacagtgcgtttcagaactgtgagacggcgcaaagtttcacctcgtcaattggctattttcaaacaacgtttgctgactaatcacgggtcaaatgaattagtaattgcttacaaaagttgatcggtgatctaatgcacagttaaatcatctgtaactggcttaagaactatttaaaatgtagtaaaatacctattattttaatataatttcgaggattcttaaaggctgctacactatttaggcaacgatcttacataagttgctagttcttaagggtagccctaatatgttaatataagcacttaggtcaagaatgtgtgaaagcttcttttatgagtaaaaattcttccgatttgatataataagagctttaactttttgtgtgactaatatcttcttcttcttcgagatttcattaaaattattcaattcccacaaccagttgacactgcctttgaaatttgcattaaacctgcctctatgatgtatatttggtatatttattagtatgtgtataatcgactgttgcttgcgaataagaacgaaaataacaattattaagtctgtcgaggacaaaagataaattcttatcgcaatgcgagcaatttaaccagtgggaaagtggaaagtggggaaattgtagcgcatggagacagtggagcagttgaactcaccgttttttgattgatgggtcatccatagggtttcctgcgatggcttttgctggctgctgtgcgggtgcgaagatgcaaattcaaaggcatgcgtaagccactcgaagtcggaggatcccgtggagtattgttcgcattggtgtggggccagtcaccagaagtggttgcggaatgctttcggcagctatttttaaattagctagtaaaaacgggccgaaatgaatccagaagtgatttaattgcctcgattttcgttgctttagttctgttttatgattttttggttgcactattccaatgggttttgatatgtgtatatatattttgcactgctacttttcacttaaacctgtgggcacacaaaattcgtttgaagacatttcgggcattaatgcatgtacattaaaatatttgtttgcattttttttttttttttttgagtgggtggtgaagggttatgggggatggggcggatcggagagggttcaaatgcaggcagcaatctccttgcaatttcattgtttttattccaacacagataactgaacagcacacccacacactcacgcgcaagccatacatattccaatgcctatggctctctcgccgcgctcgttctctctcactctctctcgtaatctcttgctttctctgtcactcgcaggcagcagttgttgctggttttattgttgtgctttttgctgactagttttcacgaaacatttaatggatgacgacttggggttgggggaaaacaagtttttggccgaaaaattgaaatactaatgctatactaatgggtcagagcggacacacaagcaggaaaattccagcgatcctttccagatttgcgtattttccattagaacagctgattgttcaattaatcgcttgtgttcaattagcgtgacgaaaacccaaaaagaaaaacaaagactccctctctttctttgaatttgcactgatctcactgtttgtttacctaaataaatcaattcttgcagtttcactcctttttaattaaacgcaaatatttaattgaataaatatgtatacacacaaactggactgactgactgactgagtgtgtgtgggggtgcgagtgcgatcatcgccgcaaacgcaaaggcaaaacaatatggctgccgcaagccacttgttagagaaaaacaagggattcgaagcctcggaaagcgtccagttgtttatcatttactcattaattcgatcgcttcccgctccgtcaagccgcacatccctaaaatcgaattaaagccatgtactgcagttcaagagttcagcactcgacgcactcacacacgcgcgtcgctcactaacactcactgccaccgatgggcgagtgtggaaaataaatacacatatgccgtcatacattcgatgcccctataagcgcgctgcgtctgtctgcgtgcgatgggttagagatcatttttagacaaatttgcgtacaatatttcctggcagttgcaagctcgcgattttgccattgacgagcgtgcacaaatgcacttaaatatgtatgaattttacgccagtgtgtgggtgcgcggaatgcatgtagtcactttttttatttattgcttttgttgctgcagtgagctcacgcgtagcgagttgcgcatcattctttctctgcttcgccactttcgccacgcacttacttaaaacgcactcgtattgtattccataaagacacgaaaaatgtttttatttttttcacttatcgcgccatcaacacgcacacgacgttcttttcttttcagcttgaaaattggaatgaaatgacgagaaagagcgcatatctgccagtgttgaaaagggctttagttcggtacggaattcagtacctaaaactggtacaaacaaggtaccttgccgatgatacaagttagctattggtttttattcattgttttaaatgcttcttaatatatttcgtacgtgtgttcattaaggcaatgtgtgtaaatcttagcttataaaaattatagcccaaacttgacttgaactttttaataaaaccaaaatgcaaacattgaggccaaagcctttttattaatttaagtcagcttagaagtagacgagccacaatccagatacgtacctatttattggaccgcaacactgatatccatacacgaacttagcagcactgtcccgggaccaatgcttttgcaacacttgatctggcgtgcctggcagaaatcaaaacaaacgcacagcacaaccacccacacagacatgcatgcatacatacatacggacagcacaaagagcagacaacaaaaccgcgttctgtgtttttcgtgaaatgtcgtttatttggtggcggttactcgcgttgacaaacaaaggcagggcaacgcacccaccgccctctgagatatcatacttggttagctgcatacattcgcaaatgtaagcgccaacaactaatgtttgcctaggacaaatccggacccaggaggtagaagagcaaaaccatcaggtagtagagcagtaatcctataaatgccatgttgtagtttggactttcctgtttcgtgcgccgcctagggacgcacttctggcgtcatgaactggcctcctccagaattggtgtcgccctcgccactccgccgttcttctccagaaccaggttgccaactacatcagcaccctcgctatccgaatcctgcataagtgggctgtcgagaattcgaagattttttaagtcttcatactgattggcaatatccaacgtaactgggtca

SEQ ID NO: 15026 - DNA, 8425 bp, DROSOPHILA
aagaacgtcgtgtgcgtgttgatggcgcgataagtgaaaaaaataaaaacatttttcgtgtctttatggaatacaatacgagtgcgttttaagtttaagtgaaaagtagcagtgcaaaatatatatacacatatcaaaacccattggaatagtgcaaccaaaaaatcataaaacagaactaaagcaacgaaaatcgaggcaattaaatcacttctggattcatttcggcccgtttttactagctaatttaaaaatagctgccgaaagcattccgcaaccacttctggtgactggccccacaccaatgcgaacaatactccacgggatcctccgacttcgagtggcttacgcatgcctttgaatttgcatcttcgcacccgcacagcagccagcaaaagccatcgcaggaaaccctatggatgacccatcaatcaaaaaacggttactagatttatatactgacgaacatgaatacgatgaggttcaagagataccagaagagtcaagcattcagcccccggagacatcaacgagccataccagcacaaacggatccagccactcaggccctggaactgcaactggaccaggagcgacatctgcaggcccgtcagcgggtgcgccacagtcaccagtaattgttgtggactcggttcccgagctgccagcgcccaagcagaaatctgttaagaactcgaagagcaaacagaagcaaaagcagttggcgaacaaatcgaagattccacgatctccttcgttggcgagcagcctgagtagtctggccagcagccttagtggtcatagggatcgggacaaagatcgggacaaggatcgggagaaccagaacgccgtgccgccgcagacgccgccgttgccaccgagctacaagcagaaccaaatgaatggtgactctacggctgcagctggtggtggtgtttctgccccagccacgcccaccaccgccaataataacaatgcgagccacaacaacggcagcataatgggcggaggcgtgcaattgaatcaatcggacaactccaaccccgttctccaggcgccgggggagcgcagtagcctcaatctgactcccctctcccgggatctgagtggtggccacacccaggagtccacgacgccagcgaccacgccgagtacgccaagcctagcattaccaaaaaattttcagtatttaaccctgactgtgcgaaaagatagcaacggatacgggatgaaggtttccggagataatcctgtgtttgtggagagcgttaaacccggaggcgcagcggagattgcaggcctggttgctggcgatatgatactaagggtaaacggccatgaagtgcgactagagaagcatccaactgtagtgggtcttataaaagcctcgacaactgttgagctggcggtgaagcgaagtcagaagctaacgcgaccctcttcggtatcagtggtaacgccctcgacacccattctctctggacgagatcgtaccgcttcaataactgggccacagccggtggacagtattaaacgaagggagatggagacttacaaaattcagacgttgcagaaaatgctggagcaggagaaactaaatctggagcgattaaaaagcgatcaaaataatccgagctacaagctatctgaggcgaatatccgtaagctgcgcgagcaacttcatcaagtgggagctgaggatgcaccgactgttaaacttcaggcggccgctggcaataagaacacagcattactaacgcccaaccaaatccaacacttgtccgcgtccgccactcacagcaatcagcaattccatcatcttcaccaccaccacaatctccacaacaacaattatccgccacagcaacagccagctagcacctcacccgcattcctgtccctcctgccgcgttccctttcgtccttgtcgctgggcacgcgcaaaaacaagaccgaaaaggacctaacgacttcatctccctttggcctaacgacggatttcctgcagcagcaacggatgagccaccaagcggagtcgatgtctcaatcgatgcatcagcacaccagcactccgacctcgcagcagttcttccatccgcatcagcaacaacatcgctttaaggaaactggaccgacgtcgaaaggcaagaacaagttcctaatttcgaggagtttgatcgaggaggatgtgccgccaccactgccgcagaggaatccgcccaggcagttaaatttggacctgaagaacggaaacgcgtcgccgggtgggtcacatctagtggctccagtttccgatctggatcgcgccacaagtccccaattaaatagatcccaacaacagcaactgcctagcagcactgacaacagcccgagcaatgccaagtccaagcgttccaagatcaaaacgaaggccctatcggatcctaagatgtccactcagatgttcctgcaaatggaatcggcgagtgcagctggagcagccggaggttccatcgaggtagatgggggtccaccaccgctaccgcctcgcttgcctggcatgatgacggaggatatgagccgcggcagctgtcagaatctcgctcaacccaattccgtgggcactgccttcaactatcctctggtgtccacaacaacagcggtgcagaacgataacctgaacattgcctttcctttgtcccaacgacccaacattgtccagcagctgcagcaatatcaacagcagcagcagcatcaaatgagcggtggccaggccacaggcgctctgggacagactccgaatttgggaaaaaacaagcatcgacgcgttggttcttcaccggacaatatgcatccacgtcatccagatcggataacgaaaacgacttcgggctcgtgggagattgttgaaaaggatggcgaatcctccccgcccggaacaccgccgcctccatatctatccagctcccacatgaccgtgctggaagatccgaatgagaacaatcgtggagcagcagcagccggacctggagtctttatcgagtcgcatcagtttacgccgatggcgggagcctcttctccgatcccgatatccttacattccagccacatgcatgcggcccagtcgaacgatacgcagaaggagatcatctcgatggaggacgaaaactcggacttggatgagcccttcattgacgagaacggaccctttaacaatctaactcgtttgttagaggccgagaacgtcactttcctagccatcttcctaaactacgtgatctcaaactcggatcccgcgccacttctgttttacctgattactgagttgtacaaggagggcacctccaaggacatgcggaaatgggcctacgaaatccactccacattcctcgtgccgcgggctccattgtcatggtatcgccaagatgaatcgctggcccgcgaggtggataatgtcctgcagttggagtatgacaaagtggagatcctaaggacagtttttctgcgtagccgaaagcgggccaaggacctaatcagtgagcagctgcgtgagtttcagcagaagcgcaccgccggcctgggaaccatttacggacccacggacgacaagctggccgaggcgaagacggataagctaagggagcaaatcatcgacaaatatttaatgcccaatcttcacgcgcttattgaggatgagaacggttcaccgccggaggatgtacgcaaggtggcgttgtgttctgctctttccaccgtcatctaccgtattttcaacactcgtccgcctccaagcagcatcgttgagcgggtccatcactttgtgagcagggacaagagtttcaagtcgcgtattatgggcaaaaatcgcaagatgaatgttcgtggtcatccattggtattgcgtcaatactatgaagtgacgcactgcaatcattgtcagacgattatctggggcgtgagcccgcaaggttatcattgtacagactgtaaattgaacatacaccgtcagtgctcgaaagtagtggacgagagttgtcccggtcccttgccccaggcaaaacgtctcgcccacaacgacaagatcagtaaattcatgggcaaaattcgaccgcgtaccagcgacgtcattggaaatgaaaagcgaagtcgtcaagatgaggaattggatgttgagttgactccagaccgtggtcaggcgtcgattgtgcgtcaaccctctgatcggcgaccggatgcgaacatatcgataaggtcgaatggaaatacctcctgcaacacttcggggctgaacaccaccgacctgcaaagttcttttcacggcagctgtgccaacgacagtattaaccccggcggtggagccggatgcaacatggatttatccacgagcgtggcgtcaacgactccgtcgaccagtggatccgtggcagccggtctgagtgcttttgccgaactgaacgccctggatacagtggataaagaagcgcgtagggagcgttacagtcagcatccgaagcacaaaagtgcaccagtctctgtgaatcggtcggaatcctacaaggagcgcttgtccaacaagaggaaccgcaacagtcgccgcaagacctctgatccaagcttgtcgtcgcgtcccaatgatgaacaactggacttgggtctatcgaatgccacttatgtgggcagttcgaattctagtctctcttcagctggcggcagcgagagtcccagcacgtcaatggagcactttgctgcacccggagcagcgggtggcgtccaggtgccgccaatgggattgaaccagaaccagcacccccatctgctcatccagcagcacgcccagcagtactgccagcaggattcctttcaggcgggtttggcaggggccgctgggagcagtgcagctagcaactctagtttctggaatgctggccacccattgcctgtagctcgttggacgctggagagcgaggatgaagacgacgtgaacgaggcggactggagttccatggtggccgcagaggtgttggcagccttaacggacgctgagaagaagcgtcaggagattataaatgaaatctatcaaactgaacgcaaccatgtgcgcaccctaaagctgctggatcgattattcttcctgccactctacgagagtggattgctgtcccaggatcatttgctgttgttgttcccgcccgccttgctgtcgctccgtgagattcatggcgccttcgagcagagtcttaagcaacgacgcatcgagcataaccacgtggtgaacaccataggggatctgctcgccgacatgttcgatggtcagtctggagttgttctttgcgagtttgcggctcagttctgtgcccgccagcaaatcgccttggaggcactcaaggagaagcgcaacaaggacgagatgctgcaaaagctattgaaaaagtcggagtcacacaaggcatgtcgccgcctcgagctaaaggacttgctgcccaccgtgctgcagcgcctcaccaagtatccgcttttgtttgagaacctttacaaggtgaccgtgcgcttgctgccagaaaacaccaccgaggcggaagccattcaacgggcagtggaatcctctaaaaggattcttgtcgaggtcaaccaggcagtaaagacagcagaggatgctcacaagctgcaaaacattcagcgtaagttagacagatcctcctatgacaaggaagagtttaagaaattggacctgacccaacatcacctcatccatgacggcaatctgacgatcaagaagaatcctagcgtgcagctacatggacttctgtttgaaaacatgattgttttgctgaccaagcaggatgataaatattatctaaagaacttgcacaccccgctatcgatcaccaataagccagtcagtccaattatgagcattgatgcggacactttgatccggcaggaggcggctgataaaaattcctttttcctcatcaagatgaagacatcacaaatgttggagctacgcgcgcctagtagctcggagtgcaagacatggtttaaacacttctcggatgtggctgctcgtcagtctaagaatcgttcaaagaacgcatcaagcaaccatgacacgagtattagtgatccagctctcgccgctattccgcattccaacaccaaagagtcgttggagttgagcactgatacagtacagccattggctgcgacagccacattgactaccacaccattggccccaatgctgcctatagccacggttacaccggctccagcgaccaataatagtaacgttagctctcttactggagttcagttgcgaaaccctcaacgggatgcgacagcaagtgaatctgatgcggattatgtaaacacaccaaagccgcgttcgagccaaaatgaagttaatcgcactatgtccataagaagcactggcgaacccattcagaagtattcggcgaatgggacggaagcaaacgacgttactttacgacactctcagtcgactagggaatcggttagaccaggatctactggggaggagcgaaactccacgtatggtatggttggaggtaactccaaacgcgacagcgccagcattgtctgctcgaacaactcgaacaacacgcgcacccttctgatgcagagtcccttggtggaccctacggccattcaggtcagcattagtcccgctcacacagcggaacctgtgttgacaccaggagagaagttacgccgcttggacgcctccattaggaatgatttgctggagaagcagaaaatcatttgtgatatcttccgtttgccagtggaacactacgaccagattgtggacattgccatgatgccagaggcgccgaaagacagtgcagatattgctttagctgcttacgatcagattcaaaccctgaccaagatgctgaacgagtacatgcacgtcacgcctgagcaagaggtctcagcggtgtccacggcggtttgtggccactgtcacgagaaggaaaagcttcgtaagaaggtggcaccatcctcatcgttttcttcatcaccaccaccgctgccgcctcccaataggcagcatgcccaggctcaggcccagataccgccatcgcggctgatgcccaaactacaaactcttgatcttgacgaagttgccatacacgaagacgatgacggatactgtgagatcgacgaactgcgcttaccggctattccgtccaaaccacatgagcggcccacaacgccactggctcctttcaatactgagccgaaaacttcacaatctgttatagatgcctcgaaacgtcaatccactgatgccgttccggagggattactggaacaagaaccactcgaaggcgataagacggagaccaagggtgaagataatgaagtgaaaactgtgccgtcagataagctaagtgaatcatgcaatgaagagaggcaatgtgtggaggcggatatcacaaaggaagtggcagatccaacgacctctaagaatgaagctgcagcatcggtggatgaattaccaagccagagccgggagataaaaacggctgaaaacgcaagcaaatctgtagctgacaaaaaggaagacaacgaggaaaccatcgaagaaggtgtggcatccacggtcgatagctccactcaaacatcaccaactgaatcgccgaaagagacggataagttaactggaggatcgagcagcacctgtgggccgaatcgcattcagcacgctagtgtgctggagccgagtgtgccctgccatgcactcagcagcattgtaacaatactgaatgagcagatttccatgcttttgccaaaaattaacgaacgcgatatggaaagggagcgattgcgtaaagagaatcaacaccttcgcgagctcttgagtgcgctgcatgatcgacagcgagttgatgaagtaaaggaaactccgtttgatctaaagaagctgatgcatgctgaggatgtagagtttgacgatgatattgacgccatttccaacagttcgctgacgccaacgcctacgccgattcccacagcatcaccaagcgccagcggccaggtagagacagcggaagccatgaggattactagcactgaggatgaggaataggaaacttgtttaatttttttttgtataaaatacatatttgttcttgtttttcccgcacgcatttgaccaattgaattggcggcgtctatgttttacgagtagcctttcttagagcatgccttttactactgttaatgtagcttcatttgttttcttaaaatattatgtattccacaagagccgataacactttaaattaagtctaacattgtcccctcgtaaaactaattaaatacatatatatatgcatattatcgacttaaaaaatatcagataaacacacaatgtttgatacatttataaagaacaataaacaacatagttattgag

SEQ ID NO: 15027 - protein, 2559 aa, DROSOPHILA
MDDPSIKKRLLDLYTDEHEYDEVQEIPEESSIQPPETSTSHTSTNGSSHSGPGTATGPGATSAGPSAGAPQSPVIVVDSVPELPAPKQKSVKNSKSKQKQKQLANKSKIPRSPSLASSLSSLASSLSGHRDRDKDRDKDRENQNAVPPQTPPLPPSYKQNQMNGDSTAAAGGGVSAPATPTTANNNNASHNNGSIMGGGVQLNQSDNSNPVLQAPGERSSLNLTPLSRDLSGGHTQESTTPATTPSTPSLALPKNFQYLTLTVRKDSNGYGMKVSGDNPVFVESVKPGGAAEIAGLVAGDMILRVNGHEVRLEKHPTVVGLIKASTTVELAVKRSQKLTRPSSVSVVTPSTPILSGRDRTASITGPQPVDSIKRREMETYKIQTLQKMLEQEKLNLERLKSDQNNPSYKLSEANIRKLREQLHQVGAEDAPTVKLQAAAGNKNTALLTPNQIQHLSASATHSNQQFHHLHHHHNLHNNNYPPQQQPASTSPAFLSLLPRSLSSLSLGTRKNKTEKDLTTSSPFGLTTDFLQQQRMSHQAESMSQSMHQHTSTPTSQQFFHPHQQQHRFKETGPTSKGKNKFLISRSLIEEDVPPPLPQRNPPRQLNLDLKNGNASPGGSHLVAPVSDLDRATSPQLNRSQQQQLPSSTDNSPSNAKSKRSKIKTKALSDPKMSTQMFLQMESASAAGAAGGSIEVDGGPPPLPPRLPGMMTEDMSRGSCQNLAQPNSVGTAFNYPLVSTTTAVQNDNLNIAFPLSQRPNIVQQLQQYQQQQQHQMSGGQATGALGQTPNLGKNKHRRVGSSPDNMHPRHPDRITKTTSGSWEIVEKDGESSPPGTPPPPYLSSSHMTVLEDPNENNRGAAAAGPGVFIESHQFTPMAGASSPIPISLHSSHMHAAQSNDTQKEIISMEDENSDLDEPFIDENGPFNNLTRLLEAENVTFLAIFLNYVISNSDPAPLLFYLITELYKEGTSKDMRKWAYEIHSTFLVPRAPLSWYRQDESLAREVDNVLQLEYDKVEILRTVFLRSRKRAKDLISEQLREFQQKRTAGLGTIYGPTDDKLAEAKTDKLREQIIDKYLMPNLHALIEDENGSPPEDVRKVALCSALSTVIYRIFNTRPPPSSIVERVHHFVSRDKSFKSRIMGKNRKMNVRGHPLVLRQYYEVTHCNHCQTIIWGVSPQGYHCTDCKLNIHRQCSKVVDESCPGPLPQAKRLAHNDKISKFMGKIRPRTSDVIGNEKRSRQDEELDVELTPDRGQASIVRQPSDRRPDANISIRSNGNTSCNTSGLNTTDLQSSFHGSCANDSINPGGGAGCNMDLSTSVASTTPSTSGSVAAGLSAFAELNALDTVDKEARRERYSQHPKHKSAPVSVNRSESYKERLSNKRNRNSRRKTSDPSLSSRPNDEQLDLGLSNATYVGSSNSSLSSAGGSESPSTSMEHFAAPGAAGGVQVPPMGLNQNQHPHLLIQQHAQQYCQQDSFQAGLAGAAGSSAASNSSFWNAGHPLPVARWTLESEDEDDVNEADWSSMVAAEVLAALTDAEKKRQEIINEIYQTERNHVRTLKLLDRLFFLPLYESGLLSQDHLLLLFPPALLSLREIHGAFEQSLKQRRIEHNHVVNTIGDLLADMFDGQSGVVLCEFAAQFCARQQIALEALKEKRNKDEMLQKLLKKSESHKACRRLELKDLLPTVLQRLTKYPLLFENLYKVTVRLLPENTTEAEAIQRAVESSKRILVEVNQAVKTAEDAHKLQNIQRKLDRSSYDKEEFKKLDLTQHHLIHDGNLTIKKNPSVQLHGLLFENMIVLLTKQDDKYYLKNLHTPLSITNKPVSPIMSIDADTLIRQEAADKNSFFLIKMKTSQMLELRAPSSSECKTWFKHFSDVAARQSKNRSKNASSNHDTSISDPALAAIPHSNTKESLELSTDTVQPLAATATLTTTPLAPMLPIATVTPAPATNNSNVSSLTGVQLRNPQRDATASESDADYVNTPKPRSSQNEVNRTMSIRSTGEPIQKYSANGTEANDVTLRHSQSTRESVRPGSTGEERNSTYGMVGGNSKRDSASIVCSNNSNNTRTLLMQSPLVDPTAIQVSISPAHTAEPVLTPGEKLRRLDASIRNDLLEKQKIICDIFRLPVEHYDQIVDIAMMPEAPKDSADIALAAYDQIQTLTKMLNEYMHVTPEQEVSAVSTAVCGHCHEKEKLRKKVAPSSSFSSSPPPLPPPNRQHAQAQAQIPPSRLMPKLQTLDLDEVAIHEDDDGYCEIDELRLPAIPSKPHERPTTPLAPFNTEPKTSQSVIDASKRQSTDAVPEGLLEQEPLEGDKTETKGEDNEVKTVPSDKLSESCNEERQCVEADITKEVADPTTSKNEAAASVDELPSQSREIKTAENASKSVADKKEDNEETIEEGVASTVDSSTQTSPTESPKETDKLTGGSSSTCGPNRIQHASVLEPSVPCHALSSIVTILNEQISMLLPKINERDMERERLRKENQHLRELLSALHDRQRVDEVKETPFDLKKLMHAEDVEFDDDIDAISNSSLTPTPTPIPTASPSASGQVETAEAMRITSTEDEE

SEQ ID NO: 15028 - DNA, 4715 bp, DROSOPHILA
gccagaggcagcgttctttgcccgcacctacctgcccagccagatgtcaaggatcgtagagctttggcgggagaagcttggaaaggtcaacgaaaaggcgggacagtcgctggccgatccggcacagtatacaaatctcttccctggcctgggcgatgcgctgcgggtggagcagcatttgcaggaggagcgagctcgtaaggcgccggcacgcctcgctgcgaatctaccactgaatagcgaacgtcatcctctgcaagaactatttgccgccgagcagggtgccgccggccagcatttggaggagaaggtgaagccagcttacgttcccgctcaagctgttgtttctagcagccaggtggccgagcctacatccgctgcggatgacgacgacgacctggacttggaaatagatggaattacgttggatgataacattgatacgacagatgtgaacctcgatgacgattttctaagcgacgattaggacggaagatcacagccagatctagaataccatttaaactatcgtttactgctacgggagtcccacatttcgtgcatttcgagccacagaattccgcgcatgcattcacatttgatttgattgaatgttgtttaaatatatatctattaataatatgtacaacagtaatggagcaaacactgcaataaatacttatacaacaatttcaaatatggcgctcacttcaactatttcgattacattctgatatcttatcgataaaacttttaaacaaacttacgatcatgccaggagaaattaaaaattatttttgttcttttttttttttgagttaaattagtattcatggtctattttattatatatttgtacaaaaaaatgttctgtacctgttacatacatttatttcaacatatttactctacgagtagggggtgtaataagtaggcaatccaaaaaaagtctggcaaccacaaatatcagtaaaatacatacaattcgtgtgtgcgtctggattttgctgtattttttatttaagaatgaattattaactaaccattaataaattattattaaataaaaaacagttaaaaccgcgattcaaacgtgagtactccccgaatttcggcgagagtgtcaactggacttttcgcccgctattcgtcggtgatgtatcgatttttcaaacaacaattaccccgaaattttaaacagatacacaccgaatcctcccgaaaaccgtgcaaaacaagaacaccatggaccaggagaatttccacggctccagcttgccgcagcagctacagaacctccacatccagccgcagcaggcgtcccccaatcctgtccagacgggatttgctccacggcggcactataataaccttgtcggcctgggcaatggaaatgccgtcagtggtagtccggtgaagggtgctccgctggggcagcgccatgtgaagctcaagaaggagaagatatccgcccaggttgcgcagctgtctcagccaggtcagctgcagctgtcagatgttggtgatcctgccttggcgggcggatcgggcttacaaggtggagtcggccttatgggcgtaatattgcccagcgacgaggccttaaagttcgtcagcgaaacggacgccaatggactggccatgaagacgcccgtcagcattctgcaagagctgctaagccgacgaggaattactcccggctatgaacttgtccagatcgagggcgccatacatgagccgaccttccggtttcgcgtgtcctttaaagacaaggatacgcccttcacggccatgggggcaggacgatcgaagaaggaggccaagcatgcggcggcccgtgcgctcatcgacaagctgatcggcgcgcagctgccggaatcgcctagcagctccgctggtccgtcggtgactgggctcacggtcgccggaagcggaggagacggcaatgccaatgccacaggcggaggagagtgagtttttattctattgatgtctaagatatgattctaagatatccaatttattgtattatgtccttgcagtgccagcgacaagaccgttggtaatccgattggctggttgcaggaaatgtgcatgcaacggcgatggccaccgccgtcgtacgaaacggaaacggaagtgggtcttccccacgagcggctctttacgatcgcctgctcgatactcaactaccgcgagatgggcaagggcaaaagcaagaagatagccaagcgcttggccgcccaccgcatgtggatgcgtctgcaggagactcccatcgattcgggcaaaatcagcgacagcatctgcggcgagttggagggcgaagtgagtatcattcaagacatcgatcgttacgagcaagtctctaaagattttgagttcatcaagatctaacccacaagcaattttctaatatttttagtgcaattattttgaatgcagtcccatgctttagtttataaaattttaaaaattgattttatcaaatatatgtcataaatgttatatattatttaatacgtttgtcctctatcccttctcaaatgtaatgtagaacgtttagagtaatcctcagttgtaaatatccctataatcttttaaattatgtatctagctagagttttagtactatagcatcccttttatagtgtgctatctgatattttttattgtccttgtttttataactaatgtttttgacataattatacatataattaacataatgcttacaccttatttatatttctggttttatttatggtttatattggcttatttcatttttcatttttcatattgttccttggcatggtgattgttttaaagaacgaatctgtaaagcaccttttccacacaaaagtgatatgtttcaactcaccattggcgtgtgtgatttcaaatgtgtgcgaaatgcaatggagaaaagaaaccaaaaactttgcgctcttatttacagccccgcagtagtgaaaattattatggtgaattgaaagatatctctgtgccgacactgaccacgcagcacagtaacaaagtatcccagttccataagaccctaaaaaatgcaacgggcaaaaaactgcttaagttacaggtaaatttcaatccaataacgctttttattcaaaaacgatcacaaacatatttccaacattcaaaacctgctttcgaaagtacatatttgccttaacccctcacaatccttataataatagtgttcttgcttgaaagttcaaagtttaatttgactctgctaattcgactccatttgtatttttttcagaagacttgcttgaagaacaacaagattgattacatcaagctgctgggcgaaatcgccacggagaaccagttcgaggtgacctatgtggacatagaggagaagaccttctctggccagttccagtgcctggttcaactgtccacgctgcccgttggcgtttgccacggcagcggaccaacagctgccgatgcccagcggcatgccgcccagaatgccctcgagtacttgaagatcatgaccaagaagtagggggtgcagccaactgaatagcaaaatctgaacgcacaccacgaccacgatcacgagtatttgatgagagcgattaccgagtggatacgggataactaatgcaccagtctaattgcttttctttccactttttggctcaatgcagtggcgatgttacatatatatatatatatattttgtttcttttccaccgattcctttgattaggcagttgtatttgttaactgcatatgtaaatgttcatatatgtactacacttaccgatgaatgtatgtacgcttgcaaatacagacaagcgtgtaatcgatattggaatcttctagtcgctttcaaattctgaaaaacgtaaaacggcagataaaactaggtttaaggtagactacgtgctagtttgcgaaggaaaaaggcttatgaatataatcggtatttggtaatcgctacttttgcagttttcttttccttgggctgaaaaactttgtaaactccgaattaaagggcattgatgaattgaaattaatcaatccaactttagaaatattctgtgaaaacatcttttatgatatggaattatttaactacaaattagttaggaaataaattgacaaatataatactgaagttatagtagccgtggctttatttaaataggtaattttgtgcttaatctaaagtagtattctaagtaatcataaaggattgcatctatttcttctttctgtcctgcgtacacttgggacagaaccacttgccctttggctttgtggtgaggccaacacaagcgaagtgaaaccactcgatgggacactaaaatggtagagtgaaagatctagaactgaccacagagtacatcaaaatcgaatactcacgtcgggattgtcgcagccaatcatctctccataggacacctggtggcataggcaatatgtgggctcattgggatcgacgggcatgtccataacgtcgctgggatgagtggcggccgtgtggcacgattccttctcagagtcatcaacctcgacggttttctaaatgggtatgttagcaaaatgagtaagaatggggtttcgacgatagtggaggcgtgcatgtacataagtgaaaatgcaaacgatatggaaaacagtggataatgcaggatttctatggggataatctataaaagtaaagagtattctat

SEQ ID NO: 15029 - DNA, 1682 bp, DROSOPHILA
gattttgctgtattttttatttaagaatgaattattaactaaccattaataaattattattaaataaaaaacagttaaaaccgcgattcaaacgtgagtactccccgaatttcggcgagagtgtcaactggacttttcgcccgctattcgtcggtgatgtatcgatttttcaaacaacaattaccccgaaattttaaacagatacacaccgaatcctcccgaaaaccgtgcaaaacaagaacaccatggaccaggagaatttccacggctccagcttgccgcagcagctacagaacctccacatccagccgcagcaggcgtcccccaatcctgtccagacgggatttgctccacggcggcactataataaccttgtcggcctgggcaatggaaatgccgtcagtggtagtccggtgaagggtgctccgctggggcagcgccatgtgaagctcaagaaggagaagatatccgcccaggttgcgcagctgtctcagccaggtcagctgcagctgtcagatgttggtgatcctgccttggcgggcggatcgggcttacaaggtggagtcggccttatgggcgtaatattgcccagcgacgaggccttaaagttcgtcagcgaaacggacgccaatggactggccatgaagacgcccgtcagcattctgcaagagctgctaagccgacgaggaattactcccggctatgaacttgtccagatcgagggcgccatacatgagccgaccttccggtttcgcgtgtcctttaaagacaaggatacgcccttcacggccatgggggcaggacgatcgaagaaggaggccaagcatgcggcggcccgtgcgctcatcgacaagctgatcggcgcgcagctgccggaatcgcctagcagctccgctggtccgtcggtgactgggctcacggtcgccggaagcggaggagacggcaatgccaatgccacaggcggaggagatgccagcgacaagaccgttggtaatccgattggctggttgcaggaaatgtgcatgcaacggcgatggccaccgccgtcgtacgaaacggaaacggaagtgggtcttccccacgagcggctctttacgatcgcctgctcgatactcaactaccgcgagatgggcaagggcaaaagcaagaagatagccaagcgcttggccgcccaccgcatgtggatgcgtctgcaggagactcccatcgattcgggcaaaatcagcgacagcatctgcggcgagttggagggcgaaaagacttgcttgaagaacaacaagattgattacatcaagctgctgggcgaaatcgccacggagaaccagttcgaggtgacctatgtggacatagaggagaagaccttctctggccagttccagtgcctggttcaactgtccacgctgcccgttggcgtttgccacggcagcggaccaacagctgccgatgcccagcggcatgccgcccagaatgccctcgagtacttgaagatcatgaccaagaagtagggggtgcagccaactgaatagcaaaatctgaacgcacaccacgaccacgatcacgagtatttgatgagagcgattaccgagtggatacgggataactaatgcaccagtctaattgcttttctttccactttttggctcaatgcagtggcgatgttacatatatatatatatatattt

SEQ ID NO: 15030 - protein, 419 aa, DROSOPHILA
MDQENFHGSSLPQQLQNLHIQPQQASPNPVQTGFAPRRHYNNLVGLGNGNAVSGSPVKGAPLGQRHVKLKKEKISAQVAQLSQPGQLQLSDVGDPALAGGSGLQGGVGLMGVILPSDEALKFVSETDANGLAMKTPVSILQELLSRRGITPGYELVQIEGAIHEPTFRFRVSFKDKDTPFTAMGAGRSKKEAKHAAARALIDKLIGAQLPESPSSSAGPSVTGLTVAGSGGDGNANATGGGDASDKTVGNPIGWLQEMCMQRRWPPPSYETETEVGLPHERLFTIACSILNYREMGKGKSKKIAKRLAAHRMWMRLQETPIDSGKISDSICGELEGEKTCLKNNKIDYIKLLGEIATENQFEVTYVDIEEKTFSGQFQCLVQLSTLPVGVCHGSGPTAADAQRHAAQNALEYLKIMTKK

SEQ ID NO: 15031 - DNA, 3173 bp, DROSOPHILA
tttagtttgcccagaggattcactttgcgttcgctttgtttcgaggtgctgacactggcatttgcaccttcgatctcgcgcattagctcggcaatcgcctgactaacgtgagagcatcaaattaattaaaaatatatcggattgtaatataaatatttactttgttaggtctgcgtccatttccattttttgtgtttgtttatggcatttaattgaataccaattgctgcgaaacaaaaaataccgcggacggtaagtgctacttataagtatttttaaaatactaagtataaagcgattattgtatgtgcgttaaattagcgtcgatgagttcgcggcgatgacggaacggtggaaatcaaaacatggggacgttttttatttatttatttcttttcgttatttggaggtgaattgcaaaaaataaaataaagatcttactaactattcccacattttcgggaatttctccactcgtagagcgtgaccacttttaaggacatttctttagggaaacggcggggcagacgtcaagacattcgttgggccacgggtgacagtcggtcgggcggggcagcaggtgggacagtaagcgtggggagccaagttttcaagtgcatatttcatatactttcttgagtcctatgaacttaagtcgtacataggtagttagatatttttttaaacgttattgcatttttttgaattcaataatgaaagaataaattattcaaaattccatcgttcctccgttcctcctacactagcgatattcttgtcgattaatattgtcagagtaatcttttctgcaaaataccacaaattagtccaacgatatcgattggcacaatcatcgattaaagtttaaaaaatgacgaccggccgcaataaattgaatttctagttggttaaagtaacgtttattgaagaagatcacataatcgagtacgactaatatcacaggtgaatcacaatctttatgtttcagattcctggccaactatttcctgccgtctatcactttctgcatccaggacacgtatttactgacgcgcgtgtagattccgggcaaacctggacgtgcacagccgatccccgtggacaccacgcccaccagatgatgctccttggacatcagcggaccgccagaatccgcctgtgaaggtaagtaaacccggagcataacatgtgtgccgtatcagccaagtgaatactcacccaacacgagtcgatttgaccgttttcataaccggcacacaactgtgtctctccaatggtattgctcttgcccaaggatcggtaggacctctcgcacgcctcgttgttccagatcttaacggtagccttgcgcagtacatcggatcgatcgttttccgcttggttctcgtgcgtccagccccaaccggaaactgttccgtactcctgctccagacttcggtgcccctcctcggatcccacgcagctgggctggatgtgtgaagagaatcggattggctgtaccagctccaggagggctgtaaaagaataaaataccaatttgcaatagcttaaggaatactaagaataataagtattatttgattcgtctctgattcattatggttaatgttaatatcctttgttgaaactatttcctacctatgtatttctgtttgtttttttaaaacctaagcgcatatttttaatggtgttttactagattaaaattttttattcattttactgaaaaataatgtcatgttaatgtcatattgttgatttatgattcagttctgtacatatggaaaataattgaacctgcaattaccccttaaaaaacacacatacctatatcgtgtttcacatcgttgcagtcgtattgcggatggggcacaatgttcttgaagtccaccctcagtgcatccggaccgttgccaatcccgttgaggtactccctgatgctatgcaaacccacaactccttggatttgagctggtttcatgaactgctgcagcccattgcagatgcaatgtcccgccgtgaggatccatcgctccgagatgatagtgccgccacaaaagtgaccaccacgacgcatcagactgaccatgtagggcatttcgttgcgctccgcctcactacctcccacgatttttggatttcgaaccgagcatggctggttgctaactgtcatgggagtcagaggaatttcaatttgcgtgagttcatgataaggagtgttgaaaataattagttaatataagcagaacgcatttatttatatttctcataatctagtaaacttttccttatgcacgttttatgattatacaagttttgatagaatcttgaaatatttgtaggttgagttcttatcaaatagggaagcataaactgttgcaattggaacattagatgttagatttatccagtgaatttagcatataaatccacaatgctaaaagatcatgctttcttaattgatataaactaacctaaaatattaaggactgcaaaaatgaatggaatattaaacacaagttaaaagttaaaaggtagttcccaggaatcctaatttaggaactataattattttatttttcatattatatttgacttattactcttttcgtcacatttgttcaatcaactcacaagcaatttgggattgtgcacacttcactagcgacagaaccgcgactacgaatacgattttcaacattttctgtgtgcacaaccagtgttcttagccccgaaaaaaaacccgttaagcacggctcaagcttaaacgaaactgccacgaatattctgtgcggcaattaatttatatataggtgtctgggcgtccagcgcctctccgttccactgacttacttcactgtcgtccggagttctatgcggattagccggaaagctcgctctctcggcctgataacaaacggaagtcgcagccgggcctttggcacctgttgcctcagctgagagctttttttgcgctgcactacctgtctcatcgccttttttttttttgctggtattgtgggcatgggtgccatgtgcacacgttatggcatttcaattgctccaaggggggggggggtgaattaaggagctgccgaaaagtcgaaaacaaacccaaaagtaaacaatggccgaaataaagttttgtgtgttttgcgttttatgacccagcg

SEQ ID NO: 15032 - DNA, 798 bp, DROSOPHILA
atgacagttagcaaccagccatgctcggttcgaaatccaaaaatcgtgggaggtagtgaggcggagcgcaacgaaatgccctacatggtcagtctgatgcgtcgtggtggtcacttttgtggcggcactatcatctcggagcgatggatcctcacggcgggacattgcatctgcaatgggctgcagcagttcatgaaaccagctcaaatccaaggagttgtgggtttgcatagcatcagggagtacctcaacgggattggcaacggtccggatgcactgagggtggacttcaagaacattgtgccccatccgcaatacgactgcaacgatgtgaaacacgatatagccctcctggagctggtacagccaatccgattctcttcacacatccagcccagctgcgtgggatccgaggaggggcaccgaagtctggagcaggagtacggaacagtttccggttggggctggacgcacgagaaccaagcggaaaacgatcgatccgatgtactgcgcaaggctaccgttaagatctggaacaacgaggcgtgcgagaggtcctaccgatccttgggcaagagcaataccattggagagacacagttgtgtgccggttatgaaaacggtcaaatcgactcgtgttgggcggattctggcggtccgctgatgtccaaggagcatcatctggtgggcgtggtgtccacggggatcggctgtgcacgtccaggtttgcccggaatctacacgcgcgtcagtaaatacgtgtcctggatgcagaaagtgatagacggcaggaaatag

SEQ ID NO: 15033 - protein, 265 aa, DROSOPHILA
MTVSNQPCSVRNPKIVGGSEAERNEMPYMVSLMRRGGHFCGGTIISERWILTAGHCICNGLQQFMKPAQIQGVVGLHSIREYLNGIGNGPDALRVDFKNIVPHPQYDCNDVKHDIALLELVQPIRFSSHIQPSCVGSEEGHRSLEQEYGTVSGWGWTHENQAENDRSDVLRKATVKIWNNEACERSYRSLGKSNTIGETQLCAGYENGQIDSCWADSGGPLMSKEHHLVGVVSTGIGCARPGLPGIYTRVSKYVSWMQKVIDGRK

SEQ ID NO: 15034 - DNA, 6535 bp, DROSOPHILA
acgtacccggccagatcatcgactacattgtgagttttccgctcggtacacgtacttaacttactccacgcacttaacgaactcaatttgcgtccaacaggcacgcgacaccaagggacacatcctgtcgcagaaggagcacatcactaagggcaagttcagcttcatgtccgaggtgtacgatacgtacgaaatctgctttatatccaaagttcctgcacgtaagttatagtttgcaataaactcccatagcgtatatatataaacgtttcgatttctgtgcagatcaacgcggcgttatacaggaagtatcgctcttgaccaaaaagggagtggagaccaagagctacgaaggcgtaagtacacttatgtcctttttgcatgttttacacttgacttgcaatcctttaatcatatgcagattggcgaagcatccaaactgaagccccttgaagttgatcttaagcgtttggaggatctctccgactccattgtgcgtgatttcgttctcatgcgcaagcgggaggaggaaatgcgcgataccaatggtatgtgaaataccaaaaattccctagaatcacgtctaattattgttcgcattctgcctacagagaaaaccaacagccgcgtgctgttcttcagcatcttcagcatgtgctgcctgctcggcttggcgacgtggcaagttctgtacctccgcaggtacttcaaagccaaaaaactcatcgaatagtcgtctagccgtagtcttaatgcgtgcgtggaactgtgtttaaatgcctggtttagatttcatcctttcatcttttgaacgtttttctgaaataaatgcaactaccacgtatgtatattttattactgcgactgctctccacatttcttggcggtgtgacaaataaatagctcgtattggacgcgtttaacataacaggtacataacacaaaaccacacggtacaagttattggctcagctggcataagttaaaaattgcgattcccttagacggttgtttccttcagcaacattgcactctctgtatccagtccgtcgcttttggcggccaaagcgcctgcctcgtcggtgtcttccttgcacggacttgtggttcccttcttcatcaagatatagcgcgacttggccgcggagctgttcgatgcactcgaatcgtccaccacggactgctccatccacaggctttcgtcgttcagcgcctggttcaccaggttcgccaagctctccggtagcttcgatatagctgtgggatccgcaggacctagaaaagcataaatataagattataggacttgaagagatctcataaacgatgctgcgagctggactcttgatccacaaacattttttttcggtccgctggcaactttgattagtgatagaaaactgaaaaagaatcgcacgttaacgtaaaaaaatataaatgaaaagaaaaagaaaagaagacaagtgaggtataaaaaagtaatttattttcttaaagaagacgaacacataataaacaatgtacatacttaaaacacagattcaaagaaatagtttaatacaagcttaggctgaatcgctttcactgcgaaaaggaacagggtacataagatggatataagagatttcggtatggcttttaaatgcacatgagtttaagattataactacaatcgctcgacatatttacacacgattccattgggtctactacaattatatatatttacacaatgtaaattcaaagatatctcgtgcaccttgtcgttcgaagcttccggcgcaggtcattgtaaaactaatataacttttacctttcgaattggtacaatatagtaattaatgtataaaaatgagtttcaaagatgcagaatatggagatttcattacttaagataagtaaaaaaaaattgaagctaggactcagacatagccataaaatgttttggtaaatggatttagtgcatgcagatgcaaagaaatcgttgaatctttcttactacataaattaatataaaataagtataaaataatgcgtagcgttttaacaagcggtattttgaatcgccagctttaaaatacttctcttaacaacagaatataaatcaaaataacaaaaaaactggaattagttgatagtacaacacataggaataactttagagcggcgttttggacgcattggagcagcgtttggggggcaaacagcgccaacatgttcaacatcaccacccgctcccgcctcatcaaccgcgtcctcgccctcatcctgggcttcgtctttgatggataagcgcttcaaagtctctagccgtgatttcagttgaccaggagtcacagtgcctctggcgggcttctccgctaccagatctcgcacctcgggacagggcgatatatccgaatcgccagctttgctctctgtcgccagcctgtccgtcgctagtctgcgttcgaagggactgcgcgaactgctcgaagtggaggtgcatgagctagtgacctccggatagggcgaatgggactcggtgctctccggggtgtacggatcctcgtactgtcgctcagagtccgtactcagatgctgtgaatcaattcggttaattatgatatcctgcgatatcatcaggcgcttggacagcagcttatagcgatgtgccactggctgcctcttgattatgttccgacacatggggcaaatggcctcgccagttcggttgcagccgtccaactgcagcagactattgctagaaaggtgtgcgcacaggcacatgcagatattatcggaatcgattatgttaatactaatattcgggaagttcgaggaagttgttctgctcgcctccgcgtcttggctaattttaagtgaattgtacatattgcgagcctccgtgtcaacgattaactttgaactggtcgctatatcctcaaagagcttatttgagtagggacagtatttcagtttgactgcgggcagtggtgatgttgagatattgttgggcttggcgtaagtattcgtgtagttgcaatcacaagatctataagtacctttgtttggtttaagacggacagttaagtaaacaggctacatgacaaaaaagaagagataataattattagaccgattgtagtagaaagtgcctttagaaaatgttatatacatatgattccctgccatttcgcttgacctaagttcagattagaatctatactacgaaattgattaccttattcaaacttacttcgataaaccgaagctcttaaatatccttgcagattcatctagaattgtaaagtgctgatattaaaaagaactaagactcatcacagtttctagattcttcagttaaaatgtatatattaaaggatatagtaagcgcactacaagtggactaagcgactccatgccgaaggggaaacatagttgttaggaatggaagcagaattagaaacagcctgtttgtgtaagacatttgaaaggagtatatgaagcctctaatagcgaagagcaagaatatttgtcaaaattggtgcaagagctaaaggcaatcgggttttgtaagtcattttagattgctcctgtagttactaaaatgggaaagttgaaagggactgcaaattaactttaccttatggtcgcccatgcagacagcttctccaatcatgccatatgtccaatcatcgctctggataatctcattgacttggggactcatcagaatccggtcgcaccaggccggacagcgcgtagacatatagtcggtgggcatttctgggtcttcttcgaagggatatgagggaacgaacttaattggatactcgactaggacgtctttaagtggctccagctctctgtcaaatttctttagctgcaaataaggggaaacttactaattgagttttgtgttaggaatgtcattacttacccagtcttctttgaacttgagttgatggtcggcatgactaaattctttctttccaacggtaagtacgttgtttccagttgagttgcgataatggatcttatcgttttcattcttgacattttgaacgcgatgaggggtcaagttttcagttaattcctaaaataaaacgaatcttacttttctcctcagaatgattgaaaggtttaacttactttcacaacgccttcagtgtcacatctaaaattaaaatccccaaagaggaaaaatggcacagtgccattctgttcgtccaaatggaacctattcagtgtatattaacttattattagctaaaagattaggcagcagcaacagtcacctttcaatggtatgaactagggctcttctgcgcgtcttacaataaacggaggggaaattttcgcatgcagccaaattggatgcatcgtggaataagtgaatgttgactagatcgatgacggtgccattgatttcccatcgggttcgcataaaaccttttcgggaccatttacactgaatagaatatagtaagaatatgaacataacttcatgaattgcatcaaacctacctccggaaagaagtgctgtgggaacttggacttttctttggtagcaatagtttcaatatttccggaatagatatgtttatccttaacatcttgaagactttcttcccagctgtgagttaggaagttccagatcttcagagaagcaacatccttatgcacaaagtaaagacttccaagggcctaaaaataataatacaataatgtgggtatttgttttaaccggatataacatttttgtatgttgatatgtgaattcaagagactcattcatcatgactaagcccagtgacttaattcatattttttaaaaggctttcgtcgcaattttaattgaacaataagtgcgtaacgcctcagttcatccgaattgggtttttatgtgccgattgacctagaaacacgattcacccacccaccgtaaagtgctcggccgatttgaagtcctcgtccatgaagatgtgtacgcaggtgaagtcgcccatttcgggagcatcgcagaggcacctgatgaactcctggacgtactccatggacttctcgtacgtcttgccgcccacctcctgtaggtggagggccaggaaacggggctgtgcgacggcgatctttgcaagaaattcgcttagccatagctgcagaagcctctccggctgcaaattggattggaaattcgattatcggcgggcgctgaatgtgctgaataccaatttgtttgggaactcggattcggatatacatatctatgtatgtcactgggcccatacataaatatgcgatttacgcatcgtgtatgtatgggccgtacgtaaacatgtatacttcctagccctgtggacatggcgcatccgttccaacggccacttacgtcctcaaataggctgccaacgtttgccgtgaccagaaacacatccgtgctggacgcgtcttcctgtgctgactccatttgatcccactttcgcctgcgatgcaacaattttattcactttttatcagcgttccaattgtaaatactaattgagtcaaggcgcagtgtgaccataccgcctggcgaaaactaggccatttcgattattagcttttaagtgaccgtaatcgtttatatttcaaatatatttatgcatatctctgcagttttttaattaaacttatttatttcgtttacattgaataatacaatacccctcacgaatttaaatagttaagcttcatttctttcatattttgttaactttaggtttcagaatcgtaattaggtcacttccggcagtgaccgagataaaagtaacggtaatatcatgagtacaatggccagttaaaagtagatataaacaattaaatggcacagggaatagaaattaatgggtttggacaaagcaataacattgaaacttgcaggtttctaatgttttacagttctttgatccttaatattattatttatcctattatcttgactaagtttttgaatttcagtgtaactgcaattaaatgcgtataaatgcagctcgaaattaacaattcatgcggtgtggtggcacattaagcaatttggtgatccgttgtctatattataagcatatccgccgacataaaactattaaggcccattaagacctacggtgtacatcatcttttcattcaaacagcttacagtagttactgcgtactgcgtatgacggtttcaatctttgacagaattcctaagtatcttcaaaagtattacaaccgcaacacttgtccgaaatgtcttcaatttgtgtcacttatgcaaatccgtaattcccacaaaacgggtttaacaatttgtcaaaaattcgatgtcaaatgcccaaatgaaacacaaactggcaaacactatataatataggcggtttgctatttccaggctttttgaaagttgggtagtgaaagttgtattgaactctgtgcgtctctttcgaaatctccaacacaatccaagcgattgcacgtagcatgaatactgaacagcacgtgagacggtagccacatttcttgcaagaatacacaa

SEQ ID NO: 15035 - DNA, 2213 bp, DROSOPHILA
tgcgccttgactcaattagtatttacaattggaacgctgataaaaagtgaataaaattgttgcatcgcaggcgaaagtgggatcaaatggagtcagcacaggaagacgcgtccagcacggatgtgtttctggtcacggcaaacgttggcagcctatttgaggacccggagaggcttctgcagctatggctaagcgaatttcttgcaaagatcgccgtcgcacagccccgtttcctggccctccacctacaggaggtgggcggcaagacgtacgagaagtccatggagtacgtccaggagttcatcaggtgcctctgcgatgctcccgaaatgggcgacttcacctgcgtacacatcttcatggacgaggacttcaaatcggccgagcactttacggcccttggaagtctttactttgtgcataaggatgttgcttctctgaagatctggaacttcctaactcacagctgggaagaaagtcttcaagatgttaaggataaacatatctattccggaaatattgaaactattgctaccaaagaaaagtccaagttcccacagcacttctttccggagtgtaaatggtcccgaaaaggttttatgcgaacccgatgggaaatcaatggcaccgtcatcgatctagtcaacattcacttattccacgatgcatccaatttggctgcatgcgaaaatttcccctccgtttattgtaagacgcgcagaagagccctagttcataccattgaaagatgtgacactgaaggcgttgtgaaagaattaactgaaaacttgacccctcatcgcgttcaaaatgtcaagaatgaaaacgataagatccattatcgcaactcaactggaaacaacgtacttaccgttggaaagaaagaatttagtcatgccgaccatcaactcaagttcaaagaagactggctaaagaaatttgacagagagctggagccacttaaagacgtcctagtcgagtatccaattaagttcgttccctcatatcccttcgaagaagacccagaaatgcccaccgactatatgtctacgcgctgtccggcctggtgcgaccggattctgatgagtccccaagtcaatgagattatccagagcgatgattggacatatggcatgattggagaagctgtctgcatgggcgaccataagcccaacaatatctcaacatcaccactgcccgcagtcaaactgaaatactgtccctactcaaataagctctttgaggatatagcgaccagttcaaagttaatcgttgacacggaggctcgcaatatgtacaattcacttaaaattagccaagacgcggaggcgagcagaacaacttcctcgaacttcccgaatattagtattaacataatcgattccgataatatctgcatgtgcctgtgcgcacacctttctagcaatagtctgctgcagttggacggctgcaaccgaactggcgaggccatttgccccatgtgtcggaacataatcaagaggcagccagtggcacatcgctataagctgctgtccaagcgcctgatgatatcgcaggatatcataattaaccgaattgattcacagcatctgagtacggactctgagcgacagtacgaggatccgtacaccccggagagcaccgagtcccattcgccctatccggaggtcactagctcatgcacctccacttcgagcagttcgcgcagtcccttcgaacgcagactagcgacggacaggctggcgacagagagcaaagctggcgattcggatatatcgccctgtcccgaggtgcgagatctggtagcggagaagcccgccagaggcactgtgactcctggtcaactgaaatcacggctagagactttgaagcgcttatccatcaaagacgaagcccaggatgagggcgaggacgcggttgatgaggcgggagcgggtggtcctgcggatcccacagctatatcgaagctaccggagagcttggcgaacctggtgaaccaggcgctgaacgacgaaagcctgtggatggagcagtccgtggtggacgattcgagtgcatcgaacagctccgcggccaagtcgcgctatatcttgatgaagaagggaaccacaagtccgtgcaaggaagacaccgacgaggcaggcgctttggccgccaaaagcgacggactggatacagagagtgcaatgttgctgaaggaaacaaccgtctaa

SEQ ID NO: 15036 - protein, 708 aa, DROSOPHILA
MESAQEDASSTDVFLVTANVGSLFEDPERLLQLWLSEFLAKIAVAQPRFLALHLQEVGGKTYEKSMEYVQEFIRCLCDAPEMGDFTCVHIFMDEDFKSAEHFTALGSLYFVHKDVASLKIWNFLTHSWEESLQDVKDKHIYSGNIETIATKEKSKFPQHFFPECKWSRKGFMRTRWEINGTVIDLVNIHLFHDASNLAACENFPSVYCKTRRRALVHTIERCDTEGVVKELTENLTPHRVQNVKNENDKIHYRNSTGNNVLTVGKKEFSHADHQLKFKEDWLKKFDRELEPLKDVLVEYPIKFVPSYPFEEDPEMPTDYMSTRCPAWCDRILMSPQVNEIIQSDDWTYGMIGEAVCMGDHKPNNISTSPLPAVKLKYCPYSNKLFEDIATSSKLIVDTEARNMYNSLKISQDAEASRTTSSNFPNISINIIDSDNICMCLCAHLSSNSLLQLDGCNRTGEAICPMCRNIIKRQPVAHRYKLLSKRLMISQDIIINRIDSQHLSTDSERQYEDPYTPESTESHSPYPEVTSSCTSTSSSSRSPFERRLATDRLATESKAGDSDISPCPEVRDLVAEKPARGTVTPGQLKSRLETLKRLSIKDEAQDEGEDAVDEAGAGGPADPTAISKLPESLANLVNQALNDESLWMEQSVVDDSSASNSSAAKSRYILMKKGTTSPCKEDTDEAGALAAKSDGLDTESAMLLKETTV

SEQ ID NO: 15037 - DNA, 2447 bp, DROSOPHILA
caaatgggatgtccttgctcaaaaagaaatctctgtgtatcccaaatatcctagttgaatttacataattacgaaccataaacttgttaaatggctcagatagattccttggcagttcataaaggaatgttaaagttaaattaagtgataagaatagttggggatctatttgtccaaacaacaaatacacatcccatccttgttgcatgaaattagaatttcatatttgcataagctcaattctaagcagtactgaatagaatatgtatattttcgtgggcatcactgcaaggacgatgtcctgctgacaatgatgatagcgggagatagaaagatgaaaactcacataatgggttattcgctattccaattgaaataacgaaatcaatacacgaatagcagcacattcaattcagagtcctgtttgaagtgtagcaattgagaatggtgacgtgctcctcgtcaatttgattaattcgcagacttttgccaaatgatatggaaagccgcggggccgggatgggggcgtttttcaacttggccgtgatttatggatgagataaaaaagtctgaatgccaaaactttgccctcgccaaccagccgcgcaactcgggcgaaagtatttttagtcgcgcgttctcaggataatgagcgatgaaggaagctggggacaaaacaaattatagctgatacccgtggcaagcttcaagaggcatccatatgccaaattggctcattagatgccgggcgaaatcaaattaaatcggggcccctggcaacgaaacacgagaacgagaatgagtcgagagcgagccgtggatgaggatgtggatgtggacatggatgtggacatggacatggcgtcgatagtggacactggaggcgccacaaaaaagaaaacccgacaccaaaaggcaatttaaatcgactgccgactaaattatccgtactatatttcaaaagggagcaaaaggagcagaagttgcaggagcagcaggactactccctgtccaaggagcgcagctgctcctcgacagcattgcggcacgcctcctccggttcggtggcctgaatgcacttctggacgccgggaaactctcgcttgagcaccgcaaacgtgctggagtagagcatcttgtccttgatcctggccagagtgggacaccagagcatcaggattagcttctccttcaggcaggtggacaaggtgccctggcactggtgctgatactcatagtcgtagacagcgaatcggcactgattggatccggcacgttgcagatccgccaggaagtcgtcgtagttcgcctcccttactccaagcacctccaccttaatctcccgctcgtcctggatgacgaagaccgcgtagcgatgttgcttcagcttccggatctgctcgaacacgtgctgacactcgcggctcaaattaattccagatgccatgcttgttgattcagtgcagcagccaagatttagtccacagttaacctccagtcggatcaatcgcagtgcattccagcgagactagaaattttgaaactttgatttatgtagatatgtacgaaatccaggcggagacttgccaaatgctttacgcagagccgactggatgctcaaatttcacacagagagaaaagtgaatgaagagttgattgaaagggtgtcatatcaataaggcgacaatacttgtgaatattgtttatttaagtagtcatgcttttttagagcccacctttatctttgaattacaacgaatatggttgaaatgcaagctagcttagattttacattaatagtttaacaacgatgcggatttttttttcacagtgcagctgcaactgggccatgaatatttatggcttcagcaccttctgctccagaacccacactttcctgcaacccaatcaaatagtgataaatttagaactgtttgtaagcacttttgtccatgcgaggcaaaggatgccgcacatccagtggatgcaacgcgtgtttgtgcatgcaaatctgctaaatgccgcttgtggcccgaaacaatgtccagtttgtggatatgggcttggcgttacgaatatcggatctctttgtggttgaattaatgcaccattttattccgaatgccacagcgacaggatatatgtacatgtacacattcgcacatatgcgttttggctagcaagtagttacgacatgctgactgacaggagcacaaaggcgttgggccgcaggatgcaaggatgcaaggatgcaaggatgcgaggatggcagattgaggcaagctgcagctggctgctttcggggggactggtcttacccagtacccatgacacgcccgctggcaatgagtattaatggtttaaaggggcgcccactagctcaatgaataaggacataaatgtccattagtgcggaaaataacaagagttgccagatttatgttaga

SEQ ID NO: 15038 - DNA, 447 bp, DROSOPHILA
atggcatctggaattaatttgagccgcgagtgtcagcacgtgttcgagcagatccggaagctgaagcaacatcgctacgcggtcttcgtcatccaggacgagcgggagattaaggtggaggtgcttggagtaagggaggcgaactacgacgacttcctggcggatctgcaacgtgccggatccaatcagtgccgattcgctgtctacgactatgagtatcagcaccagtgccagggcaccttgtccacctgcctgaaggagaagctaatcctgatgctctggtgtcccactctggccaggatcaaggacaagatgctctactccagcacgtttgcggtgctcaagcgagagtttcccggcgtccagaagtgcattcaggccaccgaaccggaggaggcgtgccgcaatgctgtcgaggagcagctgcgctccttggacagggagtag

SEQ ID NO: 15039 - protein, 148 aa, DROSOPHILA
MASGINLSRECQHVFEQIRKLKQHRYAVFVIQDEREIKVEVLGVREANYDDFLADLQRAGSNQCRFAVYDYEYQHQCQGTLSTCLKEKLILMLWCPTLARIKDKMLYSSTFAVLKREFPGVQKCIQATEPEEACRNAVEEQLRSLDRE

SEQ ID NO: 15040 - DNA, 4229 bp, DROSOPHILA
tatatcagatatacatatgtaggcttgtgcgaatcggttataaagttagtagttagtcaacaggctgggaaacctttacaagtagctctcaacagctaatatttcaactaaaagccggtctagatagagcctaatacagaaaattaaacctggaaaagaaagtgcgctctaataacaggcaacttatttcaggtcgagccattgtgtttgctggttgcttacaaaaacacttacaaaagatctaatctatatagctgatgcctcctctcatttgagttaagccttttaatgttgaactactttaacttgcctgtcatttaatcattacggtctattttggacttgcttttagtttaaacaactatataaattaccgaactatgtatacatagcacttgtatatccatatatatctagactaggtttctacgttctcttatgcatctggtattgtatatgttacaatggtcggcacgggaatcctttagtcgctcctgacctcatgcctcctcgatttgatttgatttagggtttaggttagcttactaactaactacaaaaaacatttacgtaaaactccgacaaaaacgaagcgactcttaactctttacacatggattagcgaaggatgggtcgatttttgtgctctcaaaaccatttggggctagtaacatgggaagtttttaaataattctattaagtactttatagaatagataggtgtcagaaaatcattcaaataatataatatttggcaattattaatttctcaaactttatacttgactcgatttcgatttaagacttactattgcacgattgtatttccgggacccatccggtgtatagtgaaagtgaaaggatagtgatagtgaaagtggagatggtgatacctacgaaacaacaaattcagaagcgaatgactcactgatgaatgataatgccatttgatctacacattgcccatgcccacgatctggatcgcatctaaaacctgaactcagtcgtcgctggagtcgctaatgacgtccttgcgcgccttgaagttgcgccaggatctcgtcgtgcagactccaggtccccgccaccagtcattgagatccgtgtaccatcgtggcttccgcagttgctcctcgttgtggagcgtggcacacacgcgacaccagtagtacgtgttgatgaactcaccggtgcccttccacttaaagtacgagttgtacagctcgtcgtcgtggtccaggatgcgcagatactcggccagctctttgggcgatgagaactcgtccacgtggatgtatgatcttcgcggagcactcacctcgtagtcctctggccgggcgcccatgacgatgggcaggacccttctgttcagcgcattcacgaagaacttctccgtgatgtagtccttgcagttggagttctcgaacgccagatagaacttatagtcgttgtccaggatctcgaagcacttgtccgctgtgctgcgggagcacttgaagttgccacacgctccatagatgtcaacctgagggaaaacccaatataagacattagaatattgcactactgttttatggtaaattatccatacctctatatatttctgcagctcatgggcatactggagacggccattcctcgctccacagttggacacaaaccaggccactttcttggtcttgttgacggagtagttgatatcctgctcctgctgctgcacctttgtgtcgtagtactgccacttttcatagggtgcaacaattgtactatcccgtctgcaaagaagaatatgatttatgaactttaatacatatttcctggaaaataattattaataatgctccgataacctaaacacccctgaaataacttaataataataacttaactcaagaccatctttaacatcaatgtatttcaaatgtttgaagaaaataatagtatataaatatagacccacctgtaggtggcagtccaattgatggcatcgggcaccttgacattctgcgtgtgatacggacactccagatagtacagcatggacacctgcttggagttgctgggccgtcgaatgcccgtgggtatgtagtgatccttgtagaggatcatgtcggccgtgctggccagatcgcgattggcagtcagttcgcaggtgtcaacgggacacttggctttcaggaagacgtcgcgacccttcttcacgttccacggacccaatccgttgtagagtaggatggtcttcagtttgccgctggacttgatctcctcgtagttgtgcggcacgtacattagctggttaataatgcgatcggaatagggatcctgatgcggcagcaatcgtggggcatgccgcttcctggccttgcgattgctgtaggtcttggccggctttggatagtactctccgttcttgaagaaccaggccttttccgccggcggctcttgcaggcgatccgcctcgctttcctcctcctccagaaccgtctgctccggctcctcgacgagattatccgccacctcgggcagtaaagtggccgcaatcggcggaggagtggagctggtggccatcggatgttcctcgtccatggactgcagttgatgcagatgctggtgctgctgctgctgtgtggttatctgtgacgatcgtggactcagcgtcttccatatttcgcgctctctgtggaatttcaatggacatgagtcaattatagttttatttatttatttggttcttaaaaaaaaaaataagaaacgaaaaaatactgatttctgagtaaaacaaactcgtatttaaaatatgccgaacatttaatctttctagctttctaatatgctaagaatgttagggtattttctgaaccaacatttgtgatttgattttaccatatcacttgaatatatttaagtgcatatttaatgattcgacattatttatgcttattttttgtagctttttattttttgtatttgaccgtgactactcaaactcaaagagaattattagagaataatgaagttgcttaaattaagggcagctcagctaagttgtttgtatattttttaacacctgtctggacgagtgttaccttaactaaacattcagaaatgaagatacaatattagcgacacgttgtcatactcacttgagactgaaaccgaatatgaggaggagggcacagatcagagttaggtagaagtactttttgagggatatcttcggacgccgcatggtgaccacttccactcctcggcgctctacggggctctagactacgggttttttgggggccaatataccgaaagtgtcttcttcagctggcgtttgtcatcgtgctgtgcgagatagacaaacaaatgtgatattaaatagtcgatagataccaaataggcgactctcttgcgttgaaattccccgaaattcgagcactaattacccgtgttaattattctggaccgatatgacttcgaatttcggttcagtgggttgaatgggttgaactctctgcgagaactgcgctcaatattgaaaatgtttcgtttcaactattcgaggggcggtatgtttttcaccaagccgcgcgctttacattctataatctatgtttcataaaaaattccctagggtattcgatattatttcctgatatctagtcatttagctttgctttgcacttagcacaatgatcaataccatgatatttgacataattattaggttttctcccattagtcatggacgaacaagctaaacgacattagttccgattcgagagcagggcatcggccaagtgatgttctcaactcagtcgaattatatataaattaaaatgtggcagagtctcttaggtttagtttataaaaatattccaaatcgcatcattcatatttgcccagaacaaatattgagccagatggctgtctcgcctcaagagctgttcaacatcaaccagcggggcgtatacgtaataaaaaaaaaagctagagcccagcgaatcgggtaaagtggctggaaaagtggaggcggaggtgggagacccccatcttctcttggcaattggtagtctcaaaagctggctactatccaccgctttttatgaacctggcccccgagggtggcctaattacaggggcagccggcgggcgagtgcatcttcatttgggccacattcctggctaatcccccaaagccctcaccaagtgtccatccatccatctatcacatgccattt

SEQ ID NO: 15041 - DNA, 1578 bp, DROSOPHILA
atgcggcgtccgaagatatccctcaaaaagtacttctacctaactctgatctgtgccctcctcctcatattcggtttcagtctcaaagagcgcgaaatatggaagacgctgagtccacgatcgtcacagataaccacacagcagcagcagcaccagcatctgcatcaactgcagtccatggacgaggaacatccgatggccaccagctccactcctccgccgattgcggccactttactgcccgaggtggcggataatctcgtcgaggagccggagcagacggttctggaggaggaggaaagcgaggcggatcgcctgcaagagccgccggcggaaaaggcctggttcttcaagaacggagagtactatccaaagccggccaagacctacagcaatcgcaaggccaggaagcggcatgccccacgattgctgccgcatcaggatccctattccgatcgcattattaaccagctaatgtacgtgccgcacaactacgaggagatcaagtccagcggcaaactgaagaccatcctactctacaacggattgggtccgtggaacgtgaagaagggtcgcgacgtcttcctgaaagccaagtgtcccgttgacacctgcgaactgactgccaatcgcgatctggccagcacggccgacatgatcctctacaaggatcactacatacccacgggcattcgacggcccagcaactccaagcaggtgtccatgctgtactatctggagtgtccgtatcacacgcagaatgtcaaggtgcccgatgccatcaattggactgccacctacagacgggatagtacaattgttgcaccctatgaaaagtggcagtactacgacacaaaggtgcagcagcaggagcaggatatcaactactccgtcaacaagaccaagaaagtggcctggtttgtgtccaactgtggagcgaggaatggccgtctccagtatgcccatgagctgcagaaatatatagaggtatggataatttaccataaaacagtagtgcaatattctaatgtcttatattgggttttccctcaggttgacatctatggagcgtgtggcaacttcaagtgctcccgcagcacagcggacaagtgcttcgagatcctggacaacgactataagttctatctggcgttcgagaactccaactgcaaggactacatcacggagaagttcttcgtgaatgcgctgaacagaagggtcctgcccatcgtcatgggcgcccggccagaggactacgaggtgagtgctccgcgaagatcatacatccacgtggacgagttctcatcgcccaaagagctggccgagtatctgcgcatcctggaccacgacgacgagctgtacaactcgtactttaagtggaagggcaccggtgagttcatcaacacgtactactggtgtcgcgtgtgtgccacgctccacaacgaggagcaactgcggaagccacgatggtacacggatctcaatgactggtggcggggacctggagtctgcacgacgagatcctggcgcaacttcaaggcgcgcaaggacgtcattagcgactccagcgacgactga

SEQ ID NO: 15042 - protein, 525 aa, DROSOPHILA
MRRPKISLKKYFYLTLICALLLIFGFSLKEREIWKTLSPRSSQITTQQQQHQHLHQLQSMDEEHPMATSSTPPPIAATLLPEVADNLVEEPEQTVLEEEESEADRLQEPPAEKAWFFKNGEYYPKPAKTYSNRKARKRHAPRLLPHQDPYSDRIINQLMYVPHNYEEIKSSGKLKTILLYNGLGPWNVKKGRDVFLKAKCPVDTCELTANRDLASTADMILYKDHYIPTGIRRPSNSKQVSMLYYLECPYHTQNVKVPDAINWTATYRRDSTIVAPYEKWQYYDTKVQQQEQDINYSVNKTKKVAWFVSNCGARNGRLQYAHELQKYIEVWIIYHKTVVQYSNVLYWVFPQVDIYGACGNFKCSRSTADKCFEILDNDYKFYLAFENSNCKDYITEKFFVNALNRRVLPIVMGARPEDYEVSAPRRSYIHVDEFSSPKELAEYLRILDHDDELYNSYFKWKGTGEFINTYYWCRVCATLHNEEQLRKPRWYTDLNDWWRGPGVCTTRSWRNFKARKDVISDSSDD

SEQ ID NO: 15043 - DNA, 2740 bp, DROSOPHILA
ggcaccaccacggtggccgtgtccagtggtggcgccagcggaagtggctccaacagtggcaagcagaaaaaccgccagggaaagacggtaaggctgaacataaatgcccgggaacgacgaaggatgcacgatttgaatgatgcccttgatgagctgagaagtgtgattccctatgcccattcgccttctgtgcgaaagctgtcgaaaatagccaccttgctgctggctaagaactacattctgatgcagcaaaatgctctcgaggagttgagaaggtaacgtagttcattaccacgctcaataggaattattaacatatatgcttttacttttagacttttggcctatatacaaagcaccacgggagcagcgccactggatttgggtgcatttccggcggctgccaagttgcaggctcttcttcaaggacctcacaacgaaccaccgactagcagcagttaaataggagtgggggccaccataaactatggttcaactgataagcaatccattaatgagcaatacttttaagtcaattggaaagcaaatgccaaatacttgtgtactagtcagacgaaaggaggttgataaggagcctcttatcagagcagccaagtgaaaatctgttcagtgatatttatttttgtcataagcatttcttatttatgcatttacccaatgtcaaccaatatgtgtaagatgaatattaccgaataaagtattattgaagtagaaagtatgtcgttggaaaagggtttggtcatttaggtttacccatcagcactgatagaagcctgtcatttttcagaatcatcaaacaaacaaacaaaataagagtttcaaatactcaaacacgcccaacccaaccaaccatttatagtcatcagataacaaacatcaaagagcacaatcaaatttaaaataatataatcttagatccgtttcaagtcttggcaaaaatatttaacatataaatatacatacatagttgtctgtatggtttttgatgattaagcaaaagccgtttagcggaattcgaaataagcggattacaactagaaaactagtcgatgaatactctaaaaatatatatatatatagacatatacgacatggaggacggcggcgaaggcgatcggtgcaaaatcggctggcattatattattccggtatgcccagggacaaaaccttgtttttgccagtgcgaaaaatgtgctgcttggtgggcagttgaccgatcaagaaatccttcatcatttcgatggcatcccccgagtgtcctgtgccatggaaggcgatggtggcatctcgccctgcgtgatccataatgacgtcgtcgccgccgggatgatcccttagaaagtgtgtcacatcgtagaccctatcgtagattaccacccagcaatcgtcgaagctgtcgtgctgggccacctcctccaatgcgatctccggcagatcttccagttttaaacgttcctttttgcttggtacaacgaccacctgattactggactttccatgtcccaagggcacaattctcagcgattgcaagaggttcgtcaacgcggatgacatgttgtaagtatgcaattactttcacttttactaatatttgatacaacgatttgtaatgccgcccgatcacttcagacagccggcaatcgattcaagttgagttctgcttggtcggcttcagttccagttttacttggggtcttgagtgtctttcgtgtgcagccaccggtactggagtgtcattcatgccttggattgtaatcgttttataaatgacaacacgtgagtcgatcgatggagccgacagcatggtgataagacttcgtgtccagagaagcgaagctcttatagatcggtttctatataatatataattatatatatatatatacatatatgtatgttcaaccgaactggtttgcatctacatatgttcatgggagggctaggcattgcactgagattgcgagattttgcaataatgttttgtggtcactcgtactcatatgagtcaatttccgaatatgctcgtaaagacgagcataaattatatatttctctgttaatcggattgctcagtgagctaattacttgctaccttataaatttaatgggccagcaattattaaaagggagacatttaacgcgcctatcagcattacaattgatttattggcacaagtcaaacgtgcatcgggcgaatcaattacgtctactcgaaccgtttgatcgccagtcattaaggcaatcaaaataaattttgggttaatagcctggagttatttacttttaatacttaaatgcgttttaagtttgccaaaaatcacgatttgtgtcaagccacgtttgttctaaattctaatgggaacagagataatgacttcaatattatcgctcactacaactttgaacttgaaattggaatggattcggaaattatgccacgcttttgaactatttgaaccatgggaatgattttaattttacatggagtgagtacgtttaatcaataattattacgaaactaaagatctgatgaaattattcagactatttaatttcccatttattaaattccagacagaacgccattcactaattctgtacattgtattgtataaatagaaaatattgcaaagctaaggaaatagttcaaactacgcaatataaaacataaatattattcaagtaaaaacaacaagaaattatttctaaataataactt

SEQ ID NO: 15044 - DNA, 740 bp, DROSOPHILA
tggctgcacacgaaagacactcaagaccccaagtaaaactggaactgaagccgaccaagcagaactcaacttgaatcgattgccggctgtctgaagtgatcgggcggcattacaaatcgttgtatcaaatattagtaaaagtgaaagtaattgcatacttacaacatgtcatccgcgttgacgaacctcttgcaatcgctgagaattgtgcccttgggacatggaaagtccagtaatcaggtggtcgttgtaccaagcaaaaaggaacgtttaaaactggaagatctgccggagatcgcattggaggaggtggcccagcacgacagcttcgacgattgctgggtggtaatctacgatagggtctacgatgtgacacactttctaagggatcatcccggcggcgacgacgtcattatggatcacgcagggcgagatgccaccatcgccttccatggcacaggacactcgggggatgccatcgaaatgatgaaggatttcttgatcggtcaactgcccaccaagcagcacatttttcgcactggcaaaaacaaggttttgtccctgggcataccggaataatataatgccagccgattttgcaccgatcgccttcgccgccgtcctccatgtcgtatatgtctatatatatatatatttttagagtattcatcgactagttttctagttgtaatccgcttatttcgaattccgctaaacggcttttgcttaatcatcaaaaa

SEQ ID NO: 15045 - protein, 137 aa, DROSOPHILA
MSSALTNLLQSLRIVPLGHGKSSNQVVVVPSKKERLKLEDLPEIALEEVAQHDSFDDCWVVIYDRVYDVTHFLRDHPGGDDVIMDHAGRDATIAFHGTGHSGDAIEMMKDFLIGQLPTKQHIFRTGKNKVLSLGIPE

SEQ ID NO: 15046 - DNA, 5787 bp, DROSOPHILA
tcatacatgtaatgtactttgactagacttctctagactctgtagctaaatgtgcaattcctcttccccccttgcatttgactgcttttttctctgacgcattttcatttttttcggatatctatattctatattgtgccatatttaatggtaatgatggagtgcatttccttaggcatcttagcataagtcaatgggtggcccatatcaaaatcagaacggaagttaggatagaaaagagatacacacatatcttcggaagcaccgaaagtggaggatccttacagatggattgaatttttcacacaggcatatgtacaactctcggatatttgactcaacttaatacgtaattatatctatacatattaaaacttgcatagtaactatgttttaaaaccaaaacaaaacgagtttgaagaatgttatttacggactttcgggtttatgggctcatggatttatggccctaggttccaccttgccacgccaggcagaagcgccatggctcttgaatagcatttgaaggtggaattaccgcgaaacgattcgttcatgcggcggatttacgatcattaatgacctgccctaaaaggcacgaacccgcttaagcaacacctgatcctgggcaaatgcccctgagcccggccagcgacccaggtagatggccacatacgcgtacacgtatagatggacaatgtcaaggtgtgagcaggaatacccaaatcaaaatccattgaatgcaaacaacaggcggcagacaatggtcatcccgaatcgccaatgaggaggggtagcactcaggtctggttatggctctcgtctctccttctattgagccgtcccttcgagcggtcagtcgagattctgcaacggcctgccctgccacgcccctcgtccaccgattcccctacgagttgggatctgttacctgctgctcactcactcgatccgtggaacccttgtcggcgcaccagtataattcggcaatcgcagtccacgagcactcagttagaactttgaactggttgaagcaacttcagggaacgagcccccagaaatacccacgcaatgaaaggaatgcgccttatgcccatgaaaatgaaagcgaaattagttgttctctctgtgggagctctctggatgatgatgttttttctggtggattacgccgagggcaggcgactgagtcagctgcccgagagtgagtgcgattttgatttcaaggagcagccagaggacttctttggcattctggattcttcactggtgagtggtggagtcacgtggcccgacctaaaattacaatcttcagcattacccaacaacaggtgccgccgaaggagccaaaggatgatatctatcaactcaagacaaccagacaacattcggggtaagttccactgggatttataccgcacacaatggtgcgcaattagcccacacacttgccttggccactggagtgcttgcctttgggcacgtaagtaatacctgagctcataagccctccctgcccatctcaaccacccacacaggagacgccggaagcagtcgcataaatcgcagaacaaagccgctctgagattacccccaccatttctgtggaccgatgacgctgttgatgtcctgcagcatagtcactcacccactttaaatgggcaaccaatccagagaaggcgaagagctgtgaccgtgaggaaggagcgaacttgggactatggggtcataccctacgagatcgataccatcttcagtggagcccacaaggcgctcttcaagcaggccatgcgccactgggagaacttcacctgcatcaagtttgtggagcgggatcccaatttgcatgcaaactatatatactttacagtcaagaattgcgggtaagtctaatattcgttctatggagaatttataatttatatcccatcgaatagttgctgttcgtttctgggtaagaatgggaatggacgccagcccatctccattggacgtaattgcgaaaagtttggcattattatccatgaactgggtcacacaatcgggtttcaccatgaacacgcccgtggtgacagagataaacacatcgtgattaacaaggggaacatcatgaggggtcaggagtacaactttgatgtactctcgccggaggaggtggacttgcctctactgccctacgatcttaactccattatgcactatgcgaagaactcgttctcgaagagtccctacctggataccatcacaccgatagggattccacccggaacccatttggagttgggtcagcggaagcgtcttagtcgcggcgacattgttcaagccaatttgctttataagtgcgcctcctgtggacgaacatatcagcagaattctggacatatagtgagtccacactttatatactccggcaatggagtactcagcgaattcgagggcagtggtgatgctggggaagatccgtccgcggaatctgagttcgatgcctcgctgaccaactgcgagtggcggatcacggccaccaatggggaaaaggtcatcctgcatctgcagcagctgcatctgatgagctccgacgattgtactcaggattacctggagattagggatggttactggcacaaatcgccactggtgagacgaatctgcggaaatgtcagcggagaggtcatcaccacccagacaagtcgcatgcttctcaactatgtcaacaggaatgcagccaaaggttaccgtggattcaaggcgagattcgagggtaagttttaaacttttcaaagaaaaacacaaactaatttttccattccagtggtatgtggtggggacttaaagctgaccaaagatcagtccatagactctcccaactatcctatggactacatgccggacaaagagtgcgtgtggcggatcacggctccggataaccaccaggtggccctgaagttccagagctttgagctggagaagcacgacgggtgtgcctacgactttgtggagatacgggatggcaatcacagtgattcgcggctcataggacgcttctgcggagataaactgccgcccaacataaagtaagttactttcaaaggaaaaatgatcactaaccaagtgaatatccacttagaacccgcagtaaccagatgtacatccgtttcgtatccgactcatcggtgcaaaagctgggattctcagccgccttgatgctggacgtggatgagtgcaagttcacggatcatggatgccagcacctgtgcatcaacaccttgggtagctaccaatgtggctgtcgagcgggatacgagttgcaggcaaatggaaagacctgcgaggacgcgtgtggaggagtcgtggacgccaccaaatccaatggctcgctctactcaccatcgtatccggatgtgtatcccaactccaagcagtgcgtttgggaagtggttgcgccaccgaatcacgcggtgttcctaaacttttcccactttgatttggagggcacacggtttcactacaccaagtgcaactatgattacctgattatatactccaaaatgagggataatcgcctgaagaagattggcatttattgtggtcatgaactacctccagtggtgaattccgagcagagtatcctcaggctggagttctactcggatcgcactgtccagagaagtggatttgtggccaagtttgtaataggtaacttacagaaaaaaattaatttacgtacgatctataatatcattattccacagatgtggatgagtgttcaatgaacaatggtggctgtcagcaccgatgccgaaacacctttggatcctatcagtgcagctgccgcaatggatacacattggctgaaaatggacacaactgcacggagacgcgttgcaagttcgagatcaccacgtcgtatggagtgttgcagagtcccaactatccggaggattatccaagaaacatttactgctactggcattttcagaccgtactgggccaccggatacagttgacattccacgactttgaggtggagagccaccaggagtgcatctacgactatgtggctatctatgatggtcgctccgaaaatagctcaacattgggcatctattgcggtggacgtgaaccgtatgccgttattgcctccaccaatgagatgtttatggtactggccacggatgcgggtcttcagagaaagggtttcaaggccacctttgtctccgaatgtggtggctacttgagggccacaaatcattcacagaccttctactcgcatccacgatacggcagtaggccgtacaagcggaacatgtactgcgattggcgcattcaggcagacccggaaagcagtgtcaagatccgtttcctacacttcgagatcgagtactcggagcgatgcgactacgattatctggagatcaccgaggagggctactcaatgaacactatccacggcagattttgcggaaagcacaagccgccaatcataatctccaactcggacacccttctgttgcgattccaaacggacgagagtaactcattgagaggcttcgccatctccttcatggccgtggatccaccggaagattctgttggcgaggatttcgacgcggttacaccctttccgggctatctcaagagcatgtattcctcagaaacgggcagcgaccacctcctgccacccagcagactcatttagataaaatgagaggtccagcgaagggatttagagtttaatgtttgttgttgaaatttgtaaatagattgtgaataaaagatatttcgagtcattttgtttaccctatattttatttttaaaggcacataatatttatatctgtgataatacacatttgaatttggcgctataaaactgtgcaacgttcacactgaggatatcgattggtggtgttaacacatctgggttactcacaatttatgtaaaattacacaaaataatattccttagaatgatcttatcatattaaataatttatgtttaaaaattgcggacaaatgtaatccttatatttttaagtctatcgaaaaccattctgaagacccctaacatttcacaatcgataggtcgaattgttcgatagccctttgctccagcaatcaagcaatcgagtatcggcgtcgcttcgtttcgaatttcagttcgaatttggatttgtgcggcgacgctctaatttgtttaatttttgttcgttaattgtgttaattgattagttagtcgctgtgttaatggaccactaagttagctgcgagcccgtttctgtttagttcaagttatttctgttttggccattccctgcaatgagcgcctttgaggttagttgagtcctctttttggaactccggcaataattttccgagaaataactagattaccggtacttacagatcacagtgacgccatcgcgcctaaagcaaaagaagcgcgccgaaggacgcgagcccgccgtcgtcgtcatggctccgttctccgccaaggcgattgtgcagttcgaggatgtgccgataacaaagacagcacggcgccaggtgcgcgttctcaatcccagcgacgacgacatcgaggttagtgggttgcatacggcctggcaactgttatttgatcaatgttttacaggtcaaggtaatgaaggccatccgggaggagcacaacttaagcctggagtggatggagcacacggtgcctgcaagagatgaggtatccatggagctagtgtggagccccgtccttgaggtggcctgcaaggagacgctgcagctaatagacaaccg

SEQ ID NO: 15047 - DNA, 3366 bp, DROSOPHILA
cgagcactcagttagaactttgaactggttgaagcaacttcagggaacgagcccccagaaatacccacgcaatgaaaggaatgcgccttatgcccatgaaaatgaaagcgaaattagttgttctctctgtgggagctctctggatgatgatgttttttctggtggattacgccgagggcaggcgactgagtcagctgcccgagagtgagtgcgattttgatttcaaggagcagccagaggacttctttggcattctggattcttcactggtgccgccgaaggagccaaaggatgatatctatcaactcaagacaaccagacaacattcggggagacgccggaagcagtcgcataaatcgcagaacaaagccgctctgagattacccccaccatttctgtggaccgatgacgctgttgatgtcctgcagcatagtcactcacccactttaaatgggcaaccaatccagagaaggcgaagagctgtgaccgtgaggaaggagcgaacttgggactatggggtcataccctacgagatcgataccatcttcagtggagcccacaaggcgctcttcaagcaggccatgcgccactgggagaacttcacctgcatcaagtttgtggagcgggatcccaatttgcatgcaaactatatatactttacagtcaagaattgcggttgctgttcgtttctgggtaagaatgggaatggacgccagcccatctccattggacgtaattgcgaaaagtttggcattattatccatgaactgggtcacacaatcgggtttcaccatgaacacgcccgtggtgacagagataaacacatcgtgattaacaaggggaacatcatgaggggtcaggagtacaactttgatgtactctcgccggaggaggtggacttgcctctactgccctacgatcttaactccattatgcactatgcgaagaactcgttctcgaagagtccctacctggataccatcacaccgatagggattccacccggaacccatttggagttgggtcagcggaagcgtcttagtcgcggcgacattgttcaagccaatttgctttataagtgcgcctcctgtggacgaacatatcagcagaattctggacatatagtgagtccacactttatatactccggcaatggagtactcagcgaattcgagggcagtggtgatgctggggaagatccgtccgcggaatctgagttcgatgcctcgctgaccaactgcgagtggcggatcacggccaccaatggggaaaaggtcatcctgcatctgcagcagctgcatctgatgagctccgacgattgtactcaggattacctggagattagggatggttactggcacaaatcgccactggtgagacgaatctgcggaaatgtcagcggagaggtcatcaccacccagacaagtcgcatgcttctcaactatgtcaacaggaatgcagccaaaggttaccgtggattcaaggcgagattcgaggtggtatgtggtggggacttaaagctgaccaaagatcagtccatagactctcccaactatcctatggactacatgccggacaaagagtgcgtgtggcggatcacggctccggataaccaccaggtggccctgaagttccagagctttgagctggagaagcacgacgggtgtgcctacgactttgtggagatacgggatggcaatcacagtgattcgcggctcataggacgcttctgcggagataaactgccgcccaacataaaaacccgcagtaaccagatgtacatccgtttcgtatccgactcatcggtgcaaaagctgggattctcagccgccttgatgctggacgtggatgagtgcaagttcacggatcatggatgccagcacctgtgcatcaacaccttgggtagctaccaatgtggctgtcgagcgggatacgagttgcaggcaaatggaaagacctgcgaggacgcgtgtggaggagtcgtggacgccaccaaatccaatggctcgctctactcaccatcgtatccggatgtgtatcccaactccaagcagtgcgtttgggaagtggttgcgccaccgaatcacgcggtgttcctaaacttttcccactttgatttggagggcacacggtttcactacaccaagtgcaactatgattacctgattatatactccaaaatgagggataatcgcctgaagaagattggcatttattgtggtcatgaactacctccagtggtgaattccgagcagagtatcctcaggctggagttctactcggatcgcactgtccagagaagtggatttgtggccaagtttgtaatagatgtggatgagtgttcaatgaacaatggtggctgtcagcaccgatgccgaaacacctttggatcctatcagtgcagctgccgcaatggatacacattggctgaaaatggacacaactgcacggagacgcgttgcaagttcgagatcaccacgtcgtatggagtgttgcagagtcccaactatccggaggattatccaagaaacatttactgctactggcattttcagaccgtactgggccaccggatacagttgacattccacgactttgaggtggagagccaccaggagtgcatctacgactatgtggctatctatgatggtcgctccgaaaatagctcaacattgggcatctattgcggtggacgtgaaccgtatgccgttattgcctccaccaatgagatgtttatggtactggccacggatgcgggtcttcagagaaagggtttcaaggccacctttgtctccgaatgtggtggctacttgagggccacaaatcattcacagaccttctactcgcatccacgatacggcagtaggccgtacaagcggaacatgtactgcgattggcgcattcaggcagacccggaaagcagtgtcaagatccgtttcctacacttcgagatcgagtactcggagcgatgcgactacgattatctggagatcaccgaggagggctactcaatgaacactatccacggcagattttgcggaaagcacaagccgccaatcataatctccaactcggacacccttctgttgcgattccaaacggacgagagtaactcattgagaggcttcgccatctccttcatggccgtggatccaccggaagattctgttggcgaggatttcgacgcggttacaccctttccgggctatctcaagagcatgtattcctcagaaacgggcagcgaccacctcctgccacccagcagactcatttagataaaatgagaggtccagcgaagggatttagagtttaatgtttgttgttgaaatttgtaaatagattgtgaataaaagatatttcgagtca

SEQ ID NO: 15048 - protein, 1057 aa, DROSOPHILA
MKAKLVVLSVGALWMMMFFLVDYAEGRRLSQLPESECDFDFKEQPEDFFGILDSSLVPPKEPKDDIYQLKTTRQHSGRRRKQSHKSQNKAALRLPPPFLWTDDAVDVLQHSHSPTLNGQPIQRRRRAVTVRKERTWDYGVIPYEIDTIFSGAHKALFKQAMRHWENFTCIKFVERDPNLHANYIYFTVKNCGCCSFLGKNGNGRQPISIGRNCEKFGIIIHELGHTIGFHHEHARGDRDKHIVINKGNIMRGQEYNFDVLSPEEVDLPLLPYDLNSIMHYAKNSFSKSPYLDTITPIGIPPGTHLELGQRKRLSRGDIVQANLLYKCASCGRTYQQNSGHIVSPHFIYSGNGVLSEFEGSGDAGEDPSAESEFDASLTNCEWRITATNGEKVILHLQQLHLMSSDDCTQDYLEIRDGYWHKSPLVRRICGNVSGEVITTQTSRMLLNYVNRNAAKGYRGFKARFEVVCGGDLKLTKDQSIDSPNYPMDYMPDKECVWRITAPDNHQVALKFQSFELEKHDGCAYDFVEIRDGNHSDSRLIGRFCGDKLPPNIKTRSNQMYIRFVSDSSVQKLGFSAALMLDVDECKFTDHGCQHLCINTLGSYQCGCRAGYELQANGKTCEDACGGVVDATKSNGSLYSPSYPDVYPNSKQCVWEVVAPPNHAVFLNFSHFDLEGTRFHYTKCNYDYLIIYSKMRDNRLKKIGIYCGHELPPVVNSEQSILRLEFYSDRTVQRSGFVAKFVIDVDECSMNNGGCQHRCRNTFGSYQCSCRNGYTLAENGHNCTETRCKFEITTSYGVLQSPNYPEDYPRNIYCYWHFQTVLGHRIQLTFHDFEVESHQECIYDYVAIYDGRSENSSTLGIYCGGREPYAVIASTNEMFMVLATDAGLQRKGFKATFVSECGGYLRATNHSQTFYSHPRYGSRPYKRNMYCDWRIQADPESSVKIRFLHFEIEYSERCDYDYLEITEEGYSMNTIHGRFCGKHKPPIIISNSDTLLLRFQTDESNSLRGFAISFMAVDPPEDSVGEDFDAVTPFPGYLKSMYSSETGSDHLLPPSRLI

SEQ ID NO: 15049 - DNA, 11712 bp, DROSOPHILA
gtaccaccgtccatcgctccacccaaccaccgaaaatccttgtttttcgccgtaagcagaccatcatttggcattcctttgtagtttccctttgtatctatattataaggcgaacagttgttaccggattcaaagtagcatctgaagatcactccaggctcggagatgtttcgctgagcttccaaactggaattggcacgaggagctgccaccataatactgtgaatttatgaaaacgaagacatttattttttaaatttgttttctgccagataactaaatatatgtaattactcagaaatcttaaatatcgctaagttatgaataataaaagattcttaattaatcatcaaatgaattcgaaaggaatttaatttatcggaacaaatatcgaaatactattaattatattgataattcaagaggaagcacagaaatcttcttcaaattaattcgagtaaaatttttattaatgtaatcaacaattttgatcaacttcgttcaaaatacatatcatgaattaatcttgagatatatttattataatgaccagtttttgatttttaacttaccttttctcccggatgactaaagaaaatccaaaataggagctgcgtctatttccttcaagttccggaaagttaagtactgaattgggatacggcgaaatattataggcattgatttcggattgaagggccaacaacacaataacaagcaaacaaaacatgttaaataacattaagaaatgtaattcaataaacgcacatatagaaaaatataaatattaatttttttacgagactatatataaagtcctgcaaccgaactcgttgagctttcgaatttaaatgaaaccaagtggcatgaaatgactaccaacgtaataaaacagacgcatatgttgactaatttttcggacataccaaaatgtatctaaaaaatatgtaggaaaatttataaaaacttaaattaaatcaaatgacacattcaaaaataatctctgaaacttgttttttaacttttattatatttcattgttttaatactctaatataatacaggaatacttgttataccagctgttaagtccttaaatatcctagtttcgtttttacaatttatacattaataaagtctttcacgtcgccctgtaaagctacctttacaaatttattacacttatcgtttattaacaaggggaccgttaaaatcgagtgtctcgactataagatacccgttactcatctaagaatcttttaaataaaagtggatttatatatatatatatgtaaatggggtcaggttaactgctaccttatatatctccgtcatatctgttttccatccgtgcggatgaagagacggaactcggaaaataatcctgatcaaaaacatatatatatatattctgcggtccatttacttgttgcatactattctagtaacatattgcatactatttaggtaacgggtataaaaatatttaataaatatatacaacaaatggcaatatggctggtacagcacacatgggactctcgtgtaaattagaggtaacctaaaaactaaaaggcacttttctgctgccactacagatcaaaccaaaaggaacattgaatgtcctgtagttcgtgactttctcctgctgctttcgttcctttcttaaatgcacgagaacacatttagtggatagtcttcgcgttgtgaaaataggatttggtaactggttcatccattttgaatgtgatgtgtacggctagaaaatcgcagggcaaaatttagttgtttccgccgctgttcaggttctcggcctcaggctcgacgggattctgctgcaccagtcggtccagctcgtccttcttggtccggttgaagaagccaaactgatggaaaggtatttttaagttagacatgaaggcttgctagtatgattactcaaaaacgaaccttgtatagcaaatagcttatcgcagagagaagcagcaagccaccgattacggacacaataatgatccagatgggtagtcccgtctcctgatgtttggatataatattcggttcgattcttcgattgattgaaaatgaagtagaggtcggatcgcccttcttctgcagcttcaagtcggtcaggatgacaaagtactcccagggatccactaatatggcgttaacttcattcagatcgacactgtagcgcatattcaggttaatggatttttctggcctaaagtgcactcgcatctcggctcggacacatatggtcatttcgggatcccggcagttgaacacaatggtgcgatttacgggaagcttgcccttaaagtcatcgctcagaagatcgtgtgccttgacattcgagattcgagcatattgctcccgattggcggtcaaggccttgagatcccgtcgctttcgggacatggaagctgttgccaccatactggtatcgagaacctccatggtctggtgcacatggccactggtgtggatgtcgtagctctgtctgttttgggttatcacagtccgctccaagcctccactcagggtggtggtcacctcaacggggtccacgacgagcatggtattgttctggtcgtacagatcgatgctcaagagctgggaatcgtaggaggcctgcatcttcaagctagtcacgttgatgatcggtataatggcagtggagccagccaccttataggcaatgggtatgtagaatgacaccgtcaactgctcgattacactgggcccattgctcttgatctcgtagttgtttacgatttccgcggagttactgtagtgctccaaatcgatttgactgttcgtttggccactgaaaattagaagtggatttcagtcagatctacatacagtatttatcaatgatttattgcttctcacccgctggcatcgatttcggtgaactccttcagaccaatcacgttggtctgccggttgtccgtgggattctgctcgtatcccgtactgaatacttcggcatggataatcagcgactgtccgcttagttggctcacatcgaagctgatggtcacggagtcggtgtcaccttttgccagggggcggccgcggtttagatcgcataccatgaccgcatcgaccaccttgcagtttccaggcacctgagcgaaagccaggcgggaagtgctggtcacgttgaattggggcaggtaggcggtctcccctatgttcgtgatctcgtaattcaggcgcagtgtatcggcactgcccaaaatgtaagtggggctgtggagatgaacaatttaacactgtatatagttgtgatgtaaaattgtgtgctaataatgtaaataaaaacgtgtaaaatatttatatatatctttaaaattcttacaattagttcaaaatccatttgcgaacaagaggttctttttaatagacaaatattgacgtacctcacatccttgctcctcaactgcagatctgcagtgcaaacatccgtggcacagccagtgctgaagattatgttctgtgtggaaaccttcggttccgttggatcgacgatcgcacatgtttcgcaaaattctgtgaataattaatgcgttgcaggcttaacagatcaagcagacgaaatagatcaaacttaccctccgagtcgggaactttcttagtcaattcgtagtgcatctccagatcgatgggagtgaatatgtccttctcgctgtagcgcacctgtgtctcaaagtcgcggcactgctcgccgaaattcgcgtttaccttaaagcttatctcattggtctgagtctgagtgaacttaacccgcttcagctgtttatccatggcgatacggatggctagttcctgttcttgtaccagcttgtcggtggatgttgtactcagtctgtagcaggccgtgatctttaccttttcctgctctggtttgatctcccgggactctgattttacagtggcgtgcacctttacgactggataggcacggtacagatacaccgcctccgcatttggagctccaatggcaaagtcgttgaatccgttgccatctatgtcggatccacgggacagcccgtggccgaacatgtgcgatccgtacttggagggttgctgggaaggagcatccaggcgctgactcggctgatctcgtaatccattttcgctgcctaggtagataaacaccgttccatttccagcaaaaggagctccaactgccacatctgtagattggaaaattatatttgatttatagatcgaaagcatatcactttggcaactcaccattatacccatcgtgattaatatctccaagacgcgatagagcagtgccgaaacgcgccatagtctccactggcgaacgcaaaatctgccgttcaaagttgaactgcaatgttaagaaaatatcagtcatcaatttgcttcacggaagcccctcattccaaaggcgtgttcggaaatgcattactcacaaagcctttgttgatgaacacgtagatggcaccgttgtcgtgggaatcctccagagcgtgctgtggcgctgatacgataacatccgttttcccgtctccatttagatcttccgccagaacggagtacccaaagtattcgccaaactgctcccctcgaaacacgtgatacttatgtatgctcttgccccggacatcgaaaatgtacgcctcaccggactgtttgttggcttggggagcggtggccacatagaggagcttggtcggattagaactgtcaaagaagccagagctcacggcatagccgaaataagagtcttcttcctggccccaaagcccaggagtaggtatctcaggtgcatagtgttccggcgtataatcgttggagtccacatcacggtacgttcgtcggagcgccttgctggtgtcacgtcggctggcggttgggttgtccactggatccacttgccggtacagaatcactgaccccctccatgtattgatccctggggctccaattaggaacttggtattatcgtccgccacatgggcactcaagcccagttcgcccattatgtagaagaagcttgccttgttgccgttatcctcttccttcacctgttctgatttcaggcggagtggagagatgcgggtaacgtgctgcggagtgctggccaccgtattattcacccagtagcagactccatgcaggtggttgtcccgggaactgggagcgtagaaccgaggagcacacacgaggagcttgtccgtgtccttggtgccgccgtccatcgatccgcccagccattgaaagtccttgcgttccgaatcaaatgtgtactcactatagggcgcatccacattgccccgggaatccaggacatatggactgcacacaccgtttgtcagggagcatctgtagatcgctcccgtttcgttgatggtgcgttgcgattccaaggtggattgagctctaggggctcccacaatgatgctgcaataagggaaacgattttgattttagttatattctaaagtttagccataattttttgaaaatgctgtttattatttaaatattatattttatattcttctatttatttaatttctttcgaaatctatagcttttacaagttttccctgtaatttagaggtaatacttcaacttcctattatttatcttaaactggatatttcatattcaaaatgtaaggaaaactgttttgctctgtttgctccgtattagtcatacattgaattcaattgatattgtcggttattagtcgactatttcccagaacctgcatgtacatctatacatatacatatctactagagtaaattgacgaaggaaattcgataagatgtgaacgaacgaatcaacccgaagtcataatctttgcaacatagttcccatgcagcacatattttgtatgtcggcttatcagcgttgtggccgtcttagcagaatttcactgtgacatcggcaatcttatcgaaaatcgttaaatacgaagctggcaacgttggctgataacaaattggcattgacgaatctaaacgctatagacatatagtcgaactccgccctaaaaaactgacttattgagtcaacaaaggttcggacgtgcagcgttgcagatatttgcgtaacatttcgctcggacaaaacacaaatgaacttgatatctccataaaaagccgcatacttatgtgctttgtgtgcatacatatatgtatatatgtacatatatgcttgagtacacctccccggcatcgtagataattgatattaagagtatgacttcatcgtttgcacaaggcattaagtgtacggaatttcgttcttcgacacttttatttttttccaactgcttgagagttttcaaaaaagttcattcaattttacagctacagctattcgattggcacccgccggcgtgaatcatcatcgcacaacctgtttactccgcggccagggagtgggtaagatgaagatgcgggagctggtatattggagtcttacccattgggtcgcaggctcatcgtgaatccgaagtatgacgcacgcactttgggcacattggtggcgaactggggatccaatatctgccggttgggtagtggcgataggttgaatgcattgcagtggctggacaagcaccacagccccaacactagcagcgcccagaaatcacgatcttgccccaccatttcggcagttttgcagaccgcgattattcaacagattaatgctacgccacgcgttcgtcgcctgaactatctgcactacgatgtattatcactttcgctttaagcgatgccgaaatccgccgccggatatagattgctgccgttccgatcgaaggtctgttagctactaaccaagcgcactactccccagagacctcaccgctcggcggtgatagcgagagagaaaacgggttacggttatgctcattcctcgacatttgctatctcaaaaggtgcgagagagcgccgctctgttttgaccaggcttactcgcggtaccgttggggctctcgtgggagtggcgtgaataacatcttcaaaacgattgccataccatatttgcgctttttataaaattgtttgttttcttaagcagcaaaagctgactaataggacaagatggagcggaaaatgtaagataagtcttaactgtaaaagaatttatttttccagctctaacactgcaacctttgcactttttaaatttaactgatttcattttttatcgaaacttcgaataataattcaaaccaaggaaactaacttactgcatttttttatgaaaacgccagtaagattgcacatataatgtgaagcaaacaatcgtttttaatcagctgcattgactgactcatttcaaacccacttcacaggatatgaggttcaatttgagattagacagttcaaaaaatgtattgatttctttgttaaaacagtcagtaaaagtaaactatggatgacacctttgttattggcaaaatacgaatacataatacatttcataattctctagccttagtttcacctcgattgactttttgatttacttatctatacaagttttcccccgttcgagtcggtggcttagtcagtcggatgagtcaccatgcatgcacttatttcccggcctgatttcaggcgtaactttatccgcatctcggcgcgagtcaaatggttggagcttaattgcatgcgagaaaaaaaaaacgacagtctcaaaaaaagagtcaacatatttaaataggcgaataacaagcacatgccactttggctacctgatccagaaattgtttatgctgaatataaagtggtgtgaggcctaaaaacagtcagccaacatttgttttggactgaacgttcggcgtatctcagctgtaatacaaagtatgggttgtcgcttacgtattttcccaaaacatgagtcatggccaagtaaaccatgtctgcacacgcatctgcccccaagccccaactttttccatggcctttgtgcataactacagcggtggtcaattcagtgtgagcagaaattaaacagaaacttaataaattgtattacaactgttaacttaatttattttaggaagatttgaatgactttttgaagaactatatttttttcaccatctgtttcacaaaacagtcaccttacaattataacctattagttattaaaaaaataaactaacttaaagtattttaaaatatattgcaactttatatatctttgcaaattgtcttctaaaaaatagttgtatggcatacaacagcatgctaacataattgaaatgtgaaatttcttttaaatagtataatttcgtttgtaaaagtacgcttttggtgcgatggcgctttgtttaaatgccgaacaaggaacgtttatccgtttttgtgcgcggacaataaaacatcttgcggaccacacaaatctccagcgccatctccatcagccaaacaaaaacaaagaaccgctgcagcgtgcggtcatcaaatgttaagaacaaaagccaccatgctgcaccgttttccgttgtggagtcttcagtgttttttttttgtttttgttataaggaattcggtttaatgacccagcgtaagacggctaaaaatatttgtgtgtggtgtcagctgaacggacgaactcttcggagggcggggatgcggatgggggcaggtctgcagacgccatcgcctccaaatcggattggaaacatttgtgactcatttcgccagaatgcaagtggtgttgggaaactgtgagtggatgcacttcccccgcattggattcgaattcagccctaatttcattgggagaccgtaaacaagaactacactttttgtttgtttcagctaacttcaattgatgtgatataaattacggcttgtcgtgattttacgcgcaatttccgtacataattaggcgcacttcgtaatagccaagagtcatgggtattttgggatccaaagtgctggtaatacaaaaaaatgtagggggggggggaagagcgggaactgtagaggaagttccaaattacccatccaggtttatggaaataaaatatggtcaaaagctagctcgttatgatcgcgtacgagtactgcattcaaaccaggtttactgatcgcctcaattaaaaccagataaggttgtactgaccaagtagttcttgtatctaagctgtggcctgaattttggcaaatacataacctcaactactctaacataaattacaaagcatgaactatcatctctctttttcgtttaagagagaatacagagtagatatctcgagaatatcttaaaaagcgtatctgagcttcgatctgaccactttcttcttattcaattaactgtgatttgtggcgccgactgaggtgtgtgatgtcattttttggggcccgcaaaccaacaaaagtagccgccatatgatatgtaggtcgcccgactcactgaaaattgttcgggtttgtcaattgttcgagacggagttgcgatctctcggatctgtggcaattgtagttgaagtagacagtttctttttttttttgttatttttagaaaattcggtctgaagtggtattgctttcgagaggttttcaagctggggttttcgacatgccatgagagttctgtcccaaaactcgaacaacctatgctgagcacccatttacgacttggcgaaaatgacattttaatttcttggcaaatagagcgaccgagtgttaagtgccaataaaccacccaagccgatactaattttgtcgagcctcgacttctgtcgatcccctttcgcaagcttcagtttccatttccgtatgccagaagtttcaaaatattgacagaggtgtgttggcttgcaactgaaagcactcgcttgtcttgcgtcaaacataagaaatatgttgatcggttatcgaaataagtatgttttcgaagtatggaagaatctccctccagacccttacacgtatgtatgcaaatatttgccgcgatctacagctggaaaataggtaactcacctggtctggcggatgacaagcgtgtatccaaagtaggagctgcgagtctggtttatgtggaacttcagatgcttcggggagtttatcacccgactgggtcgcggcataaaattgaatgcttcgatgtgagagatcagagccaagagggcgaggaatatgtgagggaacattgtcgattcagcattcattggaactcatcaaaattaagttttcgcattcgtaatttcgtaattttggtaatttcacttgaatggaccccggctcttctgagggcaataaatcacaattgcgccagagagccacaccactgaaacaggatccgttggcactcacttatttatgatttattgaatttaattgaagcactcacacactcgagatcgctgctgtatggcggcggcgttctctcgaaattatattaatttaattaagcccagccggcggctttcgcaaatctctcgcgagatctaggtggcaaacttgttttggctcttgtcacttttgccggcgacaagtcgttgttaatcgcactactcgaccgcgccgtatctctgcactgatgtgtagctaatagctaataaatagcatatagcatatagcctatagcatatatggtgttttatttccgcaacgctagtccataaacggggcaacagatcagtgctggacgttttcactcttcgacgacccgaaccgaaatgaaatgaattcaagtgctgcagcagacttggacgaccgtcgattctgctggccgatgtgtccacccaacacgatggtcgaaagagatgttctgacctgctgtagtgtgtgtttacaaacatggttgcgctgagatttctgatgatcattgataataacaataaaactttaaggttttcaaatatatttttttagtatctaatatattgttataagaactatctatatatagtctattagtgctttatattttatacctacacttgattttgtttaacaatactatggtatatctagtaccggtttttgtcagtgcattctcaattcgattgcgaccatttgtggtggtggctctccttgttcgcacgctacttgcatttacactccccctacgcgtttgctgcaccctcgcacacacacaaacgaacgcacacacacaaataaacgcacacccaagtgcgagagtacaagtaagtgggtaaaaaagcaaacgcctgtcaccatggagttccaactgggagccgtattttcttattaatactcattgaaggaatcccgactttatatatatggaaacaggccagcttatttgttcctcatcatctggtagatttggttataattaatatttacaatgttttaaggctcatcaagatctgcacactgagagaaaggaaattgtttttatggaaatgtacttgttagttcgtagttattgcacttattcctaatttatttcttatgtattatacttaaaagataagtaatgtttattctttatttagttctacttttaaataatctacattcgtattttaaaatattttctccgagtgattccttttcgggatgtggatgagtgccagtggaaacggagagcatatggcggacataaaggatgccgatcacgattcccaggcaaatggccacccgaattgaacggcgtactgctgtcattgaacttggctgccgtggcatggtgatcaaatggcttatcagc

SEQ ID NO: 15050 - DNA, 4640 bp, DROSOPHILA
tttcggttcgggtcgtcgaagagtgaaaacgtccagcactgatctgttgccccgtttatggactagcgttgcggaaataaaacaccatatatgctataggctatatgctatatgctatttattagctattagctacacatcagtgcagagatacggcgcggtcgagtagtgcgattaacaacgacttgtcgccggcaaaagtgacaagagccaaaacaagtttgccacctagatctcgcgagagatttgcgaaagccgccggctgggcttaattaaattaatataatttcgagagaacgccgccgccatacagcagcgatctcgagtgtgtgagtgcttcaattaaattcaataaatcataaataagtgagtgccaacggatcctgtttcagtggtgtggctctctggcgcaattgtgatttattgccctcagaagagccggggtccattcaagtgaaattaccaaaattacgaaattacgaatgcgaaaacttaattttgatgagttccaatgaatgctgaatcgacaatgttccctcacatattcctcgccctcttggctctgatctctcacatcgaagcattcaattttatgccgcgacccagtcgggtgataaactccccgaagcatctgaagttccacataaaccagactcgcagctcctactttggatacacgcttgtcatccgccagaccagcatcattgtgggagcccctagagctcaatccaccttggaatcgcaacgcaccatcaacgaaacgggagcgatctacagatgctccctgacaaacggtgtgtgcagtccatatgtcctggattcccggggcaatgtggatgcgccctatagtgagtacacatttgattcggaacgcaaggactttcaatggctgggcggatcgatggacggcggcaccaaggacacggacaagctcctcgtgtgtgctcctcggttctacgctcccagttcccgggacaaccacctgcatggagtctgctactgggtgaataatacggtggccagcactccgcagcacgttacccgcatctctccactccgcctgaaatcagaacaggtgaaggaagaggataacggcaacaaggcaagcttcttctacataatgggcgaactgggcttgagtgcccatgtggcggacgataataccaagttcctaattggagccccagggatcaatacatggagggggtcagtgattctgtaccggcaagtggatccagtggacaacccaaccgccagccgacgtgacaccagcaaggcgctccgacgaacgtaccgtgatgtggactccaacgattatacgccggaacactatgcacctgagatacctactcctgggctttggggccaggaagaagactcttatttcggctatgccgtgagctctggcttctttgacagttctaatccgaccaagctcctctatgtggccaccgctccccaagccaacaaacagtccggtgaggcgtacattttcgatgtccggggcaagagcatacataagtatcacgtgtttcgaggggagcagtttggcgaatactttgggtactccgttctggcggaagatctaaatggagacgggaaaacggatgttatcgtatcagcgccacagcacgctctggaggattcccacgacaacggtgccatctacgtgttcatcaacaaaggctttttcaactttgaacggcagattttgcgttcgccagtggagactatggcgcgtttcggcactgctctatcgcgtcttggagatattaatcacgatgggtataatgatgtggcagttggagctccttttgctggaaatggaacggtgtttatctacctaggcagcgaaaatggattacgagatcagccgagtcagcgcctggatgctccttcccagcaaccctccaagtacggatcgcacatgttcggccacgggctgtcccgtggatccgacatagatggcaacggattcaacgactttgccattggagctccaaatgcggaggcggtgtatctgtaccgtgcctatccagtcgtaaaggtgcacgccactgtaaaatcagagtcccgggagatcaaaccagagcaggaaaaggtaaagatcacggcctgctacagactgagtacaacatccaccgacaagctggtacaagaacaggaactagccatccgtatcgccatggataaacagctgaagcgggttaagttcactcagactcagaccaatgagataagctttaaggtaaacgcgaatttcggcgagcagtgccgcgactttgagacacaggtgcgctacagcgagaaggacatattcactcccatcgatctggagatgcactacgaattgactaagaaagttcccgactcggaggaattttgcgaaacatgtgcgatcgtcgatccaacggaaccgaaggtttccacacagaacataatcttcagcactggctgtgccacggatgtttgcactgcagatctgcagttgaggagcaaggatgtgagccccacttacattttgggcagtgccgatacactgcgcctgaattacgagatcacgaacataggggagaccgcctacctgccccaattcaacgtgaccagcacttcccgcctggctttcgctcaggtgcctggaaactgcaaggtggtcgatgcggtcatggtatgcgatctaaaccgcggccgccccctggcaaaaggtgacaccgactccgtgaccatcagcttcgatgtgagccaactaagcggacagtcgctgattatccatgccgaagtattcagtacgggatacgagcagaatcccacggacaaccggcagaccaacgtgattggtctgaaggagttcaccgaaatcgatgccagcggtggccaaacgaacagtcaaatcgatttggagcactacagtaactccgcggaaatcgtaaacaactacgagatcaagagcaatgggcccagtgtaatcgagcagttgacggtgtcattctacatacccattgcctataaggtggctggctccactgccattataccgatcatcaacgtgactagcttgaagatgcaggcctcctacgattcccagctcttgagcatcgatctgtacgaccagaacaataccatgctcgtcgtggaccccgttgaggtgaccaccaccctgagtggaggcttggagcggactgtgataacccaaaacagacagagctacgacatccacaccagtggccatgtgcaccagaccatggaggttctcgataccagtatggtggcaacagcttccatgtcccgaaagcgacgggatctcaaggccttgaccgccaatcgggagcaatatgctcgaatctcgaatgtcaaggcacacgatcttctgagcgatgactttaagggcaagcttcccgtaaatcgcaccattgtgttcaactgccgggatcccgaaatgaccatatgtgtccgagccgagatgcgagtgcactttaggccagaaaaatccattaacctgaatatgcgctacagtgtcgatctgaatgaagttaacgccatattagtggatccctgggagtactttgtcatcctgaccgacttgaagctgcagaagaagggcgatccgacctctacttcattttcaatcaatcgaagaatcgaaccgaatattatatccaaacatcaggagacgggactacccatctggatcattattgtgtccgtaatcggtggcttgctgcttctctctgcgataagctatttgctatacaagtttggcttcttcaaccggaccaagaaggacgagctggaccgactggtgcagcagaatcccgtcgagcctgaggccgagaacctgaacagcggcggaaacaactaaattttgccctgcgattttctagccgtacacatcacattcaaaatggatgaaccagttaccaaatcctattttcacaacgcgaagactatccactaaatgtgttctcgtgcatttaagaaaggaacgaaagcagcaggagaaagtcacgaactacaggacattcaatgttccttttggtttgatctgtagtggcagcagaaaagtgccttttagtttttaggttacctctaatttacacgagagtcccatgtgtgctgtaccagccatattgccatttgttgtatatatttattaaatatttttatacccgttacctaaatagtatgcaatatgttactagaatagtatgcaacaagtaaatggaccgcagaatatatatatatatgtttttgatcaggattattttccgagttccgtctcttcatccgcacggatggaaaacagatatgacggagatatataaggtagcagttaacctgaccccatttacatatatatatatataaatccacttttatttaaaagattcttagatgagtaacgggtatcttatagtcgagacactcgattttaacggtccccttgttaataaacgataagtgtaataaatttgtaaaggtagctttacagggcgacgtgaaagactttattaatgtataaattgtaaaaacgaaactaggatatttaaggacttaacagctggtataacaagtattcctgtattatattagagtattaaaacaatgaaatataataaaagttaaaaaacaagtttcagaga

SEQ ID NO: 15051 - protein, 1115 aa, DROSOPHILA
MNAESTMFPHIFLALLALISHIEAFNFMPRPSRVINSPKHLKFHINQTRSSYFGYTLVIRQTSIIVGAPRAQSTLESQRTINETGAIYRCSLTNGVCSPYVLDSRGNVDAPYSEYTFDSERKDFQWLGGSMDGGTKDTDKLLVCAPRFYAPSSRDNHLHGVCYWVNNTVASTPQHVTRISPLRLKSEQVKEEDNGNKASFFYIMGELGLSAHVADDNTKFLIGAPGINTWRGSVILYRQVDPVDNPTASRRDTSKALRRTYRDVDSNDYTPEHYAPEIPTPGLWGQEEDSYFGYAVSSGFFDSSNPTKLLYVATAPQANKQSGEAYIFDVRGKSIHKYHVFRGEQFGEYFGYSVLAEDLNGDGKTDVIVSAPQHALEDSHDNGAIYVFINKGFFNFERQILRSPVETMARFGTALSRLGDINHDGYNDVAVGAPFAGNGTVFIYLGSENGLRDQPSQRLDAPSQQPSKYGSHMFGHGLSRGSDIDGNGFNDFAIGAPNAEAVYLYRAYPVVKVHATVKSESREIKPEQEKVKITACYRLSTTSTDKLVQEQELAIRIAMDKQLKRVKFTQTQTNEISFKVNANFGEQCRDFETQVRYSEKDIFTPIDLEMHYELTKKVPDSEEFCETCAIVDPTEPKVSTQNIIFSTGCATDVCTADLQLRSKDVSPTYILGSADTLRLNYEITNIGETAYLPQFNVTSTSRLAFAQVPGNCKVVDAVMVCDLNRGRPLAKGDTDSVTISFDVSQLSGQSLIIHAEVFSTGYEQNPTDNRQTNVIGLKEFTEIDASGGQTNSQIDLEHYSNSAEIVNNYEIKSNGPSVIEQLTVSFYIPIAYKVAGSTAIIPIINVTSLKMQASYDSQLLSIDLYDQNNTMLVVDPVEVTTTLSGGLERTVITQNRQSYDIHTSGHVHQTMEVLDTSMVATASMSRKRRDLKALTANREQYARISNVKAHDLLSDDFKGKLPVNRTIVFNCRDPEMTICVRAEMRVHFRPEKSINLNMRYSVDLNEVNAILVDPWEYFVILTDLKLQKKGDPTSTSFSINRRIEPNIISKHQETGLPIWIIIVSVIGGLLLLSAISYLLYKFGFFNRTKKDELDRLVQQNPVEPEAENLNSGGNN

SEQ ID NO: 15052 - DNA, 7569 bp, DROSOPHILA
tacccgtcacagcgataaagttgaggaaaatttagggaattttaaacgaaaagtgcctttgctgacagcgaaaaatgtgaaaaatatttaactatgtatacttgcatttcagagttgcgaaaagttttgatacaaaagcattacctactgtttagaaaaatgtgttaaaaaaaaaacgtatcgcaatatactgttaatcaggaattgaacacctggtctacgcactcagctaaatatttaaatacaaattaatgttacttaattgttgcatttagcataaaaatggaaaagatttggaaaagttagaacagtttgttcaatggcagccctggcctgctaatattttaaataactagactgagagaacttacatattcatacatgtttttcaacttgtaaaaatttttaaatgaacaactcactcaatacttcattgcgaaccaaaatgaacacacaaatagcggtaggctaagcttaaatgatactgtgtacattttcagatgatttatgttttatatagtttgtaaaaaatattaaataataaaaagctcaaacgacaataatactatacgtttgtttatttcaataacttattttgtttgatgttcaaagcgcgccatgcatttcgtataacgataactcgaattaatcgataactcgccctgctagggatgcgcgattcactgaaaaggtttaagactcactggcacagttttacatctactggacacttgtagctgaaatttcaattcatcaaataaaatacatatttttacaaaattacggagaaataaaacattttactcataggagataatggtaataaaaatatcattacaaaaagtattaaattgatgtatatttcataggaacaaatttgattaagattaagttcaatcattcgaagtagtaatttctcagggtaccgaagaaatatttaaatgggaattaagagctcgactataagtgacccaaaaaattaaagaatctccaaacagttatatcaaaaaataaagaatttattatatattcattgcatatacatatacattgtaagtgtaatttgtttatgacttaaacaattttgaatatcaaaacaagacaagacacatttcgtggttaaatcaatttaagcccgcaaccaaagatccgaaaagcgttcgcctttcttagtcaatttcggaatgggtggtgttggtggtggtggtgttggtgttggaataattagttccattggattaatcgtaattaaggccaaaaaccaagtctgatccgtcgaatccgctcgctcagcttagaacttcgaggacttggccaggttgagttcctcggtcagcatgcgaccgaaatcggcgtgcacctgggtgaagttcttgacggcccgctcctgcaagaactggctggcgttgctcaaatggccggcaatgttctgcaccagacgcttcttggcgcacttgtcgagcacatgcacccagaagtcggtgacctggccgaagttgtcctcggtgtcgccgctgctgtagcggtagacatctccagtcaccggacagcaggaggacaaggccctggccctggggcattcctggggaccgttgaacgagttggggaagtagttgggggcaccatcctggttgtccgtcacattcatggctccatcccgctggaagttctcaatcttcaccttgtacgggcagttcaccgggatctgcaagtagttcggtcccaggcgatggcgatgggtgtccgagtaggagaacagacgaccatgcagcatcttgtccggagagggctcaacgccgggcaccaggtgagcgggactgaaggcgatctgctccacctgagggtcagaaaattaccatattagttatctttcttttgattgcattaatctcaaatgaagaagaatctatttgaaacaaaaaaaaaaaacgaacctcagcaaagtagttcttgggattgcgatccagcaccattttgcccacaggaatcagagggtactccttctgcgaccagaccttggtgacatcgaaggggttgtacttgaacttcttggcctgctcgtaggtcatgacctgaatgtacatcgtccaactggggaacttgcaggtcttgatcctgttgtacagatcgcgaatgctgtaatccggatcagtgctagccaactgatcggcggtcttcacgtccagattcttgatgccctggtccgtcttgaagtggaacttggcatagatgggctcgcccttggcgttgatcaatttgaaggtgtgcgagccatagccgttcatgtggcagtaaccgtcgggggtgccgcgatcgctgaacaggatgcacacctggtgagcggactccggtcgcagggtgaggaagtcccagaacatgtccggatccttcagatgcgtctgcgggttgcgcttctgggtgtgaatgaagctggggaataggatcgggtcgcgaatgaagaagaccggcgtgttgttgccaaccaaatcccagacgccatcctcagtgtagaacttgacggcaaatcctcgaggatcgcgggcggtgtccgcagatccgctctcaccacccacggtggagaatcgcacggccagtggagtgcgcttcttgaccttgtcgaaaatcttggcggcacaatactgggtgatgtcatgggtcacctcaaagtaaccaaaagcaccagctcccttggcgtgcacgacacgctctggaatccgctccctgtcgaagtgcgacatctcatccaggaagttcacatcctgcagcaggataggtcctcgcggaccaaccgtctgggaggcatccttgattccaatgggtgctccattgccggtggtaatggcaccaggagaaacctgcaaaagcaaatgaaagtcaagtttaatcaaatgtattttaattttaaaatgctatgcaacattcagcaacaatatattggttcaagtgtcttacaatcttatcgggcctattgcgataattcatttttggcccgcggactttcatttaatcattcgattttcaccaaaagaaaaaaacattaacataaagattgcagagcgttatctctacacggggggtcattttgcagtgcatataaatttaaaataagagatcccaggtgttcttaagagcttgaggccttaatatagtgatgatgtatgggttttttgcattaacatgtcaagatatcaaatccgtgtgcaaggaaaaaaccaattaaatgaaagtattcaaacatcaaaatgatgttacacagtttattagctggcgatcaattaattatttcattccattaagctaataaaagtgtattgtccatctgaaatatcaattagcccaccagctgtcctgtcatttatcagtcgatctaatcatactccttgttttcaattcatttccctagagtaatccgagaccgctccttaatcaccttatcgtttatttcgcatgcaggccagccactcattataaaattaactcagccaacaatttgcaaaactgtcaccggccaatgcgcactgtttagctaatgtatttgaaacctgaacaacgccatgcgaaattctaattcgaaagcatttctagaacaatgcatatagaattttatacagaaggttgtttatcaaagtgaagccaccggtggtggtggtggtggtgtgtcaaacatataaattaagctactgtttatatttcacaacaaagtcatttagatacatatagcacttgggttgggattacccggttgggcactaagacttttacaattgtttaaggaattagtagttgactttatcaaatcttagttcctagaagtatatatgtatctatttaataataaaatcagcttagacaggccagtagtatacccacttattgacaaacaaaaagcgctacataaaaacgaagaaatgaatataatttcgaaattatcattctggaatttatactggagtcaccctttagattcggccgattcagccggaatgttttgcactttgagacattaatatggggccacttcagggggcagatacgataagtgaagcaaaccgggaatgacaatgcgagtggaaccgctggaactgcgatccacgtccaacaagtcaatctggttcctatcagagccttcgttcttatatatgtatgtatgtatttggttgtagatatctccagcgaagagcaaactgataagagaaccgcaaccgatctcgaatagaaatgcaaagaacacagtctacaggaaagtttttaattgcaacttgttggcgatgccaatgacacaaagatggcaaacagcaacttaatgaggcggctttataagatcagtgcacctgatagtatgagataaatttgccttctagacataatttatcagcagaaggttactcattcgagaatgagaatgcatagaaaataagctaaaggattttaaataaggatttttatagggttcttaaccgactcacaatgaccttacgcaatatgcattgcgttgcaaaatattccaagtattttccttgcattttcgaatttcttggataacaaattaactcgattgcgagattcccaaaagaacaaagaacccagttgccatgattattcaccgaaacaaaggcaaacatttaattgcctgacagaatgcagttttcacagtttcgtcatagaaggtcaaaatcgactaaaacaacacgaaccaaccaaccaactgtggagctagctctcttttctgggtcagttcgaaacatattctcacatacagtcgcttttagccgggcgttccagccaggttgcataaccaaattggagaaagaaaatttgcgttgacttatggcactggcacacgcattttccgaagcggtctagccttccgcactcaacccaaaacgggtttaaagccgggttcgttgtcactcgaatcactcgcagtcgatgcgcattgcaaccagtttgtgcaacattgagccggtcgccgcagagtccattgactcccaacgaattttccaacttacaagcggtgcaatccagcgatcgcgtttctcaaaaagttcatatctatatttgtttatataaaataatgaccgctgattgcttttagttagtggagtaattggcttcgtgactcaatgcacaaatgcacttaaatcgctgatgcgagaactaagttctagatttagccttaattgaatagggtaaaaaaaaggtatactaaattaaaaaacaaaaaatgattgtattctttgagaactgacaattcatacttacaaagtatcgaaatccaatggaaatttactttagttactaaccaaatgtgggcactcaacaatatctatacggctgatacatctaatctatttgggccaattacttagctgttttggatgcctatcaactggctgacaaatagctatgcagaattattatttcatttatcgatttttagagggcattgggaaaaccacagggaaattgccgagtaaattatatatagatacagtatctatgggtgaggcttactattgattttgttatatttcattcctttttataaaatgtaacagcatatttgatttcaaaaatgattgcagtgtataaaatgttgcaattgtggaatgccacgaatttaggaaagtacaattttccgagtgtgaacaaacaatatttgttcaaaattttaagagggcacgattccacaattgaaatcatgcatttaatctaaaccaaaagcgaaagcgaataattaacacaaaagtgcaaacgaacaaattcgaatactcaaatccaatgcacaatgcaagtgccaaatgaaattggaagtgctaagtgaaaacagcgctgaaaaatgaaaatagactaaggtaagaggtcgcccaaggttagaaaataggttagctagactaaactttggatttccttaagaaggaaaataaaaataaaagggaaaataaaattaactttggattaggtacagaaaacacaaatccaataagaattgccacactgataaggtttatcagttcacttctgataagatttctacaaataaatagaagacccagagaggcggcttttgaacttcgaactctggggaaacgacttcatcattactggcatttgttggacaagcctttgttgtttttcgcattttaataattaatggaattaatggaaagtacaggctcatagcaatcgttactgaaattgtcttgttttttgtttatttcatttcgtacaatgcttctcccttctctttttgtcttttttgcctttcttgttttcttattttcctgccggcacacacacgcacacacatgcagttgcgctctctcgcgctcgcacaccaacacactcaccgtttgggagtttttgtagtcaatcaactgattggaagccgcatcgcgtccagccattttgcttaaaatttaggatatttgctcaacgggataaccagaatttagaaacactcgaactggaaagttgttgatttctagccgccttcggttttttgctgtgactgcgtcgagaattctgtcaactaaagcaactgcagcgcagttccatttgtttttatagcccagcaccacgtacttgttgttgctcagggttgtcgagtgggccgaagatatcgatatttcgattatagttggaaatatatcgcttaaatattacataatatccattattattcatatttgtatttaaatagtatgaaattcattttcaaagttttttttttgcactgtccatttaaaaacgtgtcccaacaccattaagatttattattgataatttatagtaccttcgctccatttgctgcccagaaaggtgaataaatttaaactgtttgttaagttatttatttttttaatttcatgaaaatgtcggcatcattaagttataaactaagtcggctatctattggtgctcctgccaaataaatatctatggcctctttttttcttaagttgtgaacctcttccagtggtgcctttaaaataaatgtacttcattcatataatatatgtaaatatcattaaacatgttaaaattataaacttcaaggaaatctccaaatggcggctatctttctgtggctcctgccaagctaacatctctgtctttctttattttagcgtacaaaaatatctaattaaatgaaacttagaaactagcatcaactagcatatgtatcttgttctctagtcacaacttaaaaaaatcacctaaccacctgtggttcccatcaagtaaatatccatggactgcttgtccaggacggtcgggcgcctctttggaatcggctgaatgtgcggcagtcgcgtgccattcacggcgttcaaactgagattcgagttggggtcgtagtcgtcgcaatccggagtagtctgggccaagctcagcctctgcgatggtttcaccattaggtttgccctcgcaagctggcgtttttggatcgctgcagcgctggtagtgggcacattgtctgaatcttgacttaagcttctgtgggagcacagctcttcatcgggagtcacaatgcccccctcactgtatgaggcaccgaattcggaa

SEQ ID NO: 15053 - DNA, 1977 bp, DROSOPHILA
tataaaaacaaatggaactgcgctgcagttgctttagttgacagaattctcgacgcagtcacagcaaaaaaccgaaggcggctagaaatcaacaactttccagttcgagtgtttctaaattctggttatcccgttgagcaaatatcctaaattttaagcaaaatggctggacgcgatgcggcttccaatcagttgattgactacaaaaactcccaaacggtttctcctggtgccattaccaccggcaatggagcacccattggaatcaaggatgcctcccagacggttggtccgcgaggacctatcctgctgcaggatgtgaacttcctggatgagatgtcgcacttcgacagggagcggattccagagcgtgtcgtgcacgccaagggagctggtgcttttggttactttgaggtgacccatgacatcacccagtattgtgccgccaagattttcgacaaggtcaagaagcgcactccactggccgtgcgattctccaccgtgggtggtgagagcggatctgcggacaccgcccgcgatcctcgaggatttgccgtcaagttctacactgaggatggcgtctgggatttggttggcaacaacacgccggtcttcttcattcgcgacccgatcctattccccagcttcattcacacccagaagcgcaacccgcagacgcatctgaaggatccggacatgttctgggacttcctcaccctgcgaccggagtccgctcaccaggtgtgcatcctgttcagcgatcgcggcacccccgacggttactgccacatgaacggctatggctcgcacaccttcaaattgatcaacgccaagggcgagcccatctatgccaagttccacttcaagacggaccagggcatcaagaatctggacgtgaagaccgccgatcagttggctagcactgatccggattacagcattcgcgatctgtacaacaggatcaagacctgcaagttccccagttggacgatgtacattcaggtcatgacctacgagcaggccaagaagttcaagtacaaccccttcgatgtcaccaaggtctggtcgcagaaggagtaccctctgattcctgtgggcaaaatggtgctggatcgcaatcccaagaactactttgctgaggtggagcagatcgccttcagtcccgctcacctggtgcccggcgttgagccctctccggacaagatgctgcatggtcgtctgttctcctactcggacacccatcgccatcgcctgggaccgaactacttgcagatcccggtgaactgcccgtacaaggtgaagattgagaacttccagcgggatggagccatgaatgtgacggacaaccaggatggtgcccccaactacttccccaactcgttcaacggtccccaggaatgccccagggccagggccttgtcctcctgctgtccggtgactggagatgtctaccgctacagcagcggcgacaccgaggacaacttcggccaggtcaccgacttctgggtgcatgtgctcgacaagtgcgccaagaagcgtctggtgcagaacattgccggccatttgagcaacgccagccagttcttgcaggagcgggccgtcaagaacttcacccaggtgcacgccgatttcggtcgcatgctgaccgaggaactcaacctggccaagtcctcgaagttctaagctgagcgagcggattcgacggatcagacttggtttttggccttaattacgattaatccaatggaactaattattccaacaccaacaccaccaccaccaacaccacccattccgaaattgactaagaaaggcgaacgcttttcggatctttggttgcgggcttaaattgatttaaccacgaaatgtgtcttgtcttgttttgatattcaaaattgtttaagtcataaacaaattacacttacaatgtatatgtatatgcaatgaatatataataaattctttattttttgatat

SEQ ID NO: 15054 - protein, 506 aa, DROSOPHILA
MAGRDAASNQLIDYKNSQTVSPGAITTGNGAPIGIKDASQTVGPRGPILLQDVNFLDEMSHFDRERIPERVVHAKGAGAFGYFEVTHDITQYCAAKIFDKVKKRTPLAVRFSTVGGESGSADTARDPRGFAVKFYTEDGVWDLVGNNTPVFFIRDPILFPSFIHTQKRNPQTHLKDPDMFWDFLTLRPESAHQVCILFSDRGTPDGYCHMNGYGSHTFKLINAKGEPIYAKFHFKTDQGIKNLDVKTADQLASTDPDYSIRDLYNRIKTCKFPSWTMYIQVMTYEQAKKFKYNPFDVTKVWSQKEYPLIPVGKMVLDRNPKNYFAEVEQIAFSPAHLVPGVEPSPDKMLHGRLFSYSDTHRHRLGPNYLQIPVNCPYKVKIENFQRDGAMNVTDNQDGAPNYFPNSFNGPQECPRARALSSCCPVTGDVYRYSSGDTEDNFGQVTDFWVHVLDKCAKKRLVQNIAGHLSNASQFLQERAVKNFTQVHADFGRMLTEELNLAKSSKF

SEQ ID NO: 15055 - DNA, 3353 bp, DROSOPHILA
ggaccatacaaaagaagtgcaagaaaggtgcgcgcggtaacttctatatgtatcataatcctacacagcgcctccccaaaaggggaacgtagtagaatcgggcattcccataaaagagcaaggcggtgtcattgccggcttaatgggtccaaaggtcacaaaatgcaaaaatcactcttgttgacccatatacaagaatgcttccttctggggaggattgtgctctcttcgacccacttcgaggttctccccgccacagcttcgtttcgtttcctaggaaatactgcagttcctgttcctaacaatgcagcgagtgcatccttcataatagcaaatactttccaaaattaatttgaaattttgcgtacttccttcggtaggctgccgctatgaaaagggtgaatggtctcaatgcgtcggaggacaaataaccagagaggataagttggaaccagaggcaactggcggtagtgatcaaaactgcaatcctgtgcgtaccgtcagcaagaagtgtaaagcaaatggcaattccagtggaggaaaacaacacggccagagtcgtcgaacaaaagagcaaaagcaaaaggataagggtaaaagtggtgaatttgacccctttgtgaaaagtttgatccaaattctctgtttacaggagccagtcacatttcgtcttgataatgaaaattatttattttatacgtatacggaagcaacatttttaatattaaataagcgatttttaaatgctagcccgtacggactacttgaacaacaataaagaattggccttcttagggctaaatgaaagcactcttttagaaattcttgaaacaaggctttcacaaaccccaataccgcgaaaacctgcacaaaatgagacctgttattgagtaatcaaagagcattgatagaactgttagttggctctgagtttttatttaatattagacgcgacagtaaaataaccgtctgcgacaaaatttaattaacattacacaaaagaaaacgttacctctaactcggcttggtaatataaagatgttaaatttaatagtgtttctttacttaactgcaagccccctttaaattgatcgatctttcgaggcaaatcttcaagttaccaatgtctttaatagccattgaaagggtgttatgtggctggcccaagatttgccgcaaacttattgtaacgtcgcggtcgctgacctccggcttgcggcgggcactggtcaagcagccccgtaaaggcggagatgttggaaaacccggaatggagcttgggcgctgttcgtgctttggactccgtgtgaacctcagcaatgcatccgtcgtatacgttggccaccgacgctactcgacgtacgagaagacgtctacgcaaattttaacgaagctctttccacaaacctctgaggagtccaacgacgaggaaagtcgtgagcggcggaaacttgaggaggaggaggagcagaaggaattggagcgggcatttaggcggatgaaactgggctttgggcttttcggcataggtagcatgttgttctcgttttgggctatatatttctatggaaggccgtccttggatgagcacggaaatgaagtaatcgacgaatttagttgtctgccacagatgcagcagcttatgtggcggacatggaagtcggtgaaccgctttcaacggtttttcaaagagccgtcgagaaaaaagctgcttcctgatccccttcagcccccctacgtgcagccgccgtatactttggtacttgagattaaggatgtgctggtacatcccgattggacctacgaaacaggatggcgcttcaagaagcgccctggcgttgacgtgtttttgaaagaatgtgccaagtattttgagattgttgtttacacggcggagcaaggagttactgtgttcccgctggtcgacgcgcttgatccgaacggctgtattatgtatcgcctggttcgcgactctacgcactttgatggagggcaccacgtgaagaaccttgacaacctcaaccgagacctaaagcgagtggttgtcgtggactgggatagaaattccaccaagtttcacccttcgaattcattctcgatcccgcggtggtctggaaacgacaatgacactaccctctttgaactcacgtcgtttcttagtgttctaggaacgagtgagatcgacgatgtccgagaagtgctgcaatactacaatcagtttagtgactcgttatcccagttcagagaaaaccagcgaaagctgggtgagctaatgcacgccgaggaggtagaaaaaactagcaagtctaggcccgttgtcaagaactggacccgtggcttcataaatcattaaaaagattgtgcgtttgatgtgtcccttaaatactgttaattcacccaaaaaattacattaaaactttcctagcattcttcaatgtctacctactaacagcagttacttttgcagttttttgcgtattctgattgaaaaagtctgaaaacatatgatttctgatttggcatttaaagcagactgccctgcggaacgtcaatgcttccttgaaggtaacagtgcagccactaggcggatacatagccgtaatgttgtgaaaaatgttgtgttacggttttatatgaatgcaggcttccagaaatcctcagtccagcacgagcacgcaagctcagcaacatgttgctgccatgtgatggtgtgcgtgagcacgtgccaaaataactacgacacatgtgtactcttgagggaatgtttccacaatcaacaactacgcacttcacaccactaggtgagtcatgcgcagtatcgtccctgcgaacattcatccgaatgttggcataagtaagtaaagggatcaggtgtactgtaagccttccgtctagttactttcgatgcagattttgattctggctgagggttcgtggctggctgggcctcttctccttatgttgaaaacacacaacaattcggtggtggaagtatactgcggacgtcaaactggcgagccagggcgcaggcgttggttcatttggcactttgtctggtactctcccacatcggcatcctgcaatctctttggctcagcatccttgtaagctgttgtcggagcaatctgggcatggggcaactgaaaggaaagcaactttcccattcaggagcgcacaagccgcaggaatcgcgagcgcagacaattcagttcggctttaacgtaatggacggaaggtttgaatatcgcttctcgccccagttgtacagataaagtcccactgcacgcaatagggcacttggaagatacaatagaacgccgagcagtgtgtgtatataggtttgaatgcttacg

SEQ ID NO: 15056 - DNA, 1353 bp, DROSOPHILA
agaaaacgttacctctaactcggcttggtaatataaagatgttaaatttaatagtgtttctttacttaactgcaagccccctttaaattgatcgatctttcgaggcaaatcttcaagttaccaatgtctttaatagccattgaaagggtgttatgtggctggcccaagatttgccgcaaacttattgtaacgtcgcggtcgctgacctccggcttgcggcgggcactggtcaagcagccccgtaaaggcggagatgttggaaaacccggaatggagcttgggcgctgttcgtgctttggactccgtgtgaacctcagcaatgcatccgtcgtatacgttggccaccgacgctactcgacgtacgagaagacgtctacgcaaattttaacgaagctctttccacaaacctctgaggagtccaacgacgaggaaagtcgtgagcggcggaaacttgaggaggaggaggagcagaaggaattggagcgggcatttaggcggatgaaactgggctttgggcttttcggcataggtagcatgttgttctcgttttgggctatatatttctatggaaggccgtccttggatgagcacggaaatgaagtaatcgacgaatttagttgtctgccacagatgcagcagcttatgtggcggacatggaagtcggtgaaccgctttcaacggtttttcaaagagccgtcgagaaaaaagctgcttcctgatccccttcagcccccctacgtgcagccgccgtatactttggtacttgagattaaggatgtgctggtacatcccgattggacctacgaaacaggatggcgcttcaagaagcgccctggcgttgacgtgtttttgaaagaatgtgccaagtattttgagattgttgtttacacggcggagcaaggagttactgtgttcccgctggtcgacgcgcttgatccgaacggctgtattatgtatcgcctggttcgcgactctacgcactttgatggagggcaccacgtgaagaaccttgacaacctcaaccgagacctaaagcgagtggttgtcgtggactgggatagaaattccaccaagtttcacccttcgaattcattctcgatcccgcggtggtctggaaacgacaatgacactaccctctttgaactcacgtcgtttcttagtgttctaggaacgagtgagatcgacgatgtccgagaagtgctgcaatactacaatcagtttagtgactcgttatcccagttcagagaaaaccagcgaaagctgggtgagctaatgcacgccgaggaggtagaaaaaactagcaagtctaggcccgttgtcaagaactggacccgtggcttcataaatcattaa

SEQ ID NO: 15057 - protein, 409 aa, DROSOPHILA
MSLIAIERVLCGWPKICRKLIVTSRSLTSGLRRALVKQPRKGGDVGKPGMELGRCSCFGLRVNLSNASVVYVGHRRYSTYEKTSTQILTKLFPQTSEESNDEESRERRKLEEEEEQKELERAFRRMKLGFGLFGIGSMLFSFWAIYFYGRPSLDEHGNEVIDEFSCLPQMQQLMWRTWKSVNRFQRFFKEPSRKKLLPDPLQPPYVQPPYTLVLEIKDVLVHPDWTYETGWRFKKRPGVDVFLKECAKYFEIVVYTAEQGVTVFPLVDALDPNGCIMYRLVRDSTHFDGGHHVKNLDNLNRDLKRVVVVDWDRNSTKFHPSNSFSIPRWSGNDNDTTLFELTSFLSVLGTSEIDDVREVLQYYNQFSDSLSQFRENQRKLGELMHAEEVEKTSKSRPVVKNWTRGFINH

SEQ ID NO: 15058 - DNA, 3891 bp, DROSOPHILA
ccggctctatatgagttgataccgctgagtagcaagctccgctgctccgacgcacttatgaatctcgcagaaggttcgtttattttaggaatattcaaaatatttctatttatttcggcaccgactagtcgaataattcgtaaacgtgtgagtgtgagcagctgagtgatggtgtgcgtgagctgtcaaattatagaagggttgccactttgtttttcgctcggcttgcctcgttctagagaaagccgatagggggcggtagctaaaaagcgggtgctttaaaatcaatttatattctttatttattaatattattaaaaagcatacttaagactgaaataaaaaaaaactaagttatttaagcacaggcatccattttaatttatattttactcctcgaagaatttctgggaaacttcggaggtctgttgtgtggggcattttcattttttaaattggaaaaaatatactcatttgttcgaattgtgaaatacctgtttttagaagcatgaagtttaattcgtaattaccttaccaaattaaatacatttatcaacgacaaatgaagtaaactagaaaatctgctctcctctttttgcagaaaccaaaagtgaaatgttcaattactatttaaaaattgttcccacattatatatgcgaggaaacagcgacggcgagcccatatacacgaatcaattctccgtcacgcgataccgaaaagatctttcagatcgcgagcgcggaatgccggggatattcttcagctacgagctctcgccactgatggtgaaatatgcggagagacacaggtcagtaagccacaaagctaatggttaattttacaagttttattggttgtgttgtgtattcccagctcatttggccacttcgccacgaattgctgttccatcatcggaggcgtgttcacggtggccggcattctcgccgtgctgctgaacaactcgtgggaggccattcaacggaaactggaagtcggcaagctcagctaacaacaattcgaatctcttatgcagctttactacgcctaactcaatatacattcgacaaatctccaaataaaagtgcttaattttatagaaaataaggatagagctgttctcttaagtggtccgctgtcccactgacatgaatccggatgtgtttgaaaagtatttggcattggcctccgtctgcgaacgctccgccgcctgcggattcacaatctctagaccttgcagtggcgtaaaggccacactggatgccgttccggagatttggcgtttgaccgtggtgttgccgccgtacacctgctgtttctgcagattcttgtgcaacgttttgctaatgcgcaccttggtcttctcatccacctggggcaatcggatgcggccggtgccagttttgccgatggtgccgcgtgaatagcccagatctccttggtaggcatcctcttcgatctgaaagaaaagttcaaagattaatacataaccattatatttttaagccagaaacttacgtctccgaaattcatgcggttcgcttgcttgcggaactctgtcagcgcatatcgttccttcatcttgcgcacgcgtttgcctcctcgcttcttcttgcttccctcgatgggtttgggcagcggctttatgaacttcaccggcggcggctcctgcagcttgtccagcttcttttccacatcctccttgaagcgcagtccaatctccccgtggacactctcatgacaggcatcaacacgagcagccagcacggacttggcggccaccaagcgagctgccttgcgtcgcagatctggcgcagtatcctgcacaatctgtgagtagtacacatagccagtgtgcggcaacatctgcgtttgtgagaagcccgagagggttttcttttgtgcacccaacacctgaacattgcaggccggcattttggataatttggaaaggccaccagcaatgcccaagagtttagccgccgtcgatgctccaacaatcatggaaagatttggggctatgaaggtcatgcgactttccacatactcgtagatcttggacttgaagttattcagttcgatggccatttcgcaggcctcgtcgatctttgccttctccgccggtgtcagcatggttctgcgaaagggaatgggattcagtgacatgttattttgggttacaccgttcaaataacttacccctgtgtggtggacgccgtgactgacacaatcataatggtggcctgcgtgagaatagcctgcagcttctcgttatttttgacctggtccaggtcgttgcccagctccttgaccgccagcaagtactcgatttcacccacgatcagggagtccaattcggggaatcgcttctgatacttctccttggtgaacttgtgcacaatggagatctcgttgtcaatgtccacagctatggcattagcgtccacgatgaggcagtactctggatcggattctacggatcccagcatttcggctgcagttctctggcgactggcatagtgctcgatctgctgcagcgtgttcttcaggcgctcagagtcgcgcagcttgcacagttcccgcaccgactgcacggttacatccacgtccatcagattgggagccggcttagccagcttctccgccagcaactgttttgtgggaggggaatcattaggtctgatcaacatttgctttggttccttacgctctcgtcctctgcactggccatctccgaatcctcctcctccagctcattgtcattgtcttcctcgagatcggctaaaagctcatcggctagcgacattttggcttatttcaaaagtttattttgcgatctcgtgaaattaagtttgttttggaattgaagtgaccgttgctcagccgccttagaataccatgcggttcattgaaaaaatactaagtattagcatgaaatatatagggtattcatttaaagaataccataaggctattccactggattttaattgatcaatttgaccaaattcaataaacatttcatgaacagaacgatccaatatcataactcttgttattattctggaaagtttcgattttcctgcttaattagaattctgtatctaaaagtaaaggaattgaaaatatggttgaaaatataaggttgatgaaaatataggtatggctatcaattgttttgcttaattcttaactatcactctttatttattttgggacaacaaagcctagataaacacagatcaaaaatgaaaaaaaatgacttattatataagaagcatcaaattgtaacgaaaaaataaaatctcctcagtggtattcgaaaattccaacgggcacgagttccctaaatatactaaatagtcaagctactatttcggtattattaagccacaatttgacagaatattttttggttttggcgcacaatcgcagcgtctgcatcctggttttttgagtaacctggcagacgtttctaggccattgtcatgtccaagaagttaaacaccagcgtgggcgggacgcccacaaacacgctactaaattacttttccaagtcgccagctttcgacaaaaagaaattgactcctagcgtgaaaacagatcccgatgcatccaagagcgaaaaggagaatctccagaaccagcagccaaaagtgaaggatggtaagaaagaggcttccaagccggcggccaagaggaagttgcccatttccgacgatgagccggccagtggtcaacgcaagcggaagcgcatcgttcagccggaatcggacagtgagccggaaatggaggtaaccaagtcggaggacgacttctccgattgcgcctccgactacgaaccggatgagaatgaagccagcgatgatagcgttagcagcggcgcggaggag

SEQ ID NO: 15059 - DNA, 1714 bp, DROSOPHILA
tctaaggcggctgagcaacggtcacttcaattccaaaacaaacttaatttcacgagatcgcaaaataaacttttgaaataagccaaaatgtcgctagccgatgagcttttagccgatctcgaggaagacaatgacaatgagctggaggaggaggattcggagatggccagtgcagaggacgagagcttgctggcggagaagctggctaagccggctcccaatctgatggacgtggatgtaaccgtgcagtcggtgcgggaactgtgcaagctgcgcgactctgagcgcctgaagaacacgctgcagcagatcgagcactatgccagtcgccagagaactgcagccgaaatgctgggatccgtagaatccgatccagagtactgcctcatcgtggacgctaatgccatagctgtggacattgacaacgagatctccattgtgcacaagttcaccaaggagaagtatcagaagcgattccccgaattggactccctgatcgtgggtgaaatcgagtacttgctggcggtcaaggagctgggcaacgacctggaccaggtcaaaaataacgagaagctgcaggctattctcacgcaggccaccattatgattgtgtcagtcacggcgtccaccacacagggaaccatgctgacaccggcggagaaggcaaagatcgacgaggcctgcgaaatggccatcgaactgaataacttcaagtccaagatctacgagtatgtggaaagtcgcatgaccttcatagccccaaatctttccatgattgttggagcatcgacggcggctaaactcttgggcattgctggtggcctttccaaattatccaaaatgccggcctgcaatgttcaggtgttgggtgcacaaaagaaaaccctctcgggcttctcacaaacgcagatgttgccgcacactggctatgtgtactactcacagattgtgcaggatactgcgccagatctgcgacgcaaggcagctcgcttggtggccgccaagtccgtgctggctgctcgtgttgatgcctgtcatgagagtgtccacggggagattggactgcgcttcaaggaggatgtggaaaagaagctggacaagctgcaggagccgccgccggtgaagttcataaagccgctgcccaaacccatcgagggaagcaagaagaagcgaggaggcaaacgcgtgcgcaagatgaaggaacgatatgcgctgacagagttccgcaagcaagcgaaccgcatgaatttcggagacatcgaagaggatgcctaccaaggagatctgggctattcacgcggcaccatcggcaaaactggcaccggccgcatccgattgccccaggtggatgagaagaccaaggtgcgcattagcaaaacgttgcacaagaatctgcagaaacagcaggtgtacggcggcaacaccacggtcaaacgccaaatctccggaacggcatccagtgtggcctttacgccactgcaaggtctagagattgtgaatccgcaggcggcggagcgttcgcagacggaggccaatgccaaatacttttcaaacacatccggattcatgtcagtgggacagcggaccacttaagagaacagctctatccttattttctataaaattaagcacttttatttggagatttgtcgaatgtatattgagttaggcgtagtaaagctgcataagagattcgaattgttgttagctgagc

SEQ ID NO: 15060 - protein, 501 aa, DROSOPHILA
MSLADELLADLEEDNDNELEEEDSEMASAEDESLLAEKLAKPAPNLMDVDVTVQSVRELCKLRDSERLKNTLQQIEHYASRQRTAAEMLGSVESDPEYCLIVDANAIAVDIDNEISIVHKFTKEKYQKRFPELDSLIVGEIEYLLAVKELGNDLDQVKNNEKLQAILTQATIMIVSVTASTTQGTMLTPAEKAKIDEACEMAIELNNFKSKIYEYVESRMTFIAPNLSMIVGASTAAKLLGIAGGLSKLSKMPACNVQVLGAQKKTLSGFSQTQMLPHTGYVYYSQIVQDTAPDLRRKAARLVAAKSVLAARVDACHESVHGEIGLRFKEDVEKKLDKLQEPPPVKFIKPLPKPIEGSKKKRGGKRVRKMKERYALTEFRKQANRMNFGDIEEDAYQGDLGYSRGTIGKTGTGRIRLPQVDEKTKVRISKTLHKNLQKQQVYGGNTTVKRQISGTASSVAFTPLQGLEIVNPQAAERSQTEANAKYFSNTSGFMSVGQRTT

SEQ ID NO: 15061 - DNA, 8330 bp, DROSOPHILA
gtcttcagagaaagggtttcaaggccacctttgtctccgaatgtggtggctacttgagggccacaaatcattcacagaccttctactcgcatccacgatacggcagtaggccgtacaagcggaacatgtactgcgattggcgcattcaggcagacccggaaagcagtgtcaagatccgtttcctacacttcgagatcgagtactcggagcgatgcgactacgattatctggagatcaccgaggagggctactcaatgaacactatccacggcagattttgcggaaagcacaagccgccaatcataatctccaactcggacacccttctgttgcgattccaaacggacgagagtaactcattgagaggcttcgccatctccttcatggccgtggatccaccggaagattctgttggcgaggatttcgacgcggttacaccctttccgggctatctcaagagcatgtattcctcagaaacgggcagcgaccacctcctgccacccagcagactcatttagataaaatgagaggtccagcgaagggatttagagtttaatgtttgttgttgaaatttgtaaatagattgtgaataaaagatatttcgagtcattttgtttaccctatattttatttttaaaggcacataatatttatatctgtgataatacacatttgaatttggcgctataaaactgtgcaacgttcacactgaggatatcgattggtggtgttaacacatctgggttactcacaatttatgtaaaattacacaaaataatattccttagaatgatcttatcatattaaataatttatgtttaaaaattgcggacaaatgtaatccttatatttttaagtctatcgaaaaccattctgaagacccctaacatttcacaatcgataggtcgaattgttcgatagccctttgctccagcaatcaagcaatcgagtatcggcgtcgcttcgtttcgaatttcagttcgaatttggatttgtgcggcgacgctctaatttgtttaatttttgttcgttaattgtgttaattgattagttagtcgctgtgttaatggaccactaagttagctgcgagcccgtttctgtttagttcaagttatttctgttttggccattccctgcaatgagcgcctttgaggttagttgagtcctctttttggaactccggcaataattttccgagaaataactagattaccggtacttacagatcacagtgacgccatcgcgcctaaagcaaaagaagcgcgccgaaggacgcgagcccgccgtcgtcgtcatggctccgttctccgccaaggcgattgtgcagttcgaggatgtgccgataacaaagacagcacggcgccaggtgcgcgttctcaatcccagcgacgacgacatcgaggttagtgggttgcatacggcctggcaactgttatttgatcaatgttttacaggtcaaggtaatgaaggccatccgggaggagcacaacttaagcctggagtggatggagcacacggtgcctgcaagagatgaggtatccatggagctagtgtggagccccgtccttgaggtggcctgcaaggagacgctgcagctaatagacaaccgcaacttccgaaaggaggtgatgatcatactcaagtccaagagcaaccagccggtcaaggtcagtcaaaaaatgcatttgccaccccttttacttacataccctcttttgcatgtatctcttacctttctacctgaagaacccgcgcaaatttcctactgtcggcaagaccctgcagctgaaatcgccgacaggagctggcaagacaatgaaaagcgtggtatccgctgctgtgcagcaaaagaagcgcatgtctgcagcagcagcgcctccctccaagcagacatggcgagtgactgctccttcgcgtcccgctgcatgggcacatccacctccacaggctcctcttgtcgagaagaatgtatacaagactccacaagaagagcccgtatacatatcaccacagcctcgcagtcttaaggaaaatctaagccctatgacgccaggaaacctactcgacgtgattgacaatctgcgattcacacctctcaccgaaacccgtggcaaaggacaagctaccattttcccggacaatctggcagcctggcccacaccaacacttaaagggaatgtaaaatcatgtgctaatgatatgcggccgcgtcgaatcactccagatgatctagaagatcagcctgccacaaacaaaacgttcgatgtaaagcattccgagactatcaatatttcgttggacaccttggactgctccaggatcgatggacaaccgcatacgcccctaaataagacaacaaccattgtgcatgccacgcacaccagagctctggcctgtattcatgaggaggagggaccaagtccacctaggacgcccacgaagagcgccatacacgacctgaagagggacattaagttggtgggttcacccttacgaaagtattccgagtccatgaaagatttgtcacttctatcgccacaaactaagtatgccattcaagggtctatgcctaatctaaatgaaatgaaaatccgctcgatcgaacagaatagatattaccaggagcagcagatccagataaaggccaaagacttgaatagctcctctagtagcgaggctagtttggccggccagcaggagtttctattcaaccacagtgagatcctcgctcagtccagtcgttttaatctccatgaagtaggtcggaagtcggtgaagggaagtccggtgaagaatcctcacaagcgccgctctcatgagttgagtttttcggatgcacctagcaacgaatcattgtaccgcaatgaaactgtagccatttcccctcctaaaaagcaacgggttgaggacactactctgcccagaagtgcagcgccggcaaatgcatctgcaagaagcagtagtgcccacgcctggccacacgcccaatccaagaagtttaagctagcacaaaccatgtcactgatgaagaagcccgccacaccacgaaaagtcagggacactagcattcagccttccgtcaagctctatgactcggagctgtatatgcagacgtgcatcaacccggatccatttgcagcaactacgacaattgatccatttctggcatctaccatgtatttggatgaacaggctgtggatcgtcatcaagctgactttaaaaagtggttaaatgcccttgtctccatacccgctgacctggacgcagatttaaataacaaaatagacgttggtaagctgtttaacgaggtgcgcaacaaagagctcgtggtggctcccaccaaggaggagcagtctatgaactacctaacgaaataccgcctggagacgcttcgtaaggcggctgtggagctcttcttcagtgagcagatgcgcctgccatgctccaaagtggccgtatatgtcaacaagcaagctctgcgcatccgtagcgatcgtaatcttcacctagacgtagttatgcaacgcaccatacttgagctgctgctttgcttcaatcccctttggctgcgccttggactggaagtggtctttggcgagaagatccagatgcagtctaatcgagacattgtaggcctcagcacctttatcctcaatcgcttgttccggaataagtgtgaggagcagaggtacagcaaggcatacacactcaccgaagagtacgcggagaccattaagaagcactcattgcagaaaatcctctttttgctgcttttcctcgatcaagctaagcagaagcgcatcgtcaagcacaatccctgtttgtttgttaaaaagtcgccacataaagagaccaaggatattctgctgcgcttctcgtcggagctgctcgccaacattggtgatattacgcgggaacttcgtcgcctgggctacgttctacagcaccgccaaacatttttggacgagttcgattatgccttcaacaacttggctgtggacctaagagatggcgtgagactaacccgagtcatggaggtaattttactacgcgatgatctaacccgccagttaagggtgccagccatctctcgccttcagcggatcttcaatgtaaagctagctctgggcgcacttggtgaagccaacttccagctaggcggcgacatcgccgcccaagacatcgttgacggacatcgtgagaagacgctttccctgctctggcaacttatttacaaattccgctcgcccaagtttcatgcggcggccacggtgctccagaaatggtggcgccgtcactggctgcacgttgttatccagcgtcgcattcgccacaaagagcttatgcgtcgccaccgggccgctactgtcattcaggccgtgttccgtggccaccagatgagaaagtacgtgaagttgtttaagacggaacgcactcaggccgcaataattctgcaaaagttcacccgtcggtatttggcccagaagcagctatatcagagctatcacagtattatcaccatccagcgctggtggcgagcccaacaactgggaaggcagcaccgccagcggtttgtggagctccgagaggctgcgatctttcttcagcggatctggcggcgacgactctttgccaaaaaactattggcggcggcggaaacagccagacttcagcgatcgcaaaaacaacaggcagctgctagttatattcaaatgcaatggcgaagctatcagctgggcagaattcagcgacagcagttcctgcgccagagggacctcatcatgtttgttcagcgcaggatgcgaagcaagtggagtatgctggagcagcgcaaggagttccagcaactaaagcgtgcagctataaatatccaacaacgctggcgagcgaagctttcaatgagaaagtgcaacgctgattatttggcacttcgttccagcgttcttaaagttcaggcttacaggaaagccacaatccagatgagaatagatcgtaatcactactattccctgcgaaaaaatgttatctgcctgcaacagcgactgagggccatcatgaaaatgcgcgaacagagggaaaattatctgaggctgcgaaatgcttcaatactagttcaaaaacgctaccgcatgcgtcaacaaatgatccaggatagaaatgcatatttaagaacccgcaaatgtatcatcaatgtccagaggcgctggagagccactctgcagatgcgtcgagaaaggaagaactaccttcatctccaaacgacaaccaaacgaattcaaatcaagttccgtgccaagcgcgaaatgaaaaagcaaagagccgagtttcttcagctgaaaaaggttacccttgtagtccagaaacgtcggcgggctttgctgcagatgcgaaaggagcgccaggagtacctacatctgcgcgaggttaccataaagctgcagcgcagattccatgctcaaaaatcaatgcggttcatgcgagccaagtaccgcggcacccaggctgctgtgagctgcctgcagatgcattggcgtaatcatctccttaggaaacgggagaggaacagtttcttacaactgcgtcaagcagcaataacactgcagcgacggtaccgagctcgtctgaatatgatcaagcagttgaagagttacgcccagctgaaacaggcagctattaccattcaaacccgatatagagccaagaaggcaatgcaaaagcaggtggtcttgtaccaaaagcaaagggaagccattatcaaagtgcaacgacgataccgcggcaatctggagatgaggaagcagattgaagtctaccaaaaacagcgccaggcagtcatccgcttgcagaaatggtggcgcagtatacgcgacatgcggctgtgcaaagcgggctaccgaaggattcgactcagttcattgagcattcaacgcaagtggcgggccacagtgcaggctcgtcgccaacgggagatcttcttaagcaccatccgcaaagtgcgacttatgcaggcatttatcagagcaactttactgatgcgtcagcagcgcagggaattcgagatgaagcgaagggctgccgtagtgatccagcgccggtttcgtgctcgctgtgctatgctaaaggcgagacaggattaccaattaatccaatcctctgtgatcctggtgcagcgcaaattccgtgctaatcgcagcatgaagcaggcacgccaggaatttgtccagctgcgtactattgcagtccatttgcaacaaaagttccgtggcaagcgtctaatgattgagcagcgtaattgtttccaactgctccgctgttccatgccgggcttccaggcacgtgcccgcggctttatggctcgcaaacgattccaggccctgatgacacccgagatgatggacctcatccgccagaagcgcgccgccaaggttatacagcgttactggcggggctatctaatccgacgacgtcagaagcaccagggtctcttggatatccggaagcgtattgctcagctgcggcaagaggcaaaggcggtaaactctgtgcgctgcaaagtccaggaggcggtgcgtttccttcgcggacgctttatcgcatcagatgcgttagcagtgctaagtcgattgggtaagtgatccagctacgttagtccttattataactaatcctgcttaataatcccggcagatcgtctttcgcgcactgtgccacacctgctcatgtggtgttcggagttcatgtccacgttttgctatggcatcatggctcaggccattcgatcagaggtggataagcagcttatagagcgctgcagccggatcatcctaaatttggcccgctacaatagcaccacggtgaacacgttccaggagggcggtttggtcaccattgcccagatgttattgcgctggtgcgacaaagacagtgagatattcaacactttgtgcaccctcatttgggtattcgcccactgtcctaaaaagcgaaaggtagctaaatagcgagaggattaggttttagcgagtttttaatcatattcttaatgccttccagatcattcacgactatatgaccaacccagaggccatttacatggtgcgcgaaactaagaagctcgtggcccgcaaggaaaagatgaagcaaaatgcacgcaagccgccgccaatgacaagtggacggtataagagccaaaagataaacttcacgccgtgttccctgcccagcctggagccggacttcggaatcatccgctacagtccctacacgtttatctcgtccgtttacgccttcgatacgattttgtgcaagctgcagatcgacatgttttagatttaggaaaattcatctttaaatgtttaatgttaaaaccattctgtgttgtgttttaaaatagtcacataaattcttagaccatgctagttttttggagacaattagaaatagtttaagataatctaagaccgtcttaacaatgtaaaataattaagtattaagttaacatgtatatgctgcaaacgaaaaatgtaactaatattttagaatgaaaactaagtgcattgtttttataggaaaccacaaaagaaactgaagaataaagacaattgaaagtcaaattcaagtgtatttgctaacgcagacttgctgcgcctatgtttattcgggtaggtatgcatgtattcacaaaacaattacatatttgtaattatatagttaaattagtaatcactttgtcaaacacttagttacaccgatattagtatgcagtagtttacccactattcgtgctcctccgccgacgaccacaacgaatgccactcgtgtcgctctttctgagagagattgccccaagtatataagtttaaatccgcgtgtatattaattaatgcccctttaaaatgtacatatatggagtactgtaaattggattgaatatgcatatataatagattcgtataacattatatgtatttcttccttgataattgcacacgccagtttcattctcattcagtttttttttttttttttgattttttcgccatttgtcatagtatataatttagagggtgccgttaaacgcatcgatttgaagaacttaacataaataccattggctctagcgattcatacaataaatatttgtgggacgaggggcgtgcaaagaattcgtttggattcgcagacatttagatttagattgcctcccgaatgtgtgacttaagtttggagaagagtctgagagcttttgcaagtgctttttcgataacattagttaggatgagctcctagtcaaatggcgcacggctggatttgaataagtgcgccatcc

SEQ ID NO: 15062 - DNA, 6003 bp, DROSOPHILA
cgacgctctaatttgtttaatttttgttcgttaattgtgttaattgattagttagtcgctgtgttaatggaccactaagttagctgcgagcccgtttctgtttagttcaagttatttctgttttggccattccctgcaatgagcgcctttgagatcacagtgacgccatcgcgcctaaagcaaaagaagcgcgccgaaggacgcgagcccgccgtcgtcgtcatggctccgttctccgccaaggcgattgtgcagttcgaggatgtgccgataacaaagacagcacggcgccaggtgcgcgttctcaatcccagcgacgacgacatcgaggtcaaggtaatgaaggccatccgggaggagcacaacttaagcctggagtggatggagcacacggtgcctgcaagagatgaggtatccatggagctagtgtggagccccgtccttgaggtggcctgcaaggagacgctgcagctaatagacaaccgcaacttccgaaaggaggtgatgatcatactcaagtccaagagcaaccagccggtcaagaacccgcgcaaatttcctactgtcggcaagaccctgcagctgaaatcgccgacaggagctggcaagacaatgaaaagcgtggtatccgctgctgtgcagcaaaagaagcgcatgtctgcagcagcagcgcctccctccaagcagacatggcgagtgactgctccttcgcgtcccgctgcatgggcacatccacctccacaggctcctcttgtcgagaagaatgtatacaagactccacaagaagagcccgtatacatatcaccacagcctcgcagtcttaaggaaaatctaagccctatgacgccaggaaacctactcgacgtgattgacaatctgcgattcacacctctcaccgaaacccgtggcaaaggacaagctaccattttcccggacaatctggcagcctggcccacaccaacacttaaagggaatgtaaaatcatgtgctaatgatatgcggccgcgtcgaatcactccagatgatctagaagatcagcctgccacaaacaaaacgttcgatgtaaagcattccgagactatcaatatttcgttggacaccttggactgctccaggatcgatggacaaccgcatacgcccctaaataagacaacaaccattgtgcatgccacgcacaccagagctctggcctgtattcatgaggaggagggaccaagtccacctaggacgcccacgaagagcgccatacacgacctgaagagggacattaagttggtgggttcacccttacgaaagtattccgagtccatgaaagatttgtcacttctatcgccacaaactaagtatgccattcaagggtctatgcctaatctaaatgaaatgaaaatccgctcgatcgaacagaatagatattaccaggagcagcagatccagataaaggccaaagacttgaatagctcctctagtagcgaggctagtttggccggccagcaggagtttctattcaaccacagtgagatcctcgctcagtccagtcgttttaatctccatgaagtaggtcggaagtcggtgaagggaagtccggtgaagaatcctcacaagcgccgctctcatgagttgagtttttcggatgcacctagcaacgaatcattgtaccgcaatgaaactgtagccatttcccctcctaaaaagcaacgggttgaggacactactctgcccagaagtgcagcgccggcaaatgcatctgcaagaagcagtagtgcccacgcctggccacacgcccaatccaagaagtttaagctagcacaaaccatgtcactgatgaagaagcccgccacaccacgaaaagtcagggacactagcattcagccttccgtcaagctctatgactcggagctgtatatgcagacgtgcatcaacccggatccatttgcagcaactacgacaattgatccatttctggcatctaccatgtatttggatgaacaggctgtggatcgtcatcaagctgactttaaaaagtggttaaatgcccttgtctccatacccgctgacctggacgcagatttaaataacaaaatagacgttggtaagctgtttaacgaggtgcgcaacaaagagctcgtggtggctcccaccaaggaggagcagtctatgaactacctaacgaaataccgcctggagacgcttcgtaaggcggctgtggagctcttcttcagtgagcagatgcgcctgccatgctccaaagtggccgtatatgtcaacaagcaagctctgcgcatccgtagcgatcgtaatcttcacctagacgtagttatgcaacgcaccatacttgagctgctgctttgcttcaatcccctttggctgcgccttggactggaagtggtctttggcgagaagatccagatgcagtctaatcgagacattgtaggcctcagcacctttatcctcaatcgcttgttccggaataagtgtgaggagcagaggtacagcaaggcatacacactcaccgaagagtacgcggagaccattaagaagcactcattgcagaaaatcctctttttgctgcttttcctcgatcaagctaagcagaagcgcatcgtcaagcacaatccctgtttgtttgttaaaaagtcgccacataaagagaccaaggatattctgctgcgcttctcgtcggagctgctcgccaacattggtgatattacgcgggaacttcgtcgcctgggctacgttctacagcaccgccaaacatttttggacgagttcgattatgccttcaacaacttggctgtggacctaagagatggcgtgagactaacccgagtcatggaggtaattttactacgcgatgatctaacccgccagttaagggtgccagccatctctcgccttcagcggatcttcaatgtaaagctagctctgggcgcacttggtgaagccaacttccagctaggcggcgacatcgccgcccaagacatcgttgacggacatcgtgagaagacgctttccctgctctggcaacttatttacaaattccgctcgcccaagtttcatgcggcggccacggtgctccagaaatggtggcgccgtcactggctgcacgttgttatccagcgtcgcattcgccacaaagagcttatgcgtcgccaccgggccgctactgtcattcaggccgtgttccgtggccaccagatgagaaagtacgtgaagttgtttaagacggaacgcactcaggccgcaataattctgcaaaagttcacccgtcggtatttggcccagaagcagctatatcagagctatcacagtattatcaccatccagcgctggtggcgagcccaacaactgggaaggcagcaccgccagcggtttgtggagctccgagaggctgcgatctttcttcagcggatctggcggcgacgactctttgccaaaaaactattggcggcggcggaaacagccagacttcagcgatcgcaaaaacaacaggcagctgctagttatattcaaatgcaatggcgaagctatcagctgggcagaattcagcgacagcagttcctgcgccagagggacctcatcatgtttgttcagcgcaggatgcgaagcaagtggagtatgctggagcagcgcaaggagttccagcaactaaagcgtgcagctataaatatccaacaacgctggcgagcgaagctttcaatgagaaagtgcaacgctgattatttggcacttcgttccagcgttcttaaagttcaggcttacaggaaagccacaatccagatgagaatagatcgtaatcactactattccctgcgaaaaaatgttatctgcctgcaacagcgactgagggccatcatgaaaatgcgcgaacagagggaaaattatctgaggctgcgaaatgcttcaatactagttcaaaaacgctaccgcatgcgtcaacaaatgatccaggatagaaatgcatatttaagaacccgcaaatgtatcatcaatgtccagaggcgctggagagccactctgcagatgcgtcgagaaaggaagaactaccttcatctccaaacgacaaccaaacgaattcaaatcaagttccgtgccaagcgcgaaatgaaaaagcaaagagccgagtttcttcagctgaaaaaggttacccttgtagtccagaaacgtcggcgggctttgctgcagatgcgaaaggagcgccaggagtacctacatctgcgcgaggttaccataaagctgcagcgcagattccatgctcaaaaatcaatgcggttcatgcgagccaagtaccgcggcacccaggctgctgtgagctgcctgcagatgcattggcgtaatcatctccttaggaaacgggagaggaacagtttcttacaactgcgtcaagcagcaataacactgcagcgacggtaccgagctcgtctgaatatgatcaagcagttgaagagttacgcccagctgaaacaggcagctattaccattcaaacccgatatagagccaagaaggcaatgcaaaagcaggtggtcttgtaccaaaagcaaagggaagccattatcaaagtgcaacgacgataccgcggcaatctggagatgaggaagcagattgaagtctaccaaaaacagcgccaggcagtcatccgcttgcagaaatggtggcgcagtatacgcgacatgcggctgtgcaaagcgggctaccgaaggattcgactcagttcattgagcattcaacgcaagtggcgggccacagtgcaggctcgtcgccaacgggagatcttcttaagcaccatccgcaaagtgcgacttatgcaggcatttatcagagcaactttactgatgcgtcagcagcgcagggaattcgagatgaagcgaagggctgccgtagtgatccagcgccggtttcgtgctcgctgtgctatgctaaaggcgagacaggattaccaattaatccaatcctctgtgatcctggtgcagcgcaaattccgtgctaatcgcagcatgaagcaggcacgccaggaatttgtccagctgcgtactattgcagtccatttgcaacaaaagttccgtggcaagcgtctaatgattgagcagcgtaattgtttccaactgctccgctgttccatgccgggcttccaggcacgtgcccgcggctttatggctcgcaaacgattccaggccctgatgacacccgagatgatggacctcatccgccagaagcgcgccgccaaggttatacagcgttactggcggggctatctaatccgacgacgtcagaagcaccagggtctcttggatatccggaagcgtattgctcagctgcggcaagaggcaaaggcggtaaactctgtgcgctgcaaagtccaggaggcggtgcgtttccttcgcggacgctttatcgcatcagatgcgttagcagtgctaagtcgattggatcgtctttcgcgcactgtgccacacctgctcatgtggtgttcggagttcatgtccacgttttgctatggcatcatggctcaggccattcgatcagaggtggataagcagcttatagagcgctgcagccggatcatcctaaatttggcccgctacaatagcaccacggtgaacacgttccaggagggcggtttggtcaccattgcccagatgttattgcgctggtgcgacaaagacagtgagatattcaacactttgtgcaccctcatttgggtattcgcccactgtcctaaaaagcgaaagatcattcacgactatatgaccaacccagaggccatttacatggtgcgcgaaactaagaagctcgtggcccgcaaggaaaagatgaagcaaaatgcacgcaagccgccgccaatgacaagtggacggtataagagccaaaagataaacttcacgccgtgttccctgcccagcctggagccggacttcggaatcatccgctacagtccctacacgtttatctcgtccgtttacgccttcgatacgattttgtgcaagctgcagatcgacatgttttag

SEQ ID NO: 15063 - protein, 1954 aa, DROSOPHILA
MSAFEITVTPSRLKQKKRAEGREPAVVVMAPFSAKAIVQFEDVPITKTARRQVRVLNPSDDDIEVKVMKAIREEHNLSLEWMEHTVPARDEVSMELVWSPVLEVACKETLQLIDNRNFRKEVMIILKSKSNQPVKNPRKFPTVGKTLQLKSPTGAGKTMKSVVSAAVQQKKRMSAAAAPPSKQTWRVTAPSRPAAWAHPPPQAPLVEKNVYKTPQEEPVYISPQPRSLKENLSPMTPGNLLDVIDNLRFTPLTETRGKGQATIFPDNLAAWPTPTLKGNVKSCANDMRPRRITPDDLEDQPATNKTFDVKHSETINISLDTLDCSRIDGQPHTPLNKTTTIVHATHTRALACIHEEEGPSPPRTPTKSAIHDLKRDIKLVGSPLRKYSESMKDLSLLSPQTKYAIQGSMPNLNEMKIRSIEQNRYYQEQQIQIKAKDLNSSSSSEASLAGQQEFLFNHSEILAQSSRFNLHEVGRKSVKGSPVKNPHKRRSHELSFSDAPSNESLYRNETVAISPPKKQRVEDTTLPRSAAPANASARSSSAHAWPHAQSKKFKLAQTMSLMKKPATPRKVRDTSIQPSVKLYDSELYMQTCINPDPFAATTTIDPFLASTMYLDEQAVDRHQADFKKWLNALVSIPADLDADLNNKIDVGKLFNEVRNKELVVAPTKEEQSMNYLTKYRLETLRKAAVELFFSEQMRLPCSKVAVYVNKQALRIRSDRNLHLDVVMQRTILELLLCFNPLWLRLGLEVVFGEKIQMQSNRDIVGLSTFILNRLFRNKCEEQRYSKAYTLTEEYAETIKKHSLQKILFLLLFLDQAKQKRIVKHNPCLFVKKSPHKETKDILLRFSSELLANIGDITRELRRLGYVLQHRQTFLDEFDYAFNNLAVDLRDGVRLTRVMEVILLRDDLTRQLRVPAISRLQRIFNVKLALGALGEANFQLGGDIAAQDIVDGHREKTLSLLWQLIYKFRSPKFHAAATVLQKWWRRHWLHVVIQRRIRHKELMRRHRAATVIQAVFRGHQMRKYVKLFKTERTQAAIILQKFTRRYLAQKQLYQSYHSIITIQRWWRAQQLGRQHRQRFVELREAAIFLQRIWRRRLFAKKLLAAAETARLQRSQKQQAAASYIQMQWRSYQLGRIQRQQFLRQRDLIMFVQRRMRSKWSMLEQRKEFQQLKRAAINIQQRWRAKLSMRKCNADYLALRSSVLKVQAYRKATIQMRIDRNHYYSLRKNVICLQQRLRAIMKMREQRENYLRLRNASILVQKRYRMRQQMIQDRNAYLRTRKCIINVQRRWRATLQMRRERKNYLHLQTTTKRIQIKFRAKREMKKQRAEFLQLKKVTLVVQKRRRALLQMRKERQEYLHLREVTIKLQRRFHAQKSMRFMRAKYRGTQAAVSCLQMHWRNHLLRKRERNSFLQLRQAAITLQRRYRARLNMIKQLKSYAQLKQAAITIQTRYRAKKAMQKQVVLYQKQREAIIKVQRRYRGNLEMRKQIEVYQKQRQAVIRLQKWWRSIRDMRLCKAGYRRIRLSSLSIQRKWRATVQARRQREIFLSTIRKVRLMQAFIRATLLMRQQRREFEMKRRAAVVIQRRFRARCAMLKARQDYQLIQSSVILVQRKFRANRSMKQARQEFVQLRTIAVHLQQKFRGKRLMIEQRNCFQLLRCSMPGFQARARGFMARKRFQALMTPEMMDLIRQKRAAKVIQRYWRGYLIRRRQKHQGLLDIRKRIAQLRQEAKAVNSVRCKVQEAVRFLRGRFIASDALAVLSRLDRLSRTVPHLLMWCSEFMSTFCYGIMAQAIRSEVDKQLIERCSRIILNLARYNSTTVNTFQEGGLVTIAQMLLRWCDKDSEIFNTLCTLIWVFAHCPKKRKIIHDYMTNPEAIYMVRETKKLVARKEKMKQNARKPPPMTSGRYKSQKINFTPCSLPSLEPDFGIIRYSPYTFISSVYAFDTILCKLQIDMF

SEQ ID NO: 15064 - DNA, 2707 bp, DROSOPHILA
catttcgtacaatgcttctcccttctctttttgtcttttttgcctttcttgttttcttattttcctgccggcacacacacgcacacacatgcagttgcgctctctcgcgctcgcacaccaacacactcaccgtttgggagtttttgtagtcaatcaactgattggaagccgcatcgcgtccagccattttgcttaaaatttaggatatttgctcaacgggataaccagaatttagaaacactcgaactggaaagttgttgatttctagccgccttcggttttttgctgtgactgcgtcgagaattctgtcaactaaagcaactgcagcgcagttccatttgtttttatagcccagcaccacgtacttgttgttgctcagggttgtcgagtgggccgaagatatcgatatttcgattatagttggaaatatatcgcttaaatattacataatatccattattattcatatttgtatttaaatagtatgaaattcattttcaaagttttttttttgcactgtccatttaaaaacgtgtcccaacaccattaagatttattattgataatttatagtaccttcgctccatttgctgcccagaaaggtgaataaatttaaactgtttgttaagttatttatttttttaatttcatgaaaatgtcggcatcattaagttataaactaagtcggctatctattggtgctcctgccaaataaatatctatggcctctttttttcttaagttgtgaacctcttccagtggtgcctttaaaataaatgtacttcattcatataatatatgtaaatatcattaaacatgttaaaattataaacttcaaggaaatctccaaatggcggctatctttctgtggctcctgccaagctaacatctctgtctttctttattttagcgtacaaaaatatctaattaaatgaaacttagaaactagcatcaactagcatatgtatcttgttctctagtcacaacttaaaaaaatcacctaaccacctgtggttcccatcaagtaaatatccatggactgcttgtccaggacggtcgggcgcctctttggaatcggctgaatgtgcggcagtcgcgtgccattcacggcgttcaaactgagattcgagttggggtcgtagtcgtcgcaatccggagtagtctgggccaagctcagcctctgcgatggtttcaccattaggtttgccctcgcaagctggcgtttttggatcgctgcagcgctggtagtgggcacattgtctgaatcttgacttaagcttctgtgggagcacagctcttcatcgggagtcacaatgcccccctcactgtatgaggcaccgaattcggaactttggccagagacatgcaaagagggcgcactttggtgcgacgatgactgactgccgctgacgtccgtaatgctcgcggcagtctccctggccatcttgtgccgtttggcattgtcgttcttcttccggtagagtcgcaccaggtccgtgtagcacttgcagcagatgaggttgcccgcccgaatttcgctgttcagcaaacaggcgaagcgcaccaaatatttgttgttcagttggcgatacggcttccgcagcgtgtggttgccgactgcgcagaatctccgctcaacgcgcgagccctcgtcaatggaggccatctggaatagatcatgcacctagttctccacaactcgggcttacaaaacaatgcttacactggcattttaacttccaaacgcaacaaaacgaaacatgaagccaattgtcccgccactttggaaacatatagtgtgaccacatatggattgctgaaatataccaaaattaggcgtaaaataaaatgcatttaactaataaacaaattcaatttttttaaatgttataaaatctaaaaacatactgacatggtcacagtttctcacaatttaaatgtggcttattgtaatgccagttaagtaattaatatgaagaaactattcgtttaaaattgacaataatctaattattggcgtgttcgatgttcatgaaatacttatgttatatcagttagtttgaaaattgactgtatttcttctgttggttgtatcaattaaaatgagtttaaaaacacattttttaaaaccctaaaaccacattcaaatcaaactgtaattataccaactaatactgaaaataccgaaaactgcaaaatcagctgctcgccgaacagcactcagcgtgctgttggacgcgaaatgttagcccattaaacccaggttattttttgtcattcattgttcatacgttcgtctcgtctgattttctttttataaaaacacaattaaaatttcaaacgaatacacataatttttataaatataatgtagtgcaacacgtatatgtataatatagcttaataccaagtgcaatccctcgaaagataacttcaaatggcaatctaatttacgtaaagagaagagacaaaaaaagaaacggcgcgtgtgaaattttttcaagcaaagcaaaggagagaagttggagcaacaaaaaaaagaggagagaaaaaatacagcaacaacacacaaagtaggccaacaacaacagcaagaaaaaagcaagcaagcggcaacaaccacagcaacaacaataacaacgtcgagcgaaagaagcaaaaaccttgtaattgtgtcaataaatgttttaaataatatttcctttgg

SEQ ID NO: 15065 - DNA, 707 bp, DROSOPHILA
aagcccgagttgtggagaactaggtgcatgatctattccagatggcctccattgacgagggctcgcgcgttgagcggagattctgcgcagtcggcaaccacacgctgcggaagccgtatcgccaactgaacaacaaatatttggtgcgcttcgcctgtttgctgaacagcgaaattcgggcgggcaacctcatctgctgcaagtgctacacggacctggtgcgactctaccggaagaagaacgacaatgccaaacggcacaagatggccagggagactgccgcgagcattacggacgtcagcggcagtcagtcatcgtcgcaccaaagtgcgccctctttgcatgtctctggccaaagttccgaattcggtgcctcatacagtgaggggggcattgtgactcccgatgaagagctgtgctcccacagaagcttaagtcaagattcagacaatgtgcccactaccagcgctgcagcgatccaaaaacgccagcttgcgagggcaaacctaatggtgaaaccatcgcagaggctgagcttggcccagactactccggattgcgacgactacgaccccaactcgaatctcagtttgaacgccgtgaatggcacgcgactgccgcacattcagccgattccaaagaggcgcccgaccgtcctggacaagcagtccatggatatttacttgatgggaaccacaggtggttag

SEQ ID NO: 15066 - protein, 221 aa, DROSOPHILA
MASIDEGSRVERRFCAVGNHTLRKPYRQLNNKYLVRFACLLNSEIRAGNLICCKCYTDLVRLYRKKNDNAKRHKMARETAASITDVSGSQSSSHQSAPSLHVSGQSSEFGASYSEGGIVTPDEELCSHRSLSQDSDNVPTTSAAAIQKRQLARANLMVKPSQRLSLAQTTPDCDDYDPNSNLSLNAVNGTRLPHIQPIPKRRPTVLDKQSMDIYLMGTTGG

SEQ ID NO: 15067 - DNA, 2635 bp, DROSOPHILA
cgcctggacgcctatccccgcacactggatgacttcagcgttcgcacagtgggcggcgccgcaggtgggtgcaggtgtacaattgattgtggcgttaaggaacccaaacaaccggcttttctctgattttcagttacaattatcagtaccagcatcataagcctactgatcttcctcgaggtcctcaactacatgcagccaaccctaaatgaagagctcttcgtggacaccactcgtgatcacaagttgagaataaatctggacgtgacactgcataatctggcgtgcaactacatctcattggacgcaatggattcatctggcgacacacacttgagggtggaccacgacgtctttaagcaccggctggatctcaatggcgagcccctcaaggagacgcccatcaaggaaatcgttgcagtttcgccgcccaataagaatgtcacttgcggcagttgttacggagcggagcacaatgctactcagtaagatagtgaacagcttctaagttcaaccattagttccacctattttcgctgacaagatttatctaaggagatatctgtatctagagctaattatagcaatggctttctaatctcccccttttaataccaactaccatcctatctagctgctgcaacacgtgcgaggatgttctcgacgcctaccggctgcgcaaatggaccgtggccgtggacaagatcgagcaatgtaagggcaagtacaaacgcagcgacgaggacgccttcaaggagggctgtcgcatccagggtcacctggaagtgaatcgaatggccggcagctttcactttgcgcccggcaagagcttctccatccgccagttccacatccatgactttcagttcagcaatgtgaagctatcgcacacaatcaatcacctatcgttcggcgagaagatagagttcgccaagacgcatcccttggatggactacgagtcgacgtggctggtgagtagtgaacacaaacacggactcgtaattctgtaacatctctattgcaataacttagcgtaatttaaacaagattggagtagggcttaaggttgtggttgtttagtaactctagtcaaatgccagcaggatcagcagcgaatccccgtgccgatggccataaaggtgccaaaggttccgccgccctggaccatggtcttgcccacgttgttgatcagctcccgcccgcgtagtccgtatctaaagtgtatttcaatgtggttcgttagttagccggagtaattacataattgccggcctccacttgcgtcacttctttggaggagcgctaagtggagcatccgagtgcaaagtccaactaacctgagcgccgagaacccgccaaagaccgcaccgctggccatgcccacgcagaatccgatgatgaagcccgtcttcatcttatcgaagcacgttggtccctgctgggaaaatgagctcgtaggcagaggcatgccgctaagtccgtggttttcctggttcaccggctctatatgagttgataccgctgagtagcaagctccgctgctccgacgcacttatgaatctcgcagaaggttcgtttattttaggaatattcaaaatatttctatttatttcggcaccgactagtcgaataattcgtaaacgtgtgagtgtgagcagctgagtgatggtgtgcgtgagctgtcaaattatagaagggttgccactttgtttttcgctcggcttgcctcgttctagagaaagccgatagggggcggtagctaaaaagcgggtgctttaaaatcaatttatattctttatttattaatattattaaaaagcatacttaagactgaaataaaaaaaaactaagttatttaagcacaggcatccattttaatttatattttactcctcgaagaatttctgggaaacttcggaggtctgttgtgtggggcattttcattttttaaattggaaaaaatatactcatttgttcgaattgtgaaatacctgtttttagaagcatgaagtttaattcgtaattaccttaccaaattaaatacatttatcaacgacaaatgaagtaaactagaaaatctgctctcctctttttgcagaaaccaaaagtgaaatgttcaattactatttaaaaattgttcccacattatatatgcgaggaaacagcgacggcgagcccatatacacgaatcaattctccgtcacgcgataccgaaaagatctttcagatcgcgagcgcggaatgccggggatattcttcagctacgagctctcgccactgatggtgaaatatgcggagagacacaggtcagtaagccacaaagctaatggttaattttacaagttttattggttgtgttgtgtattcccagctcatttggccacttcgccacgaattgctgttccatcatcggaggcgtgttcacggtggccggcattctcgccgtgctgctgaacaactcgtgggaggccattcaacggaaactggaagtcggcaagctcagctaacaacaattcgaatctcttatgcagctttactacgcctaactcaatatacattcgacaaatctccaaataaaagtgcttaattttatagaaaataaggatagagctgttctcttaagtggtccgctgt

SEQ ID NO: 15068 - DNA, 512 bp, DROSOPHILA
attattcgactagtcggtgccgaaataaatagaaatattttgaatattcctaaaataaacgaaccttctgcgagattcataagtgcgtcggagcagcggagcttgctactcagcggtatcaactcatatagagccggtgaaccaggaaaaccacggacttagcggcatgcctctgcctacgagctcattttcccagcagggaccaacgtgcttcgataagatgaagacgggcttcatcatcggattctgcgtgggcatggccagcggtgcggtctttggcgggttctcggcgctcagatacggactacgcgggcgggagctgatcaacaacgtgggcaagaccatggtccagggcggcggaacctttggcacctttatggccatcggcacggggattcgctgctgatcctgctggcatttgactagagttactaaacaaccacaaccttaagccctactccaatcttgtttaaattacgctaagttattgcaatagagatgttacagaatta

SEQ ID NO: 15069 - protein, 79 aa, DROSOPHILA
MPLPTSSFSQQGPTCFDKMKTGFIIGFCVGMASGAVFGGFSALRYGLRGRELINNVGKTMVQGGGTFGTFMAIGTGIRC

SEQ ID NO: 15070 - DNA, 3679 bp, DROSOPHILA
ttaaaaaaaagtttaagctctaaattcagtaaacagaaacaaattaccacacacatttcaaatttaaaggcagcgtgtaaaaaaaaacaaacgtttaacgaggtgtaaaaaatcagaggtagcagaaagattcacgaaaataatataaaattctggcagacgcaagtttagtaggggacaaaaaatacaaaaaacgaaagcacgacaacatctatataggtttgcctaggtatataatatatatttaggtctctagctggtatgtctaacttctatatgtattataaagtgtaaaaaagtaaagaaaatatgggtaaataatgtaaaagttggcaatgcgagttggctagatagtggatcagttatatttaatgattataagtaaagggcaaaattgttgacgtctaacgtaacgctggcggcatgttgttgaaaacacgttaaaaaaaaaagggaggagatgaagggatcgatatacacatacaaatatataaatgtttattcaggtatgaatggcgttaggtatgtttattgtaaaattgattacgatgtgaacctgttattgcaaatgaaaagtgattttaactattaagaaatctatatatatactataaacccataaaaagtaaaaggatctaacagttatacattaaatgattaatataaatgcaagcaacacacacactttaagtttgaaaaactgttaaaaatgcaaaaaaaaaaaatcatttaactagaaacaaaactacctaaaactacaatgcatatttgatcaattgatttcatatgctttattattatgttaacatacaatttcatctcagagatgtttcaaacatgcaaccaaccaacaacaacaaaagcaaagtgaaataaaaagtaattataaaaaatcagaggtgtaagcgtttgtccaaatctttattcaattattaggtcacaaacttgcgtttaatgagttatatatttattgcgtcaatattgaaaagcatggcgggtcttaagacatgttgaagttttgcgtaaaatcgtattcgatggttggtatgacggtctgaacgaatttgaggaatatgatcaagtataaatgcactcccagctgaccgccgccctcctctaccgtctgtataatcttcttcatgatatccgcatgccgacatggatgcacagaggccatattgggacctggaagatgcggatgggactccatggtgacagttttcttcgcgtgatcctgcgagacatcctcgtacatctgttccacggtcagtggcttgcgctgctcatcatagcccaccacccagagtcgcggcgtctgatagtacttatcatagctgatgtgcaggtcgtacgtgcgtgtatggagcacagagtcaccgctggcctccgcgtcgcccgatgcggctgccactgggctggcctttgcttccggctccggcttgcgtgtcgtggtggctacagccggatcgaccagctccagcatgccgctctcctcgaaatcgtccatgtcaatagcctcgtcgtcgtcctcgtcttcagcctggcccccagcgcccggcgcagatttgtcgctatctggagtgtgcatttcttcctgaaatgcagtacttgattatgatagtcgtggtaaagtttcacccgcactcacctttgtctcctccattgtcagttcgcagatcttgtcctccagctgggtggtgccatcatcgttcagttgatgagtctccacccaaccgccgtcaccggactcctcctccaccagcgtctcctcgccgacgtattccatctgcttgcagcgacgatagcagggaacattgcgcgttatcaggaattgcttatctaagtgggggcgaaatgattttaatgagtcaattggctagttattagtggaaaatcgcagcacataccctttggtaggtagggttttgtcttggtctcatcgccagcggcccactgccaagttggacaatggtgcaccaggtgatcaccggcggccacgaattcttccggagtgagaacacctgtctcacggaatttcgattcctgcaaaaaaaaaataacgatatttgtacaacaattcaaaaccaacaaagtggaaagttgtatctagaattcttaattgataaataattagtatatatgtatattagttccatatctttaatcttaacgctaaaatgtaagtatttcccataaaccgttacattattgtaggccgttttcttaaaaggacacaaaaataggccgagaattctgggacgccccttattttacgtttggagacagtctggcgttggatccagttttatagcctcccgggggccgttaacacaagtcttggaaaatggggaacgggaaaatggaatcaatattagagcgaggaaaccccttatctttgcgggttttctttgtcatgatgcatatgtacaccctcgtttcatatgtacgtattgaaatacacatttgatcagttttccgtttatttggcactttttaccttcaaaacgggcgtcagatattcggccacattgagcgctgtgcccttgacggtgttgagaacactctgcatttcgttggccgctgagtattcgcactaatctaaacgcttaaacttaataaatacaattaagatggctctctcaattgacttgcacttcgcagctaattgtttttgtcttgccagtcgcgataccaacaacagtgcggtgcggtcatactagtctatcgatgtgggtgggactatcgataagttgttgcaggaacaacggcactttttgcaatggattgcccaaatataaaaacaacctgtaatttacattgttaaatacggactaatctaataaattttgttaagaaaaaatgtctaaaataagttctaaatttattaaaaacccgaattttagcgaaggtattttaaaatagcacttattcatacttttaaatgattttaataaaaataaatcttaccttaagaaagacattccttttaaaatgtagtacgcatgttggtatattcgatagcttcggtcacactatgtccattcgcgcacattgtttctaacgtttgtacgcgacgaaatggaagaaaaggttctgccgaaattcgtattaccgtctccaaagttcggcaagcccaatggatccaccacatccaatcacctctacctgacccccagcgggatgaccctgctgccgcgctccaagcaaccgccgcccatgtacggtgcacgaggatcaacagtgccagctaaatatctgcaccaagaacaagtgagtgcaccaataatagttcgagcttgttctttaaacattccttaattcaaaacatagagcagcccagtgagcgtgcctgcatccccgccagtttaccattctcctccgcgaccggaattttgtcacacatgtgtaatggagctggccaactctcaggatatgaaactccacctggagcaacacgagttctgccctgccgatgactgcgactttgcggcgctccacaacatcctggaacgtcacatagaatccaatcacatcacaggaacctacgtaaaggtaaagaaagtttggtccgaggaagaattggccgcttggagggcagaacgaagaaaaaagtaagttaattagtagaaatttcttttgttctttaaaataagcagctcaaattgtagatttcccactg

SEQ ID NO: 15071 - DNA, 1103 bp, DROSOPHILA
caagacaaaaacaattagctgcgaagtgcaagtcaattgagagagccatcttaattgtatttattaagtttaagcgtttagattagtgcgaatactcagcggccaacgaaatgcagagtgttctcaacaccgtcaagggcacagcgctcaatgtggccgaatatctgacgcccgttttgaaggaatcgaaattccgtgagacaggtgttctcactccggaagaattcgtggccgccggtgatcacctggtgcaccattgtccaacttggcagtgggccgctggcgatgagaccaagacaaaaccctacctaccaaaggataagcaattcctgataacgcgcaatgttccctgctatcgtcgctgcaagcagatggaatacgtcggcgaggagacgctggtggaggaggagtccggtgacggcggttgggtggagactcatcaactgaacgatgatggcaccacccagctggaggacaagatctgcgaactgacaatggaggagacaaaggaagaaatgcacactccagatagcgacaaatctgcgccgggcgctgggggccaggctgaagacgaggacgacgacgaggctattgacatggacgatttcgaggagagcggcatgctggagctggtcgatccggctgtagccaccacgacacgcaagccggagccggaagcaaaggccagcccagtggcagccgcatcgggcgacgcggaggccagcggtgactctgtgctccatacacgcacgtacgacctgcacatcagctatgataagtactatcagacgccgcgactctgggtggtgggctatgatgagcagcgcaagccactgaccgtggaacagatgtacgaggatgtctcgcaggatcacgcgaagaaaactgtcaccatggagtcccatccgcatcttccaggtcccaatatggcctctgtgcatccatgtcggcatgcggatatcatgaagaagattatacagacggtagaggagggcggcggtcagctgggagtgcatttatacttgatcatattcctcaaattcgttcagaccgtcataccaaccatcgaatacgattttacgcaaaacttcaacatgtcttaa

SEQ ID NO: 15072 - protein, 330 aa, DROSOPHILA
MQSVLNTVKGTALNVAEYLTPVLKESKFRETGVLTPEEFVAAGDHLVHHCPTWQWAAGDETKTKPYLPKDKQFLITRNVPCYRRCKQMEYVGEETLVEEESGDGGWVETHQLNDDGTTQLEDKICELTMEETKEEMHTPDSDKSAPGAGGQAEDEDDDEAIDMDDFEESGMLELVDPAVATTTRKPEPEAKASPVAAASGDAEASGDSVLHTRTYDLHISYDKYYQTPRLWVVGYDEQRKPLTVEQMYEDVSQDHAKKTVTMESHPHLPGPNMASVHPCRHADIMKKIIQTVEEGGGQLGVHLYLIIFLKFVQTVIPTIEYDFTQNFNMS

SEQ ID NO: 15073 - DNA, 6580 bp, DROSOPHILA
tcaattggtggcatgatcagatgtattatgtatactataagtactactttgaaactctaagaaattaaagtaaatttatagaattatatacttgtatgtaggaggagaaaagcatataggcttacttttttaattctaaaagaacttacctaaacttttgcaagcaaattaaattttacaccaacccaaaactaaacatttgccacatgaaataaattcgaagagttgttttacatttttaacttgtatgaacatatatattttagaataaattcaaaatgaagaaatatttatacaagtttggaaagcttttaagaaattcccttttccgagatgccataaagttaatcacgttttaaaagtaattccaaaaacaattaatcatataatagagatccccatatcacatacttttgcttggttatcaacacgcattatacccataaaaccccagagctagtgtgtttcatgacccagtgattatacccctcgggactgaaacgaaatggaaattgacgaaaaaagagttgctaataaacgcggcaaatggaaagcaaaagcggttaaattaaagccagcggctgctcaccgatttcttgtgcgtttttccaacggtagtggtcttataattcgctggtggatcccagttggtgccaccgagccgccgagtggcgaactcgtttccaccatccaacatccacgcagtcgagcgttttataaatagaagccaccggctcgagcagtcggcactcgatcacgaaatttgagcgcagccatgtcgtgtgctcctcacctggtggcgggatgatggtgccgggaggtcctgctggcaccgtcatcccactgcccactgactccgtctgcatcattcgactcgatctctttactcgacagcttccagcacatcgatgagctggcccgccagtcgcacacgcagcgaatctcgctgcgacgtaccgccttggagggactctgtccgccgcgggatccgccgccctgcatgcccgcctcggagcggtaccgcacccacgacggcacctgcaacaacaaacgccggccgcgatggggtgccgcccagatgcccttcaaccgcttcttgccgccagagtacggtgatggcgtggacactgttcggagttccgccgatggcagcaccttgtcctcgtcgcgattcgttagccttttggtgcacggagcgcgggagggcgaggcaccgctcaccctgatgatcgcccagtggggtcagatgctagaccacgacatgacctcgacggctcagccgcggtaagtggaaactatggaataatataaaatgtatattgataacatagatgatatttggtattacgacagttccatcaatggttccatacccagttgctgtggcggcaaggacttccatcccgcctgctttcccatcaaagtgcccctggacgatccttggctggcgccgctcaaggttcgctgcctggagttcctgcgctcggctcctgcccagcgacgcgactgtgtgctgtcctggcgggagcagaccaaccaggtgacctcatacatcgacgcctcgcccatttactcgaacagcgccaagtcctcggacaatgcgagagttttccggcatgggctgctcgtctatgggcgcggtgatcccgccgaggatgtgtgccaacgcggcgctattgccaccaagtgcattcgttccggagatggacgcagtggtgagcagccgggattgttggccatgcaccacgtctgggtgggggaacacaaccgaattgccatggagctgagcgaactgaatcctcactggagcgacgagaaggtgtaccaggaaacgcgcaggattgtgggcgccatgtttcagcacatcaccttccgggagtttctgccggtcattttgggcagggaggtggtcaagctcttcgatctggagctgatgccctcgggctactacgaacgttatagttcaaaggtcaatcccacggtggccaatgcctttgcagccgccgccttccgttttggccactcgctggtccagaactcctacactcgctgcgatcgtcatcacaatgtgatcaataacagtgagttttgagctggattaagtcacttgagatatttgttattaactttgaatatcctctataagatgtcagcctgcatgaggagttccagcgaggtgacattggttcggcgggctcactgcatcgtctgctacgtggcttggcctcccaaagggctctgaagagggatgagttcattacccccgagctgaccaatcacctgttccagactcctggctttccattcggcttggacctggctgccatcaacattcaacggggcagggatcatggcattgctccgtacagcgcctggcgagtgccctgtggtctaagtcccatcctcagttgggatgacttcggtaagttgtgaccaagttcatcttttaattgctcacctgcttgttgccattttagctaacgtggtgggtccggagtccgccaagcgcattggccacgcctatcgcagcgtgcacgacatcgatctgtttgtgggcgggatcgcggaacgtcctgtggtgggtggcctggtgggtcccaccttcgcctgcatcatcgcccagcagtttagtaactccaggcggggtgaccgcttttggtacgagaatggtggcttcgagagctccttcacgcccgcccaactgcactccttgcgccgcgtgtccttggcccaagtgctctgccgcacggtgggtggtggcaccctccagccccacatctttattccagcggagttcgaggacaatgagagacagacctgtggtgtgggcagtctaagtcccatcgacctaagtccgtggttggagcaggatccctttcacaatcagcaggtgcccgaacaggtctttaccattgggcaacccgagttgggatccgttcagatcataaaggaggacaaggcgggcttctccaaccgggtgaaacccatcaagccacaggtggaggttagtccctcgtcacttagcggcttccatcgacccaccaacgaaaacttgaccaaagttagtgacaaacttgacctaagacgcaagacggtgaccaaaaagaacaataccaacaacagacaacagaccactagaaaacccgtgggtggagtaaacaacaagctggacaagtcccccaaaatcactttaaacatcaagagcgtaaatgtgagaagaccagagggatcgggactcaaaagaagggtgatcatcaacaatgtgcccgtagagctgcgaagctctggaggtaatgccacggctgaggagacagaaccaggaaatttgacagacgaagacgacgagtttcacgacgacgcaggcgaagtggtggacatggaggacatagtggaagtgagggctagcaaggatgatccatcgaaactgaccaagacggacttaaaccaaaacagaaatgattcgaagacaactgaaacagaacagactgaaaagaacactaccatcgaacccacggaagattctactgatgaaccaaaaactgaaagacgtgacgccagaaagatggaacctcatccagcagcaaagactccggacaagacagcagactctagactattgcacaaccaacgcaaccgtaccactaccccaagggacttccaagccagctccaccgtgagcctgaaacgcttcacgcgacagacgaaggcaccgaaggttagtaagcccaccaaaagggccgaggaactgagacagtaccagaacagaccgctctacgagagaccccaaaaggtggtggtcaacggaccgaacgccgaccagtacgagattgagatcaacatacgacagacgaacaagaatcccgcatcacgaccatcgacttctgactacgcgcaatacacgactgccaacaaaccgtactataactccaactacgcaccacactacatggactacgccagtaccacaccaattccattgcccagctatggctaccatcaaccgattggggagatcagtaaccagggagtaagaacgaagccaccgaccatcatttatctgaacgacaacgacgaccgacggaccacaactcgggcgccgaacatcttccaaaactttctgacctttgccacgaacagtttcaatcccttggggataagacgacccatgcccacgactccatccccgatctcgcagagccacaaggagccaggacagttcgagaacaatgtggttcacagtccgatcagtaactcgcacatactgactggaggaggtccgtccgcctcgtactcaccgcgaccgccgtcggtgcactcgtatccggtggccaccagttcccagattggtggcaatcccggatcagggttcctgcacgcttccagcagcgcagttagtgcagggcactttggcagcatttcgggagtggccactgccaatggagcggacagcacatttagcttcaacatacggccacgtcccagtccggatttgggttcagtagtgagctcctatccacgaccggtttcaagtcagggcggaggttcatcttacagacctgactacgctcctacccagagcgaactgtactatgacagagaactgatcactgaccgaaatcccagcccattttccggatcaagttccgcccaaagaccacatcaacagacattctacggacggagcccggaactcaaggaagtgggcaacaatagcaacgaactgacccatacggagcacaaactgtacctacaggactacgactatgccagcagaacgctttctaatctgaccacggacgagagtcaccaaactgatgacgacaccgattacgtatacgacgaagacatagccagcaatgacctggataagacgaagacccgaaaggagacggacctcaacgaattgaccacaaaaaagttcgaccaggacggctacatgcgaccacaacttatgcgagacgcgacccacaactcgaccggatacaacgtgacctcactggacgacaactacgtaatgcccatgctggagaacaggacgcggacgaactatgtgaccgaggtgcccaagcccatgctgtccacctccagccggagtgtgacgaacagcaaggtgaccgtctttccggacagcctagggaaacagttggccaacgacatccttgcggacgaggcgacggacgactacgtggacgcgaatgggcatacagaagcgcgactaaaggcccagaaactaaagcaactggccagtgtggcgttcgcaccaattaccgtactgaccaaaccggacagaccggacaactgggtgatctacaacaaggccagcgaggagccaccactgccacaaccgccagcagtcaacatggatgtggcgcccagcggagaggtgcccactccgatcaagaacttcaacaatgcgtggctaaagcaggatctaaaggctcggccggagacaccacctaccagattggcggaagaggtgaccacggtggcggcagcggacagtatctagaaatgccaaattagccctagattgattatttatttatttatacttcaaaggcaagaattcaatccaactataactatctgtcaattgtggtttcttatttcgtacatttcatggggaaggaatatcagatttctgattcagaatcctggcgatatatcgcttgccatatattcttagttctcctcctggagatcttcagccagttcgcccggacacagagcttcttttcgtattcaacagtgccaaaaatgtgacaattcttggtttgtactttattataatgcagactaaaactagtttatccactcagagaacacacacacacgaatgcttagctaagtgtagtgcctcccgacctctggggaggggcgaccctgtttcgatattaatttctaattcggcatgtccagtttgtggtattttgtttggcgcaaacattgctgtgcttagttgtgtaaaagtaattgggctaccaatgtaatcaacagtattatcaacatcatcatcaattacacgtacacgtacaagtttagttaggtgtataataaattatgcttgtcaccgatcggcctcttcgcgtgttaggtataaaacgactaagtataacaaaaataatgtacactttaagctacaacactttggggtatttgcatattgaattgcgttacttgaacatcctagccgcaagtatgttgcaacattctactacaatacatcctcgatgcgtccgccatcgatgatttataattcgctatcgtcggcaattcaactaattaacttgtgctcctctaattcattctctagctcttgttatttacaatcgggggcgaatctcctccagttctggtggttctcagtacgtcgcgtaaatgcagttttgagttggtttccgtttggctggggattgtgcgttctttaccagcggatctgatgcttgtactgctcgtccaccgcaatgcgcttgatcgtctcgtaacctagaataatgctgaatgagaaggctgccgactgcaccaggcgggcggacagtcccttgaagaagcagttcagcttctcctcctgccacagctc

SEQ ID NO: 15074 - DNA, 4391 bp, DROSOPHILA
atgcccgcctcggagcggtaccgcacccacgacggcacctgcaacaacaaacgccggccgcgatggggtgccgcccagatgcccttcaaccgcttcttgccgccagagtacggtgatggcgtggacactgttcggagttccgccgatggcagcaccttgtcctcgtcgcgattcgttagccttttggtgcacggagcgcgggagggcgaggcaccgctcaccctgatgatcgcccagtggggtcagatgctagaccacgacatgacctcgacggctcagccgcgttccatcaatggttccatacccagttgctgtggcggcaaggacttccatcccgcctgctttcccatcaaagtgcccctggacgatccttggctggcgccgctcaaggttcgctgcctggagttcctgcgctcggctcctgcccagcgacgcgactgtgtgctgtcctggcgggagcagaccaaccaggtgacctcatacatcgacgcctcgcccatttactcgaacagcgccaagtcctcggacaatgcgagagttttccggcatgggctgctcgtctatgggcgcggtgatcccgccgaggatgtgtgccaacgcggcgctattgccaccaagtgcattcgttccggagatggacgcagtggtgagcagccgggattgttggccatgcaccacgtctgggtgggggaacacaaccgaattgccatggagctgagcgaactgaatcctcactggagcgacgagaaggtgtaccaggaaacgcgcaggattgtgggcgccatgtttcagcacatcaccttccgggagtttctgccggtcattttgggcagggaggtggtcaagctcttcgatctggagctgatgccctcgggctactacgaacgttatagttcaaaggtcaatcccacggtggccaatgcctttgcagccgccgccttccgttttggccactcgctggtccagaactcctacactcgctgcgatcgtcatcacaatgtgatcaataacaatgtcagcctgcatgaggagttccagcgaggtgacattggttcggcgggctcactgcatcgtctgctacgtggcttggcctcccaaagggctctgaagagggatgagttcattacccccgagctgaccaatcacctgttccagactcctggctttccattcggcttggacctggctgccatcaacattcaacggggcagggatcatggcattgctccgtacagcgcctggcgagtgccctgtggtctaagtcccatcctcagttgggatgacttcgctaacgtggtgggtccggagtccgccaagcgcattggccacgcctatcgcagcgtgcacgacatcgatctgtttgtgggcgggatcgcggaacgtcctgtggtgggtggcctggtgggtcccaccttcgcctgcatcatcgcccagcagtttagtaactccaggcggggtgaccgcttttggtacgagaatggtggcttcgagagctccttcacgcccgcccaactgcactccttgcgccgcgtgtccttggcccaagtgctctgccgcacggtgggtggtggcaccctccagccccacatctttattccagcggagttcgaggacaatgagagacagacctgtggtgtgggcagtctaagtcccatcgacctaagtccgtggttggagcaggatccctttcacaatcagcaggtgcccgaacaggtctttaccattgggcaacccgagttgggatccgttcagatcataaaggaggacaaggcgggcttctccaaccgggtgaaacccatcaagccacaggtggaggttagtccctcgtcacttagcggcttccatcgacccaccaacgaaaacttgaccaaagttagtgacaaacttgacctaagacgcaagacggtgaccaaaaagaacaataccaacaacagacaacagaccactagaaaacccgtgggtggagtaaacaacaagctggacaagtcccccaaaatcactttaaacatcaagagcgtaaatgtgagaagaccagagggatcgggactcaaaagaagggtgatcatcaacaatgtgcccgtagagctgcgaagctctggaggtaatgccacggctgaggagacagaaccaggaaatttgacagacgaagacgacgagtttcacgacgacgcaggcgaagtggtggacatggaggacatagtggaagtgagggctagcaaggatgatccatcgaaactgaccaagacggacttaaaccaaaacagaaatgattcgaagacaactgaaacagaacagactgaaaagaacactaccatcgaacccacggaagattctactgatgaaccaaaaactgaaagacgtgacgccagaaagatggaacctcatccagcagcaaagactccggacaagacagcagactctagactattgcacaaccaacgcaaccgtaccactaccccaagggacttccaagccagctccaccgtgagcctgaaacgcttcacgcgacagacgaaggcaccgaaggttagtaagcccaccaaaagggccgaggaactgagacagtaccagaacagaccgctctacgagagaccccaaaaggtggtggtcaacggaccgaacgccgaccagtacgagattgagatcaacatacgacagacgaacaagaatcccgcatcacgaccatcgacttctgactacgcgcaatacacgactgccaacaaaccgtactataactccaactacgcaccacactacatggactacgccagtaccacaccaattccattgcccagctatggctaccatcaaccgattggggagatcagtaaccagggagtaagaacgaagccaccgaccatcatttatctgaacgacaacgacgaccgacggaccacaactcgggcgccgaacatcttccaaaactttctgacctttgccacgaacagtttcaatcccttggggataagacgacccatgcccacgactccatccccgatctcgcagagccacaaggagccaggacagttcgagaacaatgtggttcacagtccgatcagtaactcgcacatactgactggaggaggtccgtccgcctcgtactcaccgcgaccgccgtcggtgcactcgtatccggtggccaccagttcccagattggtggcaatcccggatcagggttcctgcacgcttccagcagcgcagttagtgcagggcactttggcagcatttcgggagtggccactgccaatggagcggacagcacatttagcttcaacatacggccacgtcccagtccggatttgggttcagtagtgagctcctatccacgaccggtttcaagtcagggcggaggttcatcttacagacctgactacgctcctacccagagcgaactgtactatgacagagaactgatcactgaccgaaatcccagcccattttccggatcaagttccgcccaaagaccacatcaacagacattctacggacggagcccggaactcaaggaagtgggcaacaatagcaacgaactgacccatacggagcacaaactgtacctacaggactacgactatgccagcagaacgctttctaatctgaccacggacgagagtcaccaaactgatgacgacaccgattacgtatacgacgaagacatagccagcaatgacctggataagacgaagacccgaaaggagacggacctcaacgaattgaccacaaaaaagttcgaccaggacggctacatgcgaccacaacttatgcgagacgcgacccacaactcgaccggatacaacgtgacctcactggacgacaactacgtaatgcccatgctggagaacaggacgcggacgaactatgtgaccgaggtgcccaagcccatgctgtccacctccagccggagtgtgacgaacagcaaggtgaccgtctttccggacagcctagggaaacagttggccaacgacatccttgcggacgaggcgacggacgactacgtggacgcgaatgggcatacagaagcgcgactaaaggcccagaaactaaagcaactggccagtgtggcgttcgcaccaattaccgtactgaccaaaccggacagaccggacaactgggtgatctacaacaaggccagcgaggagccaccactgccacaaccgccagcagtcaacatggatgtggcgcccagcggagaggtgcccactccgatcaagaacttcaacaatgcgtggctaaagcaggatctaaaggctcggccggagacaccacctaccagattggcggaagaggtgaccacggtggcggcagcggacagtatctagaaatgccaaattagccctagattgattatttatttatttatacttcaaaggcaagaattcaatccaactat

SEQ ID NO: 15075 - protein, 1439 aa, DROSOPHILA
MPASERYRTHDGTCNNKRRPRWGAAQMPFNRFLPPEYGDGVDTVRSSADGSTLSSSRFVSLLVHGAREGEAPLTLMIAQWGQMLDHDMTSTAQPRSINGSIPSCCGGKDFHPACFPIKVPLDDPWLAPLKVRCLEFLRSAPAQRRDCVLSWREQTNQVTSYIDASPIYSNSAKSSDNARVFRHGLLVYGRGDPAEDVCQRGAIATKCIRSGDGRSGEQPGLLAMHHVWVGEHNRIAMELSELNPHWSDEKVYQETRRIVGAMFQHITFREFLPVILGREVVKLFDLELMPSGYYERYSSKVNPTVANAFAAAAFRFGHSLVQNSYTRCDRHHNVINNNVSLHEEFQRGDIGSAGSLHRLLRGLASQRALKRDEFITPELTNHLFQTPGFPFGLDLAAINIQRGRDHGIAPYSAWRVPCGLSPILSWDDFANVVGPESAKRIGHAYRSVHDIDLFVGGIAERPVVGGLVGPTFACIIAQQFSNSRRGDRFWYENGGFESSFTPAQLHSLRRVSLAQVLCRTVGGGTLQPHIFIPAEFEDNERQTCGVGSLSPIDLSPWLEQDPFHNQQVPEQVFTIGQPELGSVQIIKEDKAGFSNRVKPIKPQVEVSPSSLSGFHRPTNENLTKVSDKLDLRRKTVTKKNNTNNRQQTTRKPVGGVNNKLDKSPKITLNIKSVNVRRPEGSGLKRRVIINNVPVELRSSGGNATAEETEPGNLTDEDDEFHDDAGEVVDMEDIVEVRASKDDPSKLTKTDLNQNRNDSKTTETEQTEKNTTIEPTEDSTDEPKTERRDARKMEPHPAAKTPDKTADSRLLHNQRNRTTTPRDFQASSTVSLKRFTRQTKAPKVSKPTKRAEELRQYQNRPLYERPQKVVVNGPNADQYEIEINIRQTNKNPASRPSTSDYAQYTTANKPYYNSNYAPHYMDYASTTPIPLPSYGYHQPIGEISNQGVRTKPPTIIYLNDNDDRRTTTRAPNIFQNFLTFATNSFNPLGIRRPMPTTPSPISQSHKEPGQFENNVVHSPISNSHILTGGGPSASYSPRPPSVHSYPVATSSQIGGNPGSGFLHASSSAVSAGHFGSISGVATANGADSTFSFNIRPRPSPDLGSVVSSYPRPVSSQGGGSSYRPDYAPTQSELYYDRELITDRNPSPFSGSSSAQRPHQQTFYGRSPELKEVGNNSNELTHTEHKLYLQDYDYASRTLSNLTTDESHQTDDDTDYVYDEDIASNDLDKTKTRKETDLNELTTKKFDQDGYMRPQLMRDATHNSTGYNVTSLDDNYVMPMLENRTRTNYVTEVPKPMLSTSSRSVTNSKVTVFPDSLGKQLANDILADEATDDYVDANGHTEARLKAQKLKQLASVAFAPITVLTKPDRPDNWVIYNKASEEPPLPQPPAVNMDVAPSGEVPTPIKNFNNAWLKQDLKARPETPPTRLAEEVTTVAAADSI

SEQ ID NO: 15076 - DNA, 4289 bp, DROSOPHILA
agctgtaaagtactactactacatatgtgtacattcaagtttcgcttacgaatgcaacgttccattaaagaagccaccaactttaagatacacgcatataacaactcctgagaattgtgaaaactgatctactttgatgatcaactttcattgctgctgattgaataattgagtaatgagtaattggtatgctgataaacaggaaaaccaaaatgtcaacagttgataaggaacattaaaacacaaattaagaggacggtaagtccttcactcggaccttttcagctgagcaccgtaaagtgctgaagggattgcccccacacccagaccgcgcccacttccacttccactttaaaataatcatcatggccctcttttttggccaggctgcggtggctttgggccttaattgtcgactcagttgctgtgctgtgctgtgtactcgacaaggcgacgaaccgagagccttgcagctccataatgacaggcggatggactcgaacactcggacccggacccggacccgaacccggacccagtccacagccaggacataagcggcttgtgctccactcaactgtcgcctttcggagctgctcctagcttgcaattaaaatacccacttgggccctataaattgtgaacgtaggaaggcaggcggaaaaaaaaaaaaatattccagcactttggtgtatggagtggggtccacttaattcccaggtactcacccaaaaggattccaactataaagacatacagcgagagtgcttaagttttactctgtttatttgcagcaaccttaggaagttcaattgaaacaccaatagactagcgtctgagttattttacgagtacgatcataatcacaagtaggtaaaaaaaatccatattcgccttacttaaaacaaaaaaaaaaaccacacgcagatcgcttatcatacatatttacaccgcatctcgttgatcctgaatgggtccttggaggcgaatcctctacagcttagagctgaggactgttgacggcggcggcggcactattggtggtcaccaccgcattgagaaactcgtggcgtgagcgactccgccaggtgcccatacccatggctaggccgggattgagactaatgttggtgttggcactcgcataggcgcccgggcctgcgcccgcctggctggcggagagtcctccaccagcagcaccaccgacgcctccgctggcacctgctccacgacgccagggcagacccttgaaggtgtcgacaaaggcgcgccggaagctggcgttcatgaagcagtaggtgatcggattgcagcagctggatgagtaggccagcagctggaggaaactgatggccgtgtagtcgacatactcgtacaccaccggtccgatcagcatgaccatcgtgttgatcacgtacagcggagtccagcagatgaaaaactccagcaccaggacgaacagcatcttgaccacacgcttcttgctctccagggtcttggcctcgttggacctggatagtggattgtggattgtggagaaatgggaatagggaataggattggcagaccggttatcggacacgaatcctacctgcgaagtgccgcatcgtggacgcgaatgctgggcgaggaggtcttggccagcgtcaccgtggtcgtcgtggtggtggtgatcacagttggagccgttggtctcgttgtcaaggtggtcgttgccatattggttgatcctccgcctgcggatccctctgaatttccattattattgttactattttctatgtgaaaaaaaaaaaacatgtgaacacaagccaaatataatcaaacaaattaacgttattagcagcaacaaataaaacagttgccataactaatctaaactaatacatagacgtaaaataattaaattttcaatttggttttaagagtctcaaaaataatatagcatattatgttaagtggatttgtaccttcttatcgagcatttcaccaacaatctatatctttaaagtattatgccatattacatgtcatgtaacattaaataacttatgagttatgatatttagatgcaaaataatacttgaatgcattcataaatgctcttaaagttgtttgcatattcatggcttttaaggattgaaaaaggattagtttcgtgcagttaccaaccattatagactgcggtggcggtcaggaccaggatgcagttactactgctgctggtgcccggattcggtgcgcttccgccggccgttgtagcggaaacaggcagcgattgctgcaggatgcgtccgctgtccttggccatgcctacgtacagggtacgcgtgatgaggatgtaggccacgcagaggacgagaagcggcaggacgagcagcaggaagtccagcaggatgttgtagaagagctcgtatccctggtcgggccaaaactcacggcacttgcagtagcctgtaacgtaagttggtataacaaccagacggtgtctgctggccaggttgctatgcactcacccggtcgactggtgggtatcaattgactaaagaccgctatgggcgtcatgcagaggatgccgcccagccagatgaagccgatgatcttgtaggcgtgactgattgtctgccaggatcgcgagcgcagtggatggcatatcgcgtagtagcgctcacaggatatggccaccaaggtccaggacgaaacggccacggaggcggctgaaataaataaatgaaagcggattaacttacaacaaaccgaacacaatggacacacccagcagctcctgtcgagcgccgtgtcaaatcgctttcattagaaggtccttcgcccgcgttcgttgcattttaattacacaatttgcatattgggaccagacgaaccgtaccaaccagacggacggagacatcgctcttcgcacttctgcctgttcttgtagtatgacaaacacgatgcacgatgcaatttgcagaaagtgcaattaagcaattccccagccactccttttcttgttgcccggtctccttttcatgtaagcctgttagatgatttcccattgtaaagcaatttgtacccacaccctgcccatccctcatattcttttgggctaccactatcgatggggctacacaagtgcaagtcaatagggtggactgctgtaggtgaaaaactcgacaccgaaagaaaaagacccgattcgaaaaattggtcaattttagcgcaattaaatgagaaataatttctagtttttcaatcgattgttttatagcaccaaatcatatatcttaaccgtaaaggcatcaaataaatatgataaactgatcaaatgaaagcataatttgcttgtatgtatgcgtgtttttggaatttatagcttaccaaaacacttgtgaaatttgcaaatatacatatttgttcatacacaatttagacttcaatgcaataagctgtaaggtctatggtttcaattattaatactcggaaattgttgtgctagcagatacatttgtggtttgttagatatacatatttgcttataaagatatatatgtatgtacgtattgcattcaaaagcaataagcagtaaggtaaattggatcaagggacgagtatttaagacagcctgtatatgttccctttactttaatgcgacacctcattcaggcaattaaggtccaccctaatgtgcttatcccttcagccatctgcagctgcattgtattatattggaatggtattttctcgcaaaatgatatgcaagttttagattgatacgtacaattgcagtgattactactttagttacgaatgatgataggtgatgtagtagatatatatttgctaccaaagatagttacaccttagaatcctaaaagaaataagtgttttgtagtcgcagttcgtttctctagttcaacacatccagccaaccaaggtccaccctaatgtgactgcacttcagctgcactgtattatattacattttagctgcacaattgtttactttctattttaattatgcatgcaaactaatatgagcagtaaagatggattacctccacctgttccgttggagtgcatcccgtccaggcaaccaaggtccaccctaatggggtagcccttgcccttccaactgcattgtcacattggtctcgccctctgtcgcgtttgttgagttaaacccctgaaattgaagtttacttttgattgacggcggtgtgtgatgctctaagccagaaatgctagcatgtgtgcgcttaaacttaaaacaaacagcagcatggcatttc

SEQ ID NO: 15077 - DNA, 1248 bp, DROSOPHILA
atgcactccaacggaacaggtggagccgcctccgtggccgtttcgtcctggaccttggtggccatatcctgtgagcgctactacgcgatatgccatccactgcgctcgcgatcctggcagacaatcagtcacgcctacaagatcatcggcttcatctggctgggcggcatcctctgcatgacgcccatagcggtctttagtcaattgatacccaccagtcgaccgggctactgcaagtgccgtgagttttggcccgaccagggatacgagctcttctacaacatcctgctggacttcctgctgctcgtcctgccgcttctcgtcctctgcgtggcctacatcctcatcacgcgtaccctgtacgtaggcatggccaaggacagcggacgcatcctgcagcaatcgctgcctgtttccgctacaacggccggcggaagcgcaccgaatccgggcaccagcagcagtagtaactgcatcctggtcctgaccgccaccgcagtctataatggttggcggaggatcaaccaatatggcaacgaccaccttgacaacgagaccaacggctccaactgtgatcaccaccaccacgacgaccacggtgacgctggccaagacctcctcgcccagcattcgcgtccacgatgcggcacttcgcaggtaggattcgtgtccgataaccggtctgccaatcctattccctattcccatttctccacaatccacaatccactatccaggtccaacgaggccaagaccctggagagcaagaagcgtgtggtcaagatgctgttcgtcctggtgctggagtttttcatctgctggactccgctgtacgtgatcaacacgatggtcatgctgatcggaccggtggtgtacgagtatgtcgactacacggccatcagtttcctccagctgctggcctactcatccagctgctgcaatccgatcacctactgcttcatgaacgccagcttccggcgcgcctttgtcgacaccttcaagggtctgccctggcgtcgtggagcaggtgccagcggaggcgtcggtggtgctgctggtggaggactctccgccagccaggcgggcgcaggcccgggcgcctatgcgagtgccaacaccaacattagtctcaatcccggcctagccatgggtatgggcacctggcggagtcgctcacgccacgagtttctcaatgcggtggtgaccaccaatagtgccgccgccgccgtcaacagtcctcagctctaa

SEQ ID NO: 15078 - protein, 415 aa, DROSOPHILA
MHSNGTGGAASVAVSSWTLVAISCERYYAICHPLRSRSWQTISHAYKIIGFIWLGGILCMTPIAVFSQLIPTSRPGYCKCREFWPDQGYELFYNILLDFLLLVLPLLVLCVAYILITRTLYVGMAKDSGRILQQSLPVSATTAGGSAPNPGTSSSSNCILVLTATAVYNGWRRINQYGNDHLDNETNGSNCDHHHHDDHGDAGQDLLAQHSRPRCGTSQVGFVSDNRSANPIPYSHFSTIHNPLSRSNEAKTLESKKRVVKMLFVLVLEFFICWTPLYVINTMVMLIGPVVYEYVDYTAISFLQLLAYSSSCCNPITYCFMNASFRRAFVDTFKGLPWRRGAGASGGVGGAAGGGLSASQAGAGPGAYASANTNISLNPGLAMGMGTWRSRSRHEFLNAVVTTNSAAAAVNSPQL

SEQ ID NO: 15079 - DNA, 2700 bp, DROSOPHILA
ttcgatccgaaaaacaagaaaaagagatgtgccaaagggaaagccaatgaaaagaagaaaaaacgtgttggtactgataaagcaaacgaagctttgaagcagaaagaaactaatgaagataaaaaagaagaggaagttaatttgtgctccctgggaaatgctaaatttggaggaactggacaaatgccggagtaccagcactttaaggcaaaagttcaaaagaaggataatgctttgtctagctttcttggaatgtacgggtcagatagtgacgaagaaagtgaagctgagagtgatgatcagaatacagcagactgcagtaaacaaatcccagcacaagtagagagctcccaaagtatgccatctgaaatcacagaaatgggtccagcccttgaggcttcaaatacacctaactctgttgataatactcaaacttgtgaagactttacacctatgttggaaatgacatcatcagaccaagtgccgcgagaaataagcaacattagtcaaataactacatctaactcagagcctgccaaggaagatggctcctccgacgaaggaccggatgaagagcccttccagcgagtgaccgaaactataacagcgtcagatccagtcaaaccacctcctgaaccaatggaaccgaagccacaaactgcacccaaaagagcagctccaaagcgaatttatggcttgaactacaagagagcgcgcaagcaaaccccgaacactatgttgtcgaaactattagaatccgatatacgccatgaaagaaatgtcctgctgcagtgcgtgcgacatgtttgcgagagaaatttctttggcattggtcaagctaaaccaaatcaagaaacgttggttaccacttgtgataaaaccgttgattcaacaccggatgcattataactttagcttctaagttaggcaaataaagtacaaatagtagtatgcaaatgtatttcttaaaaagagtgtcacttatgtttcgattaacgcaattggttgacaaaatgtgccttttcggaatgcactctaaaaaatttaaaacccttacccttaaagatagcgcaagattagttggttgacattgaggagtctccgcccatgggatgatctccgctgccggcatttcctcctccggtttgttgttgctgctgttgtgccgcctgttgcatctgttgttgttgctgctgctgctgttgttgttgctgctgctgttgctgggcggcggcatgttcctgctgacgcttcaactgctgacgagctgcatgtgagtgtttggccttagtttcctcaagttcacgcactctggacctagcgtgctgaatgcgatgccaagccatttggagcactttggcggatgcatagccggaaccctcgtgtggctgacccgtggacacctgggtcaagtagttgatctgctcggacagcttcgattccacgctggacagactcttgagaaactgctgcgactgggtctccgcatttttctgggaagacttttccttgcccaactcctgcaaggcttgtcctggaaagatcacacatgttaaccactttttaatgataagcaagttccgtcccacctgcactttgcatgcacaggattatctccttttcgatctcatctagagcgtgtattttgtccagaggattcattgcttttcacgttctgcatataaacaaaacaaagtcgaccagataacagtgtgaccagaacacgagagggaggcctttaaaaatataaatataccaaaaagttgtagtgtctgcaaaatactatggatttcaagatatcattcgaaaatatttttagaaaaagaataatcatccaaaaagaatcacatttcaaagaacattttacgcatttgaattaatttattaagttctatctcgaattatgatctaaaagtactttaaattcgcttgcttgccaatccgacccattcatatttgaagtactcctttggcagaggcaggcaattctcgtgcaactcgatggcgtccttgtccatgtgccacaccataaagttcctgccacaggcgatttgtttgtggagcgccaggtgcacccggtccacaaagtgggattgacactggcggcactcgaacactcgatcgtgggtatccacgcgcaggaactttcttatgtttcggatctcaagtaagccccgaaagtcaccaactacgtccgtttgaatgatgaaggtgggtgtgttttcgacatcatcgcctcggagcaaatatggtactgcaaataattccttggaagtgctgcagacccgaaaagtgtacaggtttatttttagagttgccggaatgtgttgattttggtccttttggtttatataagtttcagaaagttgtgctaaatcggaggaatgcttattacttccatttccaatgacttctgttgcgttttttactcggtactgcaaaggaagtttaagagaattgctcttaggcgagacgcaaaatctcttgaccgtcaccttcatccttctgatgacacacgcctccagtggaaccttctgatggagcagcacgtagttgctgatcttctccagcagcatggagaatatcatgtccaccgcctcaccaatatcgaaatggttttcgatatttaacggactgctttcgtagtacattcgctcctttttcacatccacgtaaaatccaactgtggtctccaatttt

SEQ ID NO: 15080 - DNA, 645 bp, DROSOPHILA
tcgactttgttttgtttatatgcagaacgtgaaaagcaatgaatcctctggacaaaatacacgctctagatgagatcgaaaaggagataatcctgtgcatgcaaagtgcaggacaagccttgcaggagttgggcaaggaaaagtcttcccagaaaaatgcggagacccagtcgcagcagtttctcaagagtctgtccagcgtggaatcgaagctgtccgagcagatcaactacttgacccaggtgtccacgggtcagccacacgagggttccggctatgcatccgccaaagtgctccaaatggcttggcatcgcattcagcacgctaggtccagagtgcgtgaacttgaggaaactaaggccaaacactcacatgcagctcgtcagcagttgaagcgtcagcaggaacatgccgccgcccagcaacagcagcagcaacaacaacagcagcagcagcaacaacaacagatgcaacaggcggcacaacagcagcaacaacaaaccggaggaggaaatgccggcagcggagatcatcccatgggcggagactcctcaatgtcaaccaactaatcttgcgctatctttaagggtaagggttttaaattttttagagtgcattccgaaaaggcacattttgtcaaccaat

SEQ ID NO: 15081 - protein, 176 aa, DROSOPHILA
MNPLDKIHALDEIEKEIILCMQSAGQALQELGKEKSSQKNAETQSQQFLKSLSSVESKLSEQINYLTQVSTGQPHEGSGYASAKVLQMAWHRIQHARSRVRELEETKAKHSHAARQQLKRQQEHAAAQQQQQQQQQQQQQQQQMQQAAQQQQQQTGGGNAGSGDHPMGGDSSMSTN

SEQ ID NO: 15082 - DNA, 12776 bp, DROSOPHILA
ctacaattttaaggacctgttgctttacataagtatgtatataaaggttaattggggaaggctttattaattgaactccagtttcattcctttctatatacacagcatgctcagaacagaaatacatttacacatacatttaatctcaaacctcttatcaaaatgtggaagtgtgtgggtgcctattgtaaatcaatgctcaaaagatgaatctatcttatgtagcataaacgcgtaagttactacaaattgagctataggttgtaaattagtgaaatcggtctgccaacttagaatttccctaacggctgttgggtgttagagatgcttgttattatcccgtcggtcatcaaatggaaaacgacgttccagtggagcatctgttccagggccaaaccaaagatggggcaatagaagcccagggcgtagatcaaagccttttggcgcgtctctgtcgccatgttgaaaatcgcgttgagctgcagcatcacgttcatcagaaaatgaatgcagcacactagcatccagggaagcatagccaggaaaatcttcgctgaattctgcttccgccaacgcggcgacgtcaccaggctgtgcattaacgccatggcggtcagcacgagtgaaacggccgcgtagagcataacttccaaatagcggtcttttgcggtgctttggtattttttgtccacgtccaagtcaagcgtggccaaaggagccaccatgattgtagtcagaagcgacgttccgtagagcagctgcatcacgacgtcgatactcatgttgggcaaggctttacggtaaacttgattggatatttgacttaaggattgggtaaaattcagaggccgatgaaagctagcgaaatttggtaagtgtccatctcgttgggcagatgttttgaaacttttcctttcgcctactttggtatttagcaattttaatttttttttttttaattctgaataaaagacattgcaactaccatttttaatattttaagcctttaatgggagaaactttctttgcgtttatacaaaatttaattacactttttagcttttcttgccttggcattttgttgttgatgtatttttaactagattttattagaaggtttcattaaatatacaatagggaggaaacggaaatagacaaacgttagctgaactcttagaggtaataatcgagtcgattttccgggaatcgaatcgtaatcaatatcctagagcgagtgtcgtttaaaggtaatcctaagcctaaaggaggaagcatttgatatgttgtaaaaatgtttaaatatatattaatgtttacatatcatattgagcttatcttatatatatgcgtttttatgtgttggtaaaattacaattgatttaaataattaataacaattggttgggcgggggtttagattaagccgtgtttccgttttgattcgctctctatttagcgcatttgttcggtttcctattccttggcactctatgcaagtcttactttatcattaactttaattaagattagccttacaatttgttacttttcgttttaattcattgcgtcttgagtatttttcctataatttcattgggtctcagagtgtgtttcataatttacatacttaagaattatttaacaacattgaatgtttcctttaacgctttagtttggcctaagtctagtctaacttttacggattgctgacagggaatgttcattatagggtctggaggaggaaattatcaaaaaatttgatttacccattaggttctcaaattatgattccattaaaatcttttagtggttttcaaaacatccttcagtcccctaagacatggcccctctatcccggattaccctttctggcgctaaaaaacatcctggccaccttgcccagcgcacccacaaagtcccatcgctcgctcgcctggcttgcactggatcccgctgatccgtcttgatgatggtggtggtggtggtggtggtggtactggtcctgacaggatggcgggacctgcccctggtcgtctaccacctaggagggcgtggagtaccagccgctggccgggctgcccttgtggtaaaggtggaaactcgaatgcggagcgaagtactgcggctggtcgagattactgtaggtaactccaccctcggtggttgtgctgcccgaaggatgcattgttgctgtataggatgcctggggcttcagaggcagcgtggcgggcaccacgtctccggatgaagtggcgtactgccctcggagtggatcgggggcatagtcgtatcccccgttggaggccaggactggagccgccttacccggttgattcgagtccctgggagacactgaactgggcggggtcatggcgttgtgatagtcaatggagctgtgatagccgccgtaggttgacaccagattggtgaaggcatcagcggaggtcttctggccgccaggatgtccaccggaagcggcagagtgcagctgcaggtattggttctcgtaggacgactcactgcccggcggagtgggcagcggacctgtttgctgatcgccgtagaaaactccggggcccactccagttggtgtttgcctagccgtcgcccggatcacgctctcccggttggcgtataactgccggagaagggcggtagctggcatgggcgccggtggctgttggtagggagtgcctatccattgaatggtgctgcttttctcgttgggatccagctgctgttgttgttgctgctgcttaagcagagagtcggcactgaaatccgtattgggcggggccacggacaccaccgccgctggcgagggcagatgcttggacatggcctgctccagatccttgaccgcggagtcggccgcggacgagggctgctcatccacaatcgagggtaagcggctgcggggctgctgatcgcgttgctccattgtcggtagtttgggcagaggctgctcggagattacctgctcttgaccctggtcctccgcgtgctgcgacgctttggtttttcgctttcgcttggtggactgcactggtggagtggctgccggcactggagtggccactgtggtgggcagcactcccgaatcgatctccacacccagcggagtggggctatccttgatcatggtgaggctgttcattgaacttccatgcgaggcggctgcactgcgacccctgccgcggtgggaatggccctctgaatcggttttcggtgagttaagcttcatgtctccggcactcaggtgagagttgccttcgccactggcatctcctcctggcgacccgctgcttttgtcgttacccagtccctcctcgtgcttaatgctatccggactgggttccagttggcagcaatccagtatcatgttctcgttctcccggttgctgatggtgaaagaggtttttagtggattttaccttcgtaattgcttatcctacaacccacctgatcacatagttcacgcagatgatgttctgctcatcggcgttctttgtgctgcagacgacagtggcacaggtctggagccaagtgtagcctccactcttgttcattagtcggtagtatccggtcaacacctgacccttctcgatcactaaagatgaagataagaagaattgtcattcgcttgtcagtatcagattttaatatatactaatctgatagggttaggtcaaactacctagccttaaagaggttagttttttttttagataaaaacttattttacgtatgtgatgtcttaaatacttacggtctgagtggctcttgcgcaggcgattggcatcctcggcgtgacacagtgagtacaagctcttgttaaccaggtcctccggggaatagtccagcagatcggatacccttggttggaaagttgtcccattagcattgaaccgataagtgggttagtgcagagtagcttaccttggctcgcagtgggctactcgcaggtcaaagttcaccctggtgacgaacatgtcgcactccagccggatctcgtgcaccgatggcggaggcagtgcgatggccagggcaaccattccgaggagtggaggctgcgatttgcgactgtgggaaaatgtgtactggggacgcagcttgcacaacagcagaaccacctgcaaaggttccaagtgaagccaggacctggttagttgaggatgcttattttggagcaagtgctccattcaagtgtttaaaaactgtgtattcgatggggttggaaggaaacatgaaactggattccagagatcataatgctttaaagtcttctttttaaatgcctcactcttaatgaaaacttattgataataaacagttattccgtgtagtattatgatatttatgataaacaaaactgaagaatgttgtacagcatgtgatgaattctccgatggtgaaacgatcgattggttctttaattggtggatgattgaagcagctccgcactagttattcgatactgatcaatctaaaatcagtcagtggctttgcctttgtttttttctctttagcaaacacaaaaattatggccgaaatagtaagaagaacttaaaaagcgaattcctcagtaaagaattttgagtaggtttttgattttgccttgcattttagcatacaaacgtactgatttcaattgatacgtaccgaatagtttgagcccggattcttaacgtttttagcattgttactagcattgttaccgttgttgcaattgctcgttgcatcgctggcctgtagataagcagtggatgggatggtaatacgtaatacaaaatgcggtattgcaggttacacaacacaaccgaaaactttttctgtgggttagtcttactgttactcggaagtcttacattagaaataactcctagggccaacgaaaaaattaattaaaaccaaaaacaaaacacaatttataatcccaaaactattcggttagaaatgtgactacaagagcgaacacaaataaaaagagcaacacacaaataaagaaaaaacaaaggaaggatagtttctctcaaggataggaggaacacagagtggaaactcacccgatagcctgaggatttgaagtgacagccgcgcttggtcagcgtggacttcatacggacacagaagcttcgatcgtatcccttgtagccgctggtcgaagcttgggtcatggaggccgcaactataggagtaaaaaggttttgggattaaattgtgtattcacttgtgacgctttcttcatcagcagaccctatcatttcttggcatgtcattgaaatcgttacatccattcggatcccaccctgcaccagggattcattcccccacctggtccttcggcaactcggacttgactcaccgtcgggattgttcgtaccgtgtgtgccgcttccatcgtcggaggctccggaagtgggtgaggccataccacctcccgctccgcctcctcctccgccgctgctcgagcttccaccgccaccgccgccgccgcttgttaggctcaggcccagctggtcggcgatctccgagtgatccgcctggtggatatagtcgaagatgctgctacccgtcatctccacctgcgacaggcccaaatagatggacaccgtctcggaaatatacaggaagcgtccgtctgccgccacagctagggcgaaaccatccagcgactgcagaaaatgaattcatagggataatattttatttaacgggtattaagtgaaagaagattactttataatgaaacaaaaccgaaatgtggcggatagttttctcctataccaggtcttaatatcgaaaagccatgtttttttcggtgtaaatttaattcatatgcacaagatggctgcgggctatcgcgcctactgccgtctctttcgctaccatatcttacctgtaatatgtgggtgccctgatgttgctcgaacaaatcaacagcggggctgcgacgaatggcggcacctgcgaagaaagaatggggggaaaaacggagtgtcagtggctagaaagtatgcaaatgcgtttctttgaatataatatttgttatttgagaatagtttataataaatagtaatataatgccatgacggatcgcatgtgtttcgggaccccctgcgatatgtttcttttctggctcttgagccaactcataaacgatgcacccctgccccacagaaaagacaagaacaacaaccgcagggcatcataaatatgggttcggccattcaatattttctcagctgagtccctgcgaagcttatttatttaattcaattatagaattttacgattatggacgacccaccgaccggccaagtcataattcgcacaagtgcaaatcgccctttattcctgcccctcaaatccccagcgatttcgagtactggacgcgctaagttggcaaacagtttccgcttccgctcggacattgccatatgtggctgaaggcgtgccttaatgaccttcgagcaccacccacccgagaagcaagaactccgaccgccgaaaatattccctctaccattttttgcggctgtgggtcaaattgaagtgctttttattgccccgcagcttgttgctcctcatactcccagcacatagtatacagctccttccccggtttctctactactttctgggtttagtttcgcataataatccaattgattggatgaaggcgttgcggccactccacagccttccatacataacgccccattgattttggattattttttagtgccttgactacctttttggcttctcgatggccccttgccttttggctttgctttttccactctgccactttgccagttgtctgggcacacagaaagaatataattcagccatttaatatgatatgatggtttaattgatgtcattcaatagggatatagccatttgaaatggccttaagcattattacatattttgattcatacatacgactataatttaaagctttgaaatatttaaaacccatacaattttctgtaagtgcactcgaccgttgccagttggcagcttttgaatactgtctgaactgagacctggcaaagaagtcgtgggctgtcgtcgtggaatgcctttttcacttgacgtgacaatgcattgtcaacgtcgccggagcatgacgtggctcactgaggaatggcttggtggataggtatggatggatatagcaaggtagatatagtggcttggaactgccgacaataactctgctgctcagaagttgagaaattcccccttgagtgctagtactgctatcagtgttaagctttaatgcgaggctaagtgtcgacggactcggaaatttaagtgaatatatttagtaaataaagatgagttgcacacttagatgttgaaattcgaaaaaagatattccgccgatgtttaaaatggcttatagcaattgattcattacttcggtcactttcagtaaccgatcgcagagaaatttccgcttgatcatttgcatttgacgcaagacatccgccatattgtcggccatttgcgatcgttattggccagaaagagatggaggaagcggcaattaaaaccgaaagcaggaaactcatttgcccacatttcgtgaggagcgggcagcatggtttgccttcagtgaaatcaaaactgttcgttttttgccgggttggttgtctatgactgaaattatgcttggtaggcacctaaaaaaattcaacttgccaatagcttggctccgaaataaagcaaatgtattcgttgactttgtcgttttgggcttttgccggatttgcataaaatatcgttattaggcgcagtttatttttatttgctgcgcatgcgcgaccattttggtctccattccctgggcaaaggcaaggggtaaccggcgtgtgtcattgtgacagtttgtggaatttcagaaggccccattaaagtgattgattggctttcaatggcatcgatatggaaatgactgttcttgaaattatgttgaatcatcgaatcattgattgaggtatggagaatagagtcccctaagaacagtcttattgatgcttagcttaaatctcgtgactttatttggtttatagattatttgttttagatttgtgttacttactttttagcttactgctgctagaggcttcccgagtccatggcggatcgccgtgtccggagaaatccctcagcttcaggtagctgatggtcagtcttatgatcgaggccttgtccagctggctggtgatggctgccggcagagggagcatcttggctagctcgtagaactcgtagttctcctttccgcgccgcgatctcgccgcgtccctcgacttctccttgcgcagctccaggatgctgcaaagtcaacgaaaaaggtgcacccgtgagatatttactcaatagtaaaggaaaaggcaaatcaatcagtaaacataagtagacactgacgaacgactagaggatcggtccacaagacgactctgcacacctttcgcacctgtcagcaccgcgtcttcggccatttgtttggccaacccatggctttgtgatggaatggtgtcaggccaaactaattgcccgacatttgtcagcctttcagcgagcaaaggtttgggttcaggttgggacttcgaataggacaatagtttgccggacagtttgtatctggataaatggcagcccatttgttgcaagatttcccaaagccccagcgttaggagttttcccagagagtcttcgtggcattcttgatattttcattactatttccccgcacatcttcgaatctctgtgaaaacgccgactgcgtacgatcccatctcagttttcttacttcccctaaatgcaacttttcattcactaaacttgcagcgaaatctctataaagactgccgccgtttgtcgttcggggcttgtggatacggatctgctcaaccttctgcggttccgctatctgcaggcggccatctctctgagcatcttcgtcagaaaacttggctacaggccttcataatttaagtttgttgacaactgctttgttgttgctcttaatgttggcagtgctgttttgacctgcagtgaaatcattgtgcgctctacacagcttgagcacagcatatcacctttctaggggcactttataaattaacaatcataagtttttacattgtataacactgattgtgggatgtattattgcaatgaaaataaatatttgaatagtttcggtaaacagttttcagatgtaaaagataattcatttgcagtttttcttgaattgcgattacataatgacggccgaaggactttcccgctgagtcctgaccatatctcaaggaaattctcataaagggccacaggactgataaagcaataacggtacctagggccatttataccttcacaaaggccccgggccacacttcttatcctttatccttctgttctgttctgttctgttgttcgaaccccaggaaaaagaaaggttgacaaggaaactggatgactttccccgccctttctgaccgcagtaagccgcttacactcttcggatcccgtaattcccgcattaagccgctaatcgaattgcatctggactgtataaaaatattggcacaacaaggtcaatcaagtgaaaaaaagtgctctaaaggattcttctgcggattgagagaaaaaaaatcaggaaaaaaaaagaaagcatgtccagttaagatatatagtttcttgagaaactaatacttaaggaacgaagttaaaaatcatccttggcgagactgcaattgcctcgatttgccaatttttgctaatgacaggcgattttttcgcatgttagacagtggcgaatttcgagtgaaattaaatccagaccgcacatcatttgtcaaggcaacacctccggatcccgactgcacatcatcacccctcagtggctcatttaaatggcatttcgatattgacgaggccaagattaatgtttttttctggcccaaaattgaattttcatccgctctggaaggcgaaaactgttccgcgttcagtttctggtcccctcgtcgtatgggttttttgaaccagacgattttattagaaaaacatagacggcatgtaccgcaggtacagacatctcactaaacgtaatttcatcacaactaattaaaatcgttgttgttgatgtgcgctgtccgtttttcttggatgcttaagtttaaacaaaaagcaagtggctgaggggaaaactggcttggcccgtggcaaactgacagtctgggtttctttttaattatcaaaaatatttttatggccaagacgacgacgctttcggctgagatacgaatctccaagtcggtgccgaagacgggactccgagattcagattcgggtttaaaccacagccgacgtttgcttgtcttttgagagccagaagccgcgcgcggctcaaataaagctacaaaaacgaagcttcaagcctgtgatgagcgcattaaaataaatttaagagccctcaaaatgtttgctgttgaggcaaagttttctgtttgggctagcacggatttgcgagtgacctacgataaacagaattagttaatcctatcattgtatcattgtttattcctctctagagtcactattgacataccgaatattgatttttgaaatgaaaactgagggaactcaactttcaagacaactttgtcaattgccgtatataaacatccccaattgtggaactaaatagtaattattttgaaagtggttaaagtttccaacacattgcgcattatgcatatgtaaaaaaaattgtgcagaactgcgggtcttcctttcttgtttttactccaaaacttgagtgtcttcgccagtttatggactactaacccgggctcgaggggctgttgctgggcgtgcattccggcacctggcggctgctggtgtccggtcattttgttgtagggtggcatggcgcaaaggtcctgcgtgggcaccatccagctgtgggtgaagggcaccgcgggcatgcccagagatcccatggtggccatgtggcttccgggatgtccgggcgtgggctgtctctggtatccggcgtagtccatggccacggctgcctggtacggcaacatagcaatgctgggggctaagcctttttttcttattggaagcctgatgatctcaggaagttttcaactactttctggcactctatcacttgttattgcacttggcttggggcacggattcgagggggcgtggcattcgatttgaaggccgcatacttttgttttccgcgtcacataaacgtaatcacacacgcacgtgtggtacgtgtctttagttatcctgcaatcctgccagcgatgtacgggtcacgcaatacggatcgggatcggcaaactagccgtcaatcgattggcattcaaatgaggcgcgttcgcgtccagttaatttatctccgacacttggcacgtctccgggttactggttacggttaacgggctatggctacgggctacgttcgtcgccctgcgttctgcggaatgagacctgccaattacggacacgcactgacttcccttcgtaaaggggggtgagcgaaagagatggccctacggatatacggacacacttgcacggccgggctgcgtacgtgaaactgcagctgatgacgctgacaacggaatacggaatacgatgtacggagtacgcctacggagtattgtgagcacgagtacggagtacggtgcacggagtacggtatgcggtacgtccgtcgctgacgacgagtacgtgcagaataatccagagtcacgttcacgtcaccgaacaaaaccaaagcagggcaaaaaggcagagagagaagcccaacaacaatcagtcggtggcagagcgcgcgcaagagcgagacagggatggcccgcgagcgagagggcacacccgaaatttgggggtgactctgtaagcaaaaagcgaagcaacggcgccaagtgctagcaggcattagggtaactcaaaaacaaggataactgctttttacacttttcggtgtacattttagtggaaacgtactaagatattatactatttaatgtttttataaatttatagctaataaatatgatttcgctaatgactatataaacgagcccaataaaggacaactaatcgtcctcataagcgaatggtttttagtttatacatttatatatcttttaaactaaaaagttttatatttggatttctaaaaacggtggggcgctcaacaattatattgagccaccttaatgctccagtgtgtgtttgtgtgcgggtgcctttgtagctgtgtgggtgagcagcacctgaccgccggcagagtcatgtgcgagcagcgccagtagcattttaagcagcctcacgctttctgcacacacacactccttccgcgcacatacacaaccacacacacagggggcgggtgtgtgtgcgtgcaaatgggcgggacgtgacgcggcgtcgaatcggaatcgacatagtgcgcataccaaatgagccgcatccatgacggcagagcgagcgggacaaaaagagcggccagagagagatggctggatgtacgtgcctgttggcaaacgggtttgccgtaacgccatctcgctcacacacacgcacgtagcccattgcgctgcgtttatatacttcacaaagtagagagagtgggagagagagagagagagagcgtgcttttgtttggcgctgcagcacgcgcagcaattagtttacttctttacacatttggg

SEQ ID NO: 15083 - DNA, 4571 bp, DROSOPHILA
cagcgacggacgtaccgcataccgtactccgtgcaccgtactccgtactcgtgctcacaatactccgtaggcgtactccgtacatcgtattccgtattccgttgtcagcgtcatcagctgcagtttcacgtacgcagcccggccgtgcaagtgtgtccgtatatccgtagggccatctctttcgctcacccccctttacgaagggaagtcagtgcgtgtccgtaattggcaggtctcattccgcagaacgcagggcgacgaacgtagcccgtagccatagcccgttaaccgtaaccagtaacccggagacgtgccaagtgtcggagataaattaactggacgcgaacgcgcctcatttgaatgccaatcgattgacggctagtttgccgatcccgatccgtattgcgtgacccgtacatcgctggcaggattgcaggataactaaagacacgtaccacacgtgcgtgtgtgattacgtttatgtgacgcggaaaacaaaagtatgcggccttcaaatcgaatgccacgccccctcgaatccgtgccccaagccaagtgcaataacaagtgatagagtgccagaaagtagttgaaaacttcctgagatcatcaggcttccaataagaaaaaaaggcttagcccccagcattgctatgttgccgtaccaggcagccgtggccatggactacgccggataccagagacagcccacgcccggacatcccggaagccacatggccaccatgggatctctgggcatgcccgcggtgcccttcacccacagctggatggtgcccacgcaggacctttgcgccatgccaccctacaacaaaatgaccggacaccagcagccgccaggtgccggaatgcacgcccagcaacagcccctcgagcccggcatcctggagctgcgcaaggagaagtcgagggacgcggcgagatcgcggcgcggaaaggagaactacgagttctacgagctagccaagatgctccctctgccggcagccatcaccagccagctggacaaggcctcgatcataagactgaccatcagctacctgaagctgagggatttctccggacacggcgatccgccatggactcgggaagcctctagcagcagtaagctaaaaagtgccgccattcgtcgcagccccgctgttgatttgttcgagcaacatcagggcacccacatattacagtcgctggatggtttcgccctagctgtggcggcagacggacgcttcctgtatatttccgagacggtgtccatctatttgggcctgtcgcaggtggagatgacgggtagcagcatcttcgactatatccaccaggcggatcactcggagatcgccgaccagctgggcctgagcctaacaagcggcggcggcggtggcggtggaagctcgagcagcggcggaggaggaggcggagcgggaggtggtatggcctcacccacttccggagcctccgacgatggaagcggcacacacggtacgaacaatcccgacgttgcggcctccatgacccaagcttcgaccagcggctacaagggatacgatcgaagcttctgtgtccgtatgaagtccacgctgaccaagcgcggctgtcacttcaaatcctcaggctatcgggccagcgatgcaacgagcaattgcaacaacggtaacaatgctagtaacaatgctaaaaacgttaagaatccgggctcaaactattcggtggttctgctgttgtgcaagctgcgtccccagtacacattttcccacagtcgcaaatcgcagcctccactcctcggaatggttgccctggccatcgcactgcctccgccatcggtgcacgagatccggctggagtgcgacatgttcgtcaccagggtgaactttgacctgcgagtagcccactgcgagccaagggtatccgatctgctggactattccccggaggacctggttaacaagagcttgtactcactgtgtcacgccgaggatgccaatcgcctgcgcaagagccactcagacctgatcgagaagggtcaggtgttgaccggatactaccgactaatgaacaagagtggaggctacacttggctccagacctgtgccactgtcgtctgcagcacaaagaacgccgatgagcagaacatcatctgcgtgaactatgtgatcagcaaccgggagaacgagaacatgatactggattgctgccaactggaacccagtccggatagcattaagcacgaggagggactgggtaacgacaaaagcagcgggtcgccaggaggagatgccagtggcgaaggcaactctcacctgagtgccggagacatgaagcttaactcaccgaaaaccgattcagagggccattcccaccgcggcaggggtcgcagtgcagccgcctcgcatggaagttcaatgaacagcctcaccatgatcaaggatagccccactccgctgggtgtggagatcgattcgggagtgctgcccaccacagtggccactccagtgccggcagccactccaccagtgcagtccaccaagcgaaagcgaaaaaccaaagcgtcgcagcacgcggaggaccagggtcaagagcaggtaatctccgagcagcctctgcccaaactaccgacaatggagcaacgcgatcagcagccccgcagccgcttaccctcgattgtggatgagcagccctcgtccgcggccgactccgcggtcaaggatctggagcaggccatgtccaagcatctgccctcgccagcggcggtggtgtccgtggccccgcccaatacggatttcagtgccgactctctgcttaagcagcagcaacaacaacagcagctggatcccaacgagaaaagcagcaccattcaatggataggcactccctaccaacagccaccggcgcccatgccagctaccgcccttctccggcagttatacgccaaccgggagagcgtgatccgggcgacggctaggcaaacaccaactggagtgggccccggagttttctacggcgatcagcaaacaggtccgctgcccactccgccgggcagtgagtcgtcctacgagaaccaatacctgcagctgcactctgccgcttccggtggacatcctggcggccagaagacctccgctgatgccttcaccaatctggtgtcaacctacggcggctatcacagctccattgactatcacaacgccatgaccccgcccagttcagtgtctcccagggactcgaatcaaccgggtaaggcggctccagtcctggcctccaacgggggatacgactatgcccccgatccactccgagggcagtacgccacttcatccggagacgtggtgcccgccacgctgcctctgaagccccaggcatcctatacagcaacaatgcatccttcgggcagcacaaccaccgagggtggagttacctacagtaatctcgaccagccgcagtacttcgctccgcattcgagtttccacctttaccacaagggcagcccggccagcggctggtactccacgccctcctaggtggtagacgaccaggggcaggtcccgccatcctgtcaggaccagtaccaccaccaccaccaccaccaccatcatcaagacggatcagcgggatccagtgcaagccaggcgagcgagcgatgggactttgtgggtgcgctgggcaaggtggccaggatgttttttagcgccagaaagggtaatccgggatagaggggccatgtcttaggggactgaaggatgttttgaaaaccactaaaagattttaatggaatcataatttgagaacctaatgggtaaatcaaattttttgataatttcctcctccagaccctataatgaacattccctgtcagcaatccgtaaaagttagactagacttaggccaaactaaagcgttaaaggaaacattcaatgttgttaaataattcttaagtatgtaaattatgaaacacactctgagacccaatgaaattataggaaaaatactcaagacgcaatgaattaaaacgaaaagtaacaaattgtaaggctaatcttaattaaagttaatgataaagtaagacttgcatagagtgccaaggaataggaaaccgaacaaatgcgctaaatagagagcgaatcaaaacggaaacacggcttaatctaaacccccgcccaaccaattgttattaattatttaaatcaattgtaattttaccaacacataaaaacgcatatatataagataagctcaatatgatatgtaaacattaatatatatttaaacatttttacaacatatcaaatgcttcctcctttaggcttaggattacctttaaacgacactcgctctaggatattgattacgattcgattcccggaaaatcgactcgattattacctctaagagttcagctaacgtttgtctatttccgtttcctccctattgtatatttaatgaaaccttctaataaaatctagttaaaaatacatcaacaacaaaatgccaaggcaagaaaagctaaaaagtgtaattaaattttgtataaacgcaaagaaagtttctcccattaaaggctt

SEQ ID NO: 15084 - protein, 958 aa, DROSOPHILA
MLPYQAAVAMDYAGYQRQPTPGHPGSHMATMGSLGMPAVPFTHSWMVPTQDLCAMPPYNKMTGHQQPPGAGMHAQQQPLEPGILELRKEKSRDAARSRRGKENYEFYELAKMLPLPAAITSQLDKASIIRLTISYLKLRDFSGHGDPPWTREASSSSKLKSAAIRRSPAVDLFEQHQGTHILQSLDGFALAVAADGRFLYISETVSIYLGLSQVEMTGSSIFDYIHQADHSEIADQLGLSLTSGGGGGGGSSSSGGGGGGAGGGMASPTSGASDDGSGTHGTNNPDVAASMTQASTSGYKGYDRSFCVRMKSTLTKRGCHFKSSGYRASDATSNCNNGNNASNNAKNVKNPGSNYSVVLLLCKLRPQYTFSHSRKSQPPLLGMVALAIALPPPSVHEIRLECDMFVTRVNFDLRVAHCEPRVSDLLDYSPEDLVNKSLYSLCHAEDANRLRKSHSDLIEKGQVLTGYYRLMNKSGGYTWLQTCATVVCSTKNADEQNIICVNYVISNRENENMILDCCQLEPSPDSIKHEEGLGNDKSSGSPGGDASGEGNSHLSAGDMKLNSPKTDSEGHSHRGRGRSAAASHGSSMNSLTMIKDSPTPLGVEIDSGVLPTTVATPVPAATPPVQSTKRKRKTKASQHAEDQGQEQVISEQPLPKLPTMEQRDQQPRSRLPSIVDEQPSSAADSAVKDLEQAMSKHLPSPAAVVSVAPPNTDFSADSLLKQQQQQQQLDPNEKSSTIQWIGTPYQQPPAPMPATALLRQLYANRESVIRATARQTPTGVGPGVFYGDQQTGPLPTPPGSESSYENQYLQLHSAASGGHPGGQKTSADAFTNLVSTYGGYHSSIDYHNAMTPPSSVSPRDSNQPGKAAPVLASNGGYDYAPDPLRGQYATSSGDVVPATLPLKPQASYTATMHPSGSTTTEGGVTYSNLDQPQYFAPHSSFHLYHKGSPASGWYSTPS

SEQ ID NO: 15085 - DNA, 2328 bp, DROSOPHILA
cacaaattctgtgggtctgcacaattttgatgtcatcaatggccagcagctaaatgcgctcagccaagctgaaattctgtctctctcggagtgtgaaaaatatctcggaattctgagatttaaaaacgctcgaggcgtcggtcccttttgacatttgtgggagtgggtgtcagagaacaatataatttcaattagtgtgtgccataactagcctaatagcgcttaacccctctgctcgcttcaataaccattcaacgaatcgcaaccccacaaacacgtgtattccacaccttttttccagtcctttatctataagcccataaccgaaatgcctgtcaatattccattgatggcttgttgatttgcttgaatacgtctatcaggcgcacattttgcatggctcactggtttcggttttggttcgcttcgtgtgaatttccatcacttttggtttcgaactcgatgtcatgtgtgtgttttgcatatttaatgtttatttgcgcttcttgagtgtctgccttgtggtagataatttgctgaaatttcgggcttgtcgcccatctttctgagtatatattattgcaatttgcgagcattgaaactttgcaaattagtcatgtttctttcaggatttattgccataagttgttaagacgaagtttggtccggaggaatgaaaaatgtaattgcatatgtaaggatacatatgtcaaaggaataagtttgaaggactggcataaagagtcctttaagtggtaaacttagcagaatgaatgtgcttaagtatcgaacttatattcatttatttttgatatgaatactatttctaatagaatacataaagaacgtttgaaagtaaatcaatttctgtttatgctattgtatgcaacgttatggcatatatgtacctttctctaaataatatttattgattttttcacgtagattgtaccctgcatttcccatatcttttggccataattttagtttttttttttttttaataatcactcgactgcaactcaccttgcgattgtgtcgaactgtgggagccccacgacgatttgtacgaggaatctggaaaagagaaaaaccaagggtttagtaaatggcaaggagttataagttagaatcatgaaagtgcgttccatcagtcaaccgacggcagtatcttagggggctagcttggtgtaattacttggattccaggtggccgacggtcgggctggctcacacaccgcccactcacctgcgaagagcatcgagaagttgctgaagctgcccgtggagcgtgacaagtaatcggcggaggacttgatgtccagcattgtggccgccgtcggttgggtattcggttgcttgttccgttccacacctctgacgcacacacacacacacacagcaattagttaggatttcaaattcaaattcgaattcaaattgcttttggtctttgtccttgtcgcactctctgtgttgtcctgtttctctttttttggcaagcggtaaattggtcgccggaggccggaaactaataacacggagacggagacgtcgccaagtggtgtccgcaattgaatttgtttaaaaaaagtcaaacgggcaaatgggcagcggtggagcagcgacgcgcagcggaacaggaaaaggaacgggaacgggaaaagtgacgatcggaaccggttaccgtttaccggacacctcgacttccgcccgaactttccaatgcacttttcgacctgcctgccgttcgcgtgtccaactgatttatatgtgtcaatgtccccgcacgtatacgtgatattttttcagcacttgtactgtttctgcttgtatttgtagttgtatatgtgtgggtaggcccagcgagaatcgcgtaaatcactgagaaggactaagaaaggatgctcctggctaggactatcgagcttgagcactgacaccggattgcgtccgatctgtggcacggcagcgtaacaattgatttcattccgtcgtcaaatcgcgcatatcctgccttgcgtcctgccatcgtcctgcctccaacccttagcgatgtttttgtgaccatttggggggtggctggtggttggtcgccttggtgggcggtggtgggtggtgcgctgcctgctgcccgggtatgtatctatctgtctgggttggtctgcttgcgatatgtgtggctgcctctgtcgctgccgctgctgccagtgctgcttctgcgttgcaggatatacttagggttttaatccacagccaccccctcgactggcgtccaccaatcagcagtgagtggaggtgtggcctagcgaaagctttgcaccgtca

SEQ ID NO: 15086 - DNA, 156 bp, DROSOPHILA
atgctggacatcaagtcctccgccgattacttgtcacgctccacgggcagcttcagcaacttctcgatgctcttcgcagattcctcgtacaaatcgtcgtggggctcccacagttcgacacaatcgcaaggtgagttgcagtcgagtgattattaa

SEQ ID NO: 15087 - protein, 51 aa, DROSOPHILA
MLDIKSSADYLSRSTGSFSNFSMLFADSSYKSSWGSHSSTQSQGELQSSDY

SEQ ID NO: 15088 - DNA, 7497 bp, DROSOPHILA
cgccacagtttgttttcccaattgcacttgtaattggcaccaattgcgcatacaaattagggcctaatgggtgtgggcccataggtactatataaggtacaaatggttcaatatgcatcatatctgcagtttaattgaattgagaaataatttattagaaatcttgcatttttaataactaaagtggaaattcagtggaacctttctttgaaaaaagtattacgctaatgatatgaagagctattatgatcgatattaatattcgtcatttatgatcattgatatatttggtatatgtagctaaagaaatatctcataaatggtattgctatctttctgatatagagtattccttagttatggtaacccatccaaaaagtggttccctgttgcacctgcgcacgtgtggcaggtgacatcgcttggctggctgccgctgcgatttttttttctttttgttaaattttttagctgcttgcacacgacagttacactaaataactgctgtaatttgatttgacaaattgtttgcttgcacttaacgaacgcgattcagcgacacattttgcaatttatcaaaaatttgtgcgcgcaaaaagcggaagagaattgccaaatccgtgatccaaccagttgaatgtatcattgtcaagatttatataacccccgatttgggggggagaaagtcgagcattctgcacttcttatggcccaaactggagaaaagggacggcacggtgccgctttctgcgtttccaccaaaagtttttctctattttcataccaactggaagttggcatggtgtattgccgatagagccgaaccaaaccggcagcgattacgggcacgtaattaagggtaactatctcgaatggttctcggatgcgacggagcaaatccagatggcacatggtggtgcatcgcagcgcttgctgctccagtttgtccaaatgtcaggcaagggactcgaattggggtcagtgttggatgcacttcgtcatggaggcccgactgattgggctccgtaagcaaacaacggatggaaaaccttaaagaaacactattgtctttctttcttggactgatgctcgatttgttttaaatgcctaaagcaatcacttgaagatcgacctacattcaaaagtaggttgggaaatcgatgggtgtttgaatttgtttggatttcaatatgatatattacttagtttctagtgcaagttaagtaagatagacattccattgatgggtattccattaaatcaaaatgatttctttgaagaagttccattgaggtatgagcttgccacagtagttctatcccctgccttgtatcgtatgctaaaagccagtttccccaaagagtttccccccagtgaaaagtgaaatcccggccggctataatgagctctacgagcagggtgatatgataacccggagagagcgagagtgcgaccatagacaaaggttaaccccggcgccgtgctcattaaatggacaagtgtcaataaaccgcagttggagtcggcagatgcccacgtactatacctatgaccacgtactatccacatatcattgcgaacccactggtgagggcccagtgccagtggttgtactaagttgtccgacacaatggctcattacttaatggccaagaatacgggagcactcgcacccggccaattgacacccggcagtgggaaaaggaaaagcaaaagcaaaagcgaaaactgaagctagagaagctgttaaactaattgccacaacttccacttgactatgtcaatgtgacgagttggccattgtctctgcaacctgttaacggcgggtggccaaccaaccactcagcaggtggctttaaagttcgcatggcttaaagtccattgaagcacccaaataattttggccaaaatatctgacaaattgactactaatttggccaagacgaaatcgaaagaccccaagccgaaagaacgccagactcatgacaatttcctggcgcgccttgtctcatttccttattccgcagagcgactacggcgaggccaagacgcacctggagcagctgcagcagacgctcacgcacctggaccacccgcaccaccaccacgcacaccatccgcaccaccacctggggctctaccatggcgccctgcccaacacatccaccataaccacagactcggtggtttcctgtgtcagctccacactgccggcggtggccaaggccatttccgcatcctccagctgcgatggcctgcagtcggagcgcaaaaagtgccccatcagcgatctggattcaggtggtcatggtcatggtcaggggcatggcctcatggaggccatctgcgctggccagaagacgtcacctataccaccgccgccaccaccttgctgcttgaccctgggcgaaagctcatcctcgccgaatcccatcgccacggccgccttgatgaacgcttccacctccggatcctcgagcgcaggcggagcaagtgcctctctctgcaacggtgtgtatatttacatatactttcagatttatctaatttcgttggataagaattttgaacatagtatctattacaaatgtcggctgttaatcaagtcctgccaattatacccttccactcggcagatctcacacgggaatcttcctggtacgcccaccatcatcatcaccaccatcaccatcaccatcagttgcccgacgagctggtcatgtatgccacgcccactcccacgccggcaatcgggaaattcggactggacacttccaccgagggttacttgaacgcaaggtacaatggtaagcgtcctcgtccacgtccactgtcaattccggatgcagcctgcccctgccactgacactgcccctccacctgatcccaccacccactccgacccactgtatccactttctgtttgcctttgctatttacacgttcgcttgtttattaattttccattatgagttttgagaagtgagcgggggagtcctgcgggttggatggcaaatggttcggtgggtgtgggtgtgggcttgggattttgggccgctctgccatttgccgcccgaaggctttgctatacagcttagattgttatttttaagttttttattaagaaaacatcgccgaagtttggcgcgtgccgaggtccaaataagataaatatgttttggagttctgggaaaatcaaactcgagtcaagagttgcaagttaatcgtttgaactgaatggggaattagctaacgctatgaactatacatatttatatttgcagtagtaatcttttaagttaatccctctttaagttaagactacccgcaatcatattttaagttatctatctagtcctgcgttttggctggcactcgattatggccaagtcaagtgcatgtgacaagctcgatttgtggcctcaaaggcatcccattgcgagcgttaatacgaaatattatctaacaaaagtcgaggccacctcggttgactggcgacggaggtggcttcagctccattctcccatatttatgagtggaaaaagtaacctggtcttgttctctatttttaccatctgcagtgaatgtcaaaggcgtgcggcatgatagaacatcgagtttctttgacatacccgctgtgacgcacccgcacaaccatccacacccacatccgcacccacatccgcacccgtactgctacaggtaagaagattgagattgagcttcacgctgacaagacaagtcaactttaagtcaatcaacggagtcgcttgctccttgaattatccgctttctatataaaatagatttgtatatatatattttatatatttttgatttatgctccatgcagatttccatcatcgccacccgcgggcattctgaaaaagagcgacgaaggtaagtccctaaaaattgaaaaaaatgaatggaaaatgattaaagtcagcttttgcgtacgctcatcatttattcaaattattgtgcgcgatatgcatacctatcactgggtaattccatttgctgccatcttcttctagtggctaccaatattttttcaaataaaatgcaagaaatcgcgcgcataatttacaataacaatatcgtcggtgttactaaccgctaatccaattggcggcagaacaagcgtgcaattcaatttcgaggggcggctgctacatagttcgcctccggtgggcgtggcggtgggcggacgggggcgtggtcgagggctgaatccgacgcccatcgaacaaacagctcaatcacggggccgccgttgagtggttcgtgttagctacaccacccagtcaccccattcacccatccatccgtttacacttgaagaaaaaaatcagttactttaaaaatttaaaggttgtttcgtggcgttctcagttcaagctagatttcagctgattctttatgaaatatacattatatcatagtttaaacaagatccttaatccttggatctatttgtcttatatcagatgttatgtatttttcctattttagattgcttgatttataagctccaataatatatgtatatatttttaaagaatactgttcgtccacgaagaagcaatcttaggggtgcataaatgactatagtgttttctcgggtgtaatgcattgtcccacccactccaaagcactccaaaccccactccaacccacccggataccctcgtccttgggctgcagggccaacaggtcttcgttttccatcagcagctcgtttgttgttatcgccaatgatgtttttacttgtcgacacttgctcatggattatgcagaggtatctcctgaatttttaatgcgcccagcgtcgagtcgcgatgagcatggggtgccggaatggatgcgggagttgtggagtaactatgtatctaatgaaaagggcaagttcgggtggtacttccaggttgggttgggtggcatggagtgggtttgtttgcctccgctaaattgcagcatattgagcattttgcagcaactgagaagagtgggttgcttaaataattaattgctgctaaataccctggccatttagaaaagccaagcgccgcacaaacaaagcgaaacaatgtgaaagagtttttaatgtcagtcgagagggctggatgctctttaatgagtggggatccatacaaatatgggatatgtcaatatctatgatataaaacacatctacaaaggatattgtatggtttatacacgaacgtaaaagtttaaaatgtctaataaacccataataccctctgtgaggaagggtatctggaatacccatgtaattagcacccattcccttgacaccggcacattgctcaaacgtgcatgaaagcggctttcactggtgaatccttttttccagaagcaacctcggccgccgtatactgcagcgacgtgtcctccggacagcactttccgcaccacacaaagatcgagcacgcggactccaccactacggcggcacagcagcaacagcagcagcaagagcaacagcagcagcagcagcagcagcagcaacaacagcaacaccagcaacaactgcagcaagctgctgcactgcatccgcaccaccatcactcccaccatggccaccatggccatcagcaggcggagcagcaggctctcacccacttgacgccacttcatgccgcatccgctttcaaatttagccatacggcggtcatatccagctcagcggtatatgccacgccctcgcactacgcccaccaacagcagacgcagtctcagtccgtgtacagggatctctcgcccaccaccttagcagcggtcagcgatgcagatctgaagtacgacagcggtccctacaacgcggccatctcatccacctatccctccgcgctgcggcccaatgtggtggactccaccacgtccagcgatgcggaactgcgcctggatcagttctacgccagcaatggcatctccaccagcagcaacggccaggcgatcagccagcgcaggggttcgctgcagctctggcagtttctggtggccctcctggatgagcccacgaccaggtgggtacgaaacggcggcaccaaatctcccatacattaacactctatgattctcctttcagtgccagttgcatcgcctggaccggtcgtggcatggagttcaagctgatcgagccagaggaggtggcccggcgttggggtctccagaagaatcgacccgccatgaactacgacaagttatctcgcagtttgcgctactactacgagaagggtatcatgcagaaagtgaacggagagcgctacgtctatcggttcgtctgcgatccggatgcgctgttcaacatggcctacggtcacctgaccaccggttccggcaagggtgaccagcaccagttgacgctgtcgctggccaagacgcccccgacatccggcgactcccagacgcaatccccacgagtcgccaagtcggagtattacgataccgccgcattgcataaatactaaccatatagtcgccatatgtgggcggagcgttcgaatgcggccgcgtgggcgtggccgtgtcccgtgtacattgtgtaatctagttgcgtgtggggttacgaatttcaaatgaaggtttcgttacgatgagctgcgttgggaatagcttagaggggcacgaaggctgtttttcagtaatattggggtcagcatctcctgaaaattacatacaatatggtttcaaaattgtaattctgtttttattataaagttgttcgacatttttatgcaacgtgcccctccatagactaccatatatcgagctattgattccaaagactaggctgatcagaacgacatacacaaaatgtactttacaatattaacatatagaatatatacttgagcgcttatgtatacatatatatgtatctatctgtgtacatagagggggttacagaggaaagcagccatgtgtccaccaaatatcgtagttctgcattgaggttgagttacttaaataaactatttagccagttttcgatttcgaagaccgtgcaatctggcagattaggaaaccatgaaacttcagttcaataaggtaatatttaaaaaaaaaattgttaaatctaaagtccaccaaattgcatcggttggagaaaccggaaacagagctgtttgaaccgtttctgttcgttaataaatggcaacagagtgtttttgattgtttagacctcactcctccctcttcttcttccttttgggcttatcctcgccatcggaatcctggctggtggcactggaatcgctggcactgctgctgctctcctgcttgcgcttttcgggcgtcttcttggccagcttttcgatgtactgcttcagcttgtccggctgcggactgtatgcccagtggatcaactgcaggtgcaggtcggtgggtgctccggtctctgcatcgaagagcttggcctcctcactcttaatctgctccagcaacttggacagctgacgattgcgcaca

SEQ ID NO: 15089 - DNA, 1842 bp, DROSOPHILA
atggaggcccgactgattgggctcctgaaaagtgaaatcccggccggctataatgagctctacgagcagggtgatatgataacccggagagagcgagagtgcgaccatagacaaaggttaaccccggcgccgtgctcattaaatggacaagtgtcaataaaccgcagttggagtcggcagatgcccacgtactatacctatgaccacagcgactacggcgaggccaagacgcacctggagcagctgcagcagacgctcacgcacctggaccacccgcaccaccaccacgcacaccatccgcaccaccacctggggctctaccatggcgccctgcccaacacatccaccataaccacagactcggtggtttcctgtgtcagctccacactgccggcggtggccaaggccatttccgcatcctccagctgcgatggcctgcagtcggagcgcaaaaagtgccccatcagcgatctggattcaggtggtcatggtcatggtcaggggcatggcctcatggaggccatctgcgctggccagaagacgtcacctataccaccgccgccaccaccttgctgcttgaccctgggcgaaagctcatcctcgccgaatcccatcgccacggccgccttgatgaacgcttccacctccggatcctcgagcgcaggcggagcaagtgcctctctctgcaacgtgaatgtcaaaggcgtgcggcatgatagaacatcgagtttctttgacatacccgctgtgacgcacccgcacaaccatccacacccacatccgcacccacatccgcacccgtactgctacagggccaacaggtcttcgttttccatcagcagctcgtttgttgttatcgccaatgatgtttttacttgtcgacacttgctcatggattatgcagaggtatctcctgaatttttaatgcgcccagcgtcgagtcgcgatgagcatggggtgccggaatggatgcgggagttgtggagtaactatgtatctaatgaaaagggcaagttcgggtggtacttccaggcggagcagcaggctctcacccacttgacgccacttcatgccgcatccgctttcaaatttagccatacggcggtcatatccagctcagcggtatatgccacgccctcgcactacgcccaccaacagcagacgcagtctcagtccgtgtacagggatctctcgcccaccaccttagcagcggtcagcgatgcagatctgaagtacgacagcggtccctacaacgcggccatctcatccacctatccctccgcgctgcggcccaatgtggtggactccaccacgtccagcgatgcggaactgcgcctggatcagttctacgccagcaatggcatctccaccagcagcaacggccaggcgatcagccagcgcaggggttcgctgcagctctggcagtttctggtggccctcctggatgagcccacgaccagtgccagttgcatcgcctggaccggtcgtggcatggagttcaagctgatcgagccagaggaggtggcccggcgttggggtctccagaagaatcgacccgccatgaactacgacaagttatctcgcagtttgcgctactactacgagaagggtatcatgcagaaagtgaacggagagcgctacgtctatcggttcgtctgcgatccggatgcgctgttcaacatggcctacggtcacctgaccaccggttccggcaagggtgaccagcaccagttgacgctgtcgctggccaagacgcccccgacatccggcgactcccagacgcaatccccacgagtcgccaagtcggagtattacgataccgccgcattgcataaatactaa

SEQ ID NO: 15090 - protein, 613 aa, DROSOPHILA
MEARLIGLLKSEIPAGYNELYEQGDMITRRERECDHRQRLTPAPCSLNGQVSINRSWSRQMPTYYTYDHSDYGEAKTHLEQLQQTLTHLDHPHHHHAHHPHHHLGLYHGALPNTSTITTDSVVSCVSSTLPAVAKAISASSSCDGLQSERKKCPISDLDSGGHGHGQGHGLMEAICAGQKTSPIPPPPPPCCLTLGESSSSPNPIATAALMNASTSGSSSAGGASASLCNVNVKGVRHDRTSSFFDIPAVTHPHNHPHPHPHPHPHPYCYRANRSSFSISSSFVVIANDVFTCRHLLMDYAEVSPEFLMRPASSRDEHGVPEWMRELWSNYVSNEKGKFGWYFQAEQQALTHLTPLHAASAFKFSHTAVISSSAVYATPSHYAHQQQTQSQSVYRDLSPTTLAAVSDADLKYDSGPYNAAISSTYPSALRPNVVDSTTSSDAELRLDQFYASNGISTSSNGQAISQRRGSLQLWQFLVALLDEPTTSASCIAWTGRGMEFKLIEPEEVARRWGLQKNRPAMNYDKLSRSLRYYYEKGIMQKVNGERYVYRFVCDPDALFNMAYGHLTTGSGKGDQHQLTLSLAKTPPTSGDSQTQSPRVAKSEYYDTAALHKY

SEQ ID NO: 15091 - DNA, 7948 bp, DROSOPHILA
tgcagcggcggagcagctgctgttcggcccacgcaccgcgctaatcatcaaatcagccgcattcctacggcacttgagtgccagagaatacaatctcggctcgttatgtgtttgcacaaatgttctgcgctaattccacggatcgcattcccagccgacaagctggcagggatcagtgctgatctagacatagttttggatatatagcgattccgattagcacctatagcatctatttcaaagactaccttttcgcttgcaattgttgctcgttttttcggcgcaggaagtgaatggaatagccctcgatgaaggaaaataacatgaccgggagctgcagtggtaagacgtgactccactgggatactggatatgactatgccaggaatccgtgttgccgaagaaacccaataaatccaataaattcatgttttgatagaatagatagaattcacttctcgtaagcctcttcaccatcgaggaagagatcttcttcaagggattcagctgatccttaaggacgtacatagtttagatggaggagtacagtcgttgtttttctatccatctgactatacatatatttgcgcacgatgttatggtttcctgtggccattgccagttaagatggctaacacgaagtatttatgcaaacttcattatcattataggagcatctagcagactaaattttctcgcggtgtacgcataaaacactagccaacatctggctttttttggtgtttccgaaatgcctgcactgaaaatgaaaatgaaaataaagccaaatgcggcgacatcgtcgcagttcgcccgctctcgcttgctccccacgcagccgtctctgtcgcacctgctgtttgtctaacagctgccgtggggccttctggccagtgcatctcgctcgcacgcacggcgactgcgccgccgacttcggcggtcgacggtcggcacttcattcggagttgcagacgccggcaacgccgcattcgtgagatacaactcgtggtggtcggacgaagttcagcggctgctctaatatctggatatctggaactgtgctggttctgtccatcgctctttgtgcgcttggattgtgtttttttgttgtttttctggcgctgtgtatttttgttttcgttgtcattgtgccactctgccactctgccactttgtcaccttgcaaacggtcaactcttcccgccagaccagcactccgttccccttcgagactcacccgcgatcccaggaagctgttcccaagagcaccagcatcccagctgcgcattgaaaaccatatctacatccacatccagaacacagcgcaccagcatgtcggacggcatcgaggtcgagcaattggtggagagcaagccgagaagggtgagtagtggggagtgggttgggcacacatggagttcgagttggagttggagatggatggagtcggtagtcctgctccgggcagggaccatgaaatgtgtgtgtataccggcaggggacgaccgaaaattaagaattataaaagattggatggggcagccagaagtccagagagtcagagagcaggccggagagatatcttataaatgcaccgaaagaaaacgggtactcagtatgctgatcacttttaaggctgagccaatccgatggcacaaccttaaaatggaagaaagttctaatcaccactacattataaatacctacaattaaagaatgctaaaaaaaaataatattctcttgagaataatgatcgattttcgaactttaaattgttcaaatatatattgaaaaatattggggattagtagaaatatacaataatataaaaattcaattaccaacagtggtattgaactcggacattggctttaaggatacaaaatacagttttcttccggtgtacacactggagttgctgaagcccaggcccatgcggcgtgtgtgtatatcgctgggcatgcgtgagtgtctgtaaataactctgacattggctcgccggcgactccgctccacaagaaccggccccagagggccagaggtccaggaggcggggtggcagctgggttttatggctctggctggctgggcggaaaggggcagggcagggcaggaacagggactgagtaccgaggggcaatatcatcttggctggatgcgattgcgggggcggatgcagattgtgggggcgactccgaatccgaatccgaacccaaaaactgaatccgaatgcgacgccttcgcagcgatgcatatcaagttcaagtgcgtttgcagtgcggctgccgctgctgcacttgctcgctgggatctcgagacaccatcgatacccaacgaagacgctgcggttaatgcggcgcagtccgtcgccctggcaaacacgtatagctttccagattacggtatttagcgggcactgggagctgggtaaatggttgcagtgccattatcttgcgggtacttcgttcagctgatcgcaagatctgcgtttcatgtgacttttggtgcacagcacttgttcgccaacctaatctctatggcatcaaacaaaacgattgtgcaggccaataaatattacaatttcgaggtttccaagtgcaggcaaacaagtgagtaataaaagtgtatggaatcgatggggatatcggccattccacaccctttcaatgctcgggaatcgcttcctgacgcgccaattttggtcatccactccccgagtcgtcgtcgtcgtcgtcaccttcaggcggcatgaatcacgcactcggaacctcgtttcccgcaacccgcaacccgtaccccataccgataccccgtacccatcagaatgaccatccacaaccccatccggcatcccagatcccccgactccgggcgtctggggcgtgagcagccacaaaacagtttgctcctttgtttcctgcactgtttgtgctagtgtgcgtggcgaatgaaacatcgacggcagcggaataaaaataagaaataaaatgaaatgaaataaagtaaagtaaagtgggggaaaaagaacattgacatatcggcggtcccagacccggagcaagtacgtcattgcgactgcgctgcggcaactggcaatttgtcacaacattgccaattattttttttgcttgttttatttattttttttttttttttggacttagtctggccaaggcgaagcggttaataaccgattcgctgcaatttattggttattttccaattgccttgccaatgagtcagttgcatcgacccacgaatattccgcatattgtgttttcactgtgcatgtatgtcatatatatatctgcatcgcctctcctttattttcctttattcatgcccgatcgtattatttggaatttttttcgtttcttatctgaaattcattagtcaacataaaacactttcggtccacttgtacatacacaatgaaaaagcgaataaaatacaaaatgtttagtgcaatcgaaagtgaatactctaacttttattgttcatacttcagtatttgctttatgagctcacgatctatatataccatacaattagatatataaactatacaaacagagttaacttgaaataatgtcagtggtgtataccaggcatcgaatgataaaagatacggatataataccattcactctgtagttctcgatagcttgctgtttacttaaggacaggattatttacatacaatacgttctcatagatgtttattttaaaggtatcccaagaatttctacaactgcgatacctttcacaagggtatcagcgttgagttacgcagcaagtcagtttcaagcacctggcgctggggattcggtttcgttttcgttagcaaattgttatttgctgtattatgcttggttacgtttagctgcagttatagccgcgtttgatgcatcgccggcccgctcattgccagatatcgatggatatagctatagatactatagctacatatatctagctggcaatgcagcgtgctgtatgaatgcacacatgggcatatatggctcattacgtacgaatccacatatatagatagatataatacatatgtacatctatctatcggatatggccgcaagccatttgagtagcgcgaattgtttggcagatggctttcctgctggaaaggtggctaactcaatggatctgttaggattattggtggttccaagtgaaactgaaaatatgtatgcatatacatttcctgtcatcgctacaaggttacttatcagactgttgctcactgttttccatcgagaatcacgaatcacgattaaccgtatcaattatggactggctactgtcgctcgcttttctatgcgaatctttcgaggatgacgcactctgactttccttgaaactattgtagtttcccttttttcgatatatttcctgaagccagcgcaatatctcgattcctatgactaagcgtcaatctctgctgaatttttatggcgtgtaaaattggaacaggcgagccctacagatttaaccggcactaattgcccgggcgatcccaagaactttcggtaataaatcaattacagttcctttagttttgcgacagttttcttatcagagcaaatagatggcattgcgtcaattccggaggtggggctatccgagcctatcctatccgatctttgggtgcactcccagcccaactggagtgatctaatttgtcgtgttgtcattgtgtcagaagtggagatatggccatataggcatatatatgtatatagatacatatgtgcgaacgttatcgggcttatcggctggaaacttaatttcagctaattttagccaacaatttggctcacgtacccgtggaggttgcaggaggagcaccgacatttctatatacatttgtatctgctatcttgcttgtttgggggaaaatttgtcgggtattttcggtgggtcattcgctgcaacggtttcttagtcgtccgctcatttttggcacagtttgcgtccgcatcttgttcattttttttttttttttgcctgccttccgactaattaattcagagccacgaaacgggagattcagagctgttccatagttctatgcgacgcatagaatacacatacaaactccaagttcttactgcgtcgcgttgtgaaagtcgtcgcccgaaacatctttgggtttaattgtttggcttttgatattttcgacagtcgtcgcttttctaattgatttttctcaccagacgccgtactctccggtcattgaacgcattatagagcgatctctatctccatcttcccatcggtatctgtatctgtatctgtatttgtacctttagctgtatctgtatccgtatctctggcccagcttcaatgtctatttatacgcgagtctagttcctgactccaagcccgatccatttggctggcagttggaccaacagtcatttggctctctttgtttgttgtcatcccgttccgacgaccccaagtcacttatcaaatctctgacctgctttccgccggctgctgattgaaaattgtcacgcgtaaattgattttaatgcggcgatccgcttaagacaataagagtgcactacgtgaaagggtagttttccgatccgtactacaagtatactcgtatcaaaaaccatcgatccaatcgctttacacgctttccacgcatctaagctgagcctaactttgtgcacataatgctaccccaaagatcacttaataaaccacaattaaaattaatctttagctaaccaaaatcgtattgagacttggttttttacatttcactatcaagccattcgaacttatcaagcaatttaaattcatttacatatcgatatttttaaatcatcatatttttgggctttgaaccagaaccctgaaccctcatatgtgtgtgctgatatcattatcaaaaatgctgtaatttaatatgcgggtatgttccagtatgttatcataataaagcctttattttttcttcgaaatatgtacatatttacattggctacttttccgctggcccgctggtattatgtttataaagcactaaagcggcaacaaattgctttccgtgaatctgcccgaacgtaatgcaagtgggcgatgcaatggcgtgcctattcccctggccgacttgaggttgcctgacacggaaacaagtcgaattgaatgtaatataaccatcgaaagcgaaagcaccgcttaaatctgactcatagatggcgccgtcaagagtacttggccccgcattgagtacatacaatacatttcgctatcgatgggccaaagcggatgatccattcgccttggcgaaacgattcggacttggaatacatgattaagatatatacttccgtctgaaagttgcttatagttcccctcttcgcttgcttataatcctcttcccccttgctctttcgcagatgccgctggccacgtcgctggagaaggactcgattcgcgaggcctacgaggatgtacgctccgatctgacagacaccgagtgggcggtattcaagttcgatggcgcccagattattgtacatgcgcgcggtcagtgctttgaggaattccgacagcagttcggcgactcggagcgcgcctttggctacatacgcatccagatgggtgacgagatgtccaagcgcaaaaagttcatcttcctgacgtggatcgggcaggaggtgggcgtcatccagagggccaagatgtccacggacaaggcgctgatcaaggatgtcctcaacgtgagtagccaatagctagagatgccagagcccagaggcagaaatagatcctctcatctctaatctcttgcagaattttgccgtggaacttcaggcgggagtggaggccgagctggacattgagctcttccgtgaagcactgaaccgtgccggcggcgccaactacggaacgggcatccgggataactaagcggcctccaagttactttacatatacatttttttttgcaactcttaactgcttaccaaactgctcctttctctttaattattatgaattaattttatgaaatttaaaaactgtacattttatgaaatattatacaagcaattgtaacattactgggtcctcttatttatcgtataatcataatccatagtgtcattcaaaaaaggtaaaagaaaagttttcaataccaaatttcaagagcggatgcaaaatcattatcaatgccatacatttaattgtgtatatagtgggactgatgaattactttgatgataagacaaaaattttagccacctaatactgaatactgaagtggacagatatgccagaatttgcattagaaaattcaagtttctatagtaaagaaatgttctcgtttaaactagtctggttttctgaacatacgctggatggatcgattcgaatttaataagcgcgaaatgaaaatggactacgttgttgaactaaatactacggagatgatgaaaatgatgagaaaaattatctagttgctttagttcccgggctctgcctctcgcttcctagcggaccctgaagagtaccgagtgaagtgcatcgatgtccacctccacgccagacgagtttgtggtcacggtgcgagagctacggccgagaacgttgaacaatactgcttggtatctttaaagcatatcactcacctggctttgtgcaccgagcgacgggaggagtgcggattaaccagcacacagtgcatgggctggtcatcgaactgacgatggtgataggtatctacggccttctcggcatgttccagtgacttgtaaataacttcggcggtgccgggacgcaccacacgagcgtcgtacactgggccgatgtcgctaaaaagctcgcgaatatccgcagtagtcacgttagtatgcagattgctcaccagcaggcggtatccatcctttgtgttcgacgtacgcagcgacaa

SEQ ID NO: 15092 - DNA, 824 bp, DROSOPHILA
aactcgtggtggtcggacgaagttcagcggctgctctaatatctggatatctggaactgtgctggttctgtccatcgctctttgtgcgcttggattgtgtttttttgttgtttttctggcgctgtgtatttttgttttcgttgtcattgtgccactctgccactctgccactttgtcaccttgcaaacggtcaactcttcccgccagaccagcactccgttccccttcgagactcacccgcgatcccaggaagctgttcccaagagcaccagcatcccagctgcgcattgaaaaccatatctacatccacatccagaacacagcgcaccagcatgtcggacggcatcgaggtcgagcaattggtggagagcaagccgagaaggatgccgctggccacgtcgctggagaaggactcgattcgcgaggcctacgaggatgtacgctccgatctgacagacaccgagtgggcggtattcaagttcgatggcgcccagattattgtacatgcgcgcggtcagtgctttgaggaattccgacagcagttcggcgactcggagcgcgcctttggctacatacgcatccagatgggtgacgagatgtccaagcgcaaaaagttcatcttcctgacgtggatcgggcaggaggtgggcgtcatccagagggccaagatgtccacggacaaggcgctgatcaaggatgtcctcaacaattttgccgtggaacttcaggcgggagtggaggccgagctggacattgagctcttccgtgaagcactgaaccgtgccggcggcgccaactacggaacgggcatccgggataactaa

SEQ ID NO: 15093 - protein, 163 aa, DROSOPHILA
MSDGIEVEQLVESKPRRMPLATSLEKDSIREAYEDVRSDLTDTEWAVFKFDGAQIIVHARGQCFEEFRQQFGDSERAFGYIRIQMGDEMSKRKKFIFLTWIGQEVGVIQRAKMSTDKALIKDVLNNFAVELQAGVEAELDIELFREALNRAGGANYGTGIRDN

SEQ ID NO: 15094 - DNA, 3137 bp, DROSOPHILA
taagttaggcaaataaagtacaaatagtagtatgcaaatgtatttcttaaaaagagtgtcacttatgtttcgattaacgcaattggttgacaaaatgtgccttttcggaatgcactctaaaaaatttaaaacccttacccttaaagatagcgcaagattagttggttgacattgaggagtctccgcccatgggatgatctccgctgccggcatttcctcctccggtttgttgttgctgctgttgtgccgcctgttgcatctgttgttgttgctgctgctgctgttgttgttgctgctgctgttgctgggcggcggcatgttcctgctgacgcttcaactgctgacgagctgcatgtgagtgtttggccttagtttcctcaagttcacgcactctggacctagcgtgctgaatgcgatgccaagccatttggagcactttggcggatgcatagccggaaccctcgtgtggctgacccgtggacacctgggtcaagtagttgatctgctcggacagcttcgattccacgctggacagactcttgagaaactgctgcgactgggtctccgcatttttctgggaagacttttccttgcccaactcctgcaaggcttgtcctggaaagatcacacatgttaaccactttttaatgataagcaagttccgtcccacctgcactttgcatgcacaggattatctccttttcgatctcatctagagcgtgtattttgtccagaggattcattgcttttcacgttctgcatataaacaaaacaaagtcgaccagataacagtgtgaccagaacacgagagggaggcctttaaaaatataaatataccaaaaagttgtagtgtctgcaaaatactatggatttcaagatatcattcgaaaatatttttagaaaaagaataatcatccaaaaagaatcacatttcaaagaacattttacgcatttgaattaatttattaagttctatctcgaattatgatctaaaagtactttaaattcgcttgcttgccaatccgacccattcatatttgaagtactcctttggcagaggcaggcaattctcgtgcaactcgatggcgtccttgtccatgtgccacaccataaagttcctgccacaggcgatttgtttgtggagcgccaggtgcacccggtccacaaagtgggattgacactggcggcactcgaacactcgatcgtgggtatccacgcgcaggaactttcttatgtttcggatctcaagtaagccccgaaagtcaccaactacgtccgtttgaatgatgaaggtgggtgtgttttcgacatcatcgcctcggagcaaatatggtactgcaaataattccttggaagtgctgcagacccgaaaagtgtacaggtttatttttagagttgccggaatgtgttgattttggtccttttggtttatataagtttcagaaagttgtgctaaatcggaggaatgcttattacttccatttccaatgacttctgttgcgttttttactcggtactgcaaaggaagtttaagagaattgctcttaggcgagacgcaaaatctcttgaccgtcaccttcatccttctgatgacacacgcctccagtggaaccttctgatggagcagcacgtagttgctgatcttctccagcagcatggagaatatcatgtccaccgcctcaccaatatcgaaatggttttcgatatttaacggactgctttcgtagtacattcgctcctttttcacatccacgtaaaatccaactgtggtctccaatttttctgtaccaaaacttaaaaatcgcagcagttgcggaactgcatccatcccagcatccagaagaaagtcgttggtcctggccgcaatgcttccatcacacaagataaactcttcgatggcctggtcctcgatcctcttcaggatatccttttcatcagaaccaatttgaatgcaatggcttctattgttctcgatatcatttcgccaatgatgatggtatggttcgctgactggcactcgactttcacaggttgtgcaatccgctctccttgcaccgttgacgaaaaactggtggcgaaacacacggaagttatcctcgatgtcaaagatataacgcgattgtgttcggcgggccatgcttgaaaactatctaatgtttggtgattcgatccgctgattttatatataaattgagattgcaaaatacgctaggtagcaagaatgagcaggtgtaggtacatatgtatctgtaccagctgctattgaccgaatcttaaacgctatcaggtagacatcaagtctggcaggtacaacaactttctcatgtaaatcgaaaaaaaaagtattaacaaacttacttttattaccatgaaggattaacgatagtattttacgaagagctgcgacctttaaagtgacagattttttcaaattttaagtcttctttagttcggtccagtctataattgaactctctcaattggccaataatccaaattggtatatccttaaacgatttatatgcgctcaattagcccttttttctatttctattatttgttgagcttaagtctaagtctaagtagcatttgaaagccaaggaatcaaaattttacatgttacgcgtttgtcaagtgtatatagttattttctactttacgtgagtaaaatatttgcacgtaaggggaatttccattacagttttaaccataaacattaccgcgtatataattcctccttgacataaaggccaagttctatgccataaaagtatacttccagaaacaccgacgtttctgacgtttctatcttatcgtaaaagggaatttttggtatcaagaacatcttacaaaagcttaatgatataaaacaaatggacgtagaataatttaatttatatgtaaatttacacgtagaaacgacggtttttaaaagattattgtttaaacaagaagcttgaaaaaatgttgtttttaacacacaatttaaataactctcacttttccactattttctataattatgtgtataatattattatattatattatattattattattatattataatattatattatgtatatatattattatatatttgatatgcattatatgcattaggtaatgctgta

SEQ ID NO: 15095 - DNA, 1137 bp, DROSOPHILA
atggcccgccgaacacaatcgcgttatatctttgacatcgaggataacttccgtgtgtttcgccaccagtttttcgtcaacggtgcaaggagagcggattgcacaacctgtgaaagtcgagtgccagtcagcgaaccataccatcatcattggcgaaatgatatcgagaacaatagaagccattgcattcaaattggttctgatgaaaaggatatcctgaagaggatcgaggaccaggccatcgaagagtttatcttgtgtgatggaagcattgcggccaggaccaacgactttcttctggatgctgggatggatgcagttccgcaactgctgcgatttttaagttttggtacagaaaaattggagaccacagttggattttacgtggatgtgaaaaaggagcgaatgtactacgaaagcagtccgttaaatatcgaaaaccatttcgatattggtgaggcggtggacatgatattctccatgctgctggagaagatcagcaactacgtgctgctccatcagaaggttccactggaggcgtgtgtcatcagaaggatgaaggtgacggtcaagagattttgcgtctcgcctaagagcaattctcttaaacttcctttgcagtaccgagtaaaaaacgcaacagaagtcattggaaatggaagtaataagcattcctccgatttagcacaactttctgaaacttatataaaccaaaaggaccaaaatcaacacattccggcaactctaaaaataaacctgtacacttttcgggtctgcagcacttccaaggaattatttgcagtaccatatttgctccgaggcgatgatgtcgaaaacacacccaccttcatcattcaaacggacgtagttggtgactttcggggcttacttgagatccgaaacataagaaagttcctgcgcgtggatacccacgatcgagtgttcgagtgccgccagtgtcaatcccactttgtggaccgggtgcacctggcgctccacaaacaaatcgcctgtggcaggaactttatggtgtggcacatggacaaggacgccatcgagttgcacgagaattgcctgcctctgccaaaggagtacttcaaatatgaatgggtcggattggcaagcaagcgaatttaa

SEQ ID NO: 15096 - protein, 378 aa, DROSOPHILA
MARRTQSRYIFDIEDNFRVFRHQFFVNGARRADCTTCESRVPVSEPYHHHWRNDIENNRSHCIQIGSDEKDILKRIEDQAIEEFILCDGSIAARTNDFLLDAGMDAVPQLLRFLSFGTEKLETTVGFYVDVKKERMYYESSPLNIENHFDIGEAVDMIFSMLLEKISNYVLLHQKVPLEACVIRRMKVTVKRFCVSPKSNSLKLPLQYRVKNATEVIGNGSNKHSSDLAQLSETYINQKDQNQHIPATLKINLYTFRVCSTSKELFAVPYLLRGDDVENTPTFIIQTDVVGDFRGLLEIRNIRKFLRVDTHDRVFECRQCQSHFVDRVHLALHKQIACGRNFMVWHMDKDAIELHENCLPLPKEYFKYEWVGLASKRI

SEQ ID NO: 15097 - DNA, 2591 bp, DROSOPHILA
gccccaattgaggttgtccggcgaccgcagcggccgccaatgactaaggcgacaacaagctggggaggcggggaagagtctccacacagttaagatgacaccgagagaaaattgccctccaattctaatgatttcatatattcatttgttcagtgtagtagtaactacgggaactaaactacaatactttatatgtaaccataaaggaaatgattttttgtaaatgaatttctctttatttattaataatttttattaagaacttatttaacatatagtaattaagtatgatttaagctttatataaatttatgttagctcaacttaatattttagttactgtattatttgtatgtatttattttaccatataaatgcaaatacagtgtatgatatatgctggctccggttttgtggtccatatattcgtagtagaaagtatttttgccagtgtataagaagaaaaccaagagcagcgatcttgatcgcacctcgccgactgcttcctctcacaaccagactctgcggtagcccgaaaaaaataaacaagccgaactgcaaaaatactttatacgagttgaacaaatttaaccacatccattaagcaagaccttgatgacaaacggcggcaagtctttcgtgcgataataataagtattcatttcagatataatttttgtcgctctttccttttggccatcggttctggttattttcggcatgcccatacctataataataatttaagttgccctttcgctgattgccgattatatttttgggtggaatgtttttattaaattaatggccatagaggtggtatctgtttgataattcaggcttaaattgattttattatgatttatagaatgtcaaaaggtataagtatttgctgaatttttaacactaccatatgcaacgaacttgtttgaatgttcataagtatcttttatttaatggctaccatacactttagtataaagcctattgtattaagcacttaaatcgcgtgcttgaagtactcctcctttccggttgcatcggccttcatggtctttgctccgggacgccagttgaccgggcagacctctccgaactcatcgctgaactggaaggcctgaaccagacgcagtgcctcatccacactgcgacccactcccatgtcattcactgtgatctggcgaatgcgtccctcgcgatcgatgatgaaaagggcgcgtagagccaatccggtgtcctcatcgagaactccatagtccctggctatcttcatgttcttgtcggccaacaatggtatgtccaactcacccagacctccgttcttcctgggagtattcatccaggcgcagtgcacaaagtgactatcagtggaacaggccaagacttcgcagcccacattcctgaattccggagctctatcactgaatgcctgcaactccgtggggcagacgtacgaaaagtcagccggataaaagaccaacaggacgtatctgccacgcaaatccgtaagagcaaaattacgataaccaccggataccaccgcattggtagtaaaattaggagccacttggttaatattgagcatacgcatcttgacggttttgtattagctttttgttttgagctgggaaagaaaagttctactggtttttgtgatttcagatgtgatttctgaatgattcgattgcgagttatatatgtgggcatgctttatatagagtttcataaatttgaacttgcctgtttaactgtgtaacactaatgtaattaaattcgtttattcgctcattttgagttgacctgcataaatccgaaatttttgacattatccccataatcacattgcaatgaacattctcttacaaatgacttttcatttttgcgccatttccctctcgaattaccaattcatatctaaccgacaatcgtaacacgatcagctccaattagagcgtccttttggcaacataaaccgaatcgcaatcgattaaattgaatccaattcaattatgtgaattgggggttggacgaaccatataccacctgcagctgaatgggcgtgtgaaatgattgttgtgttaatttcgcatatgacaccatcagccgtcagggaaattcaagcactttatgcggtttattggctttgatcgatcgagggagtcgcattttttatatatttattatatactcatatgtcgcgccagacatacgggtctcgggtttcttgacagctcattcagtgcggtctcttttttagcatacgtttttgtgccaattttgagttggtaaaatatttggaggcgatttagcagcacgtcaattaccgccggccacctgatgacagttgcaattaaaagcggtgaggaaagagaaaaaaaaatacgagaaaaacacgaaaatgcggggaaaatagttgccagtcaacacggatggatggatgcctgttaatagacatgtaaactgcaattaaaacaagccaatggggtggggccaacacacaaaatcgaggatgagggggggccaactccaaaatattttgactcgaccaactaacatggccaacaagacggcggcctgagacttttctttaa

SEQ ID NO: 15098 - DNA, 591 bp, DROSOPHILA
atgcgtatgctcaatattaaccaagtggctcctaattttactaccaatgcggtggtatccggtggttatcgtaattttgctcttacggatttgcgtggcagatacgtcctgttggtcttttatccggctgacttttcgtacgtctgccccacggagttgcaggcattcagtgatagagctccggaattcaggaatgtgggctgcgaagtcttggcctgttccactgatagtcactttgtgcactgcgcctggatgaatactcccaggaagaacggaggtctgggtgagttggacataccattgttggccgacaagaacatgaagatagccagggactatggagttctcgatgaggacaccggattggctctacgcgcccttttcatcatcgatcgcgagggacgcattcgccagatcacagtgaatgacatgggagtgggtcgcagtgtggatgaggcactgcgtctggttcaggccttccagttcagcgatgagttcggagaggtctgcccggtcaactggcgtcccggagcaaagaccatgaaggccgatgcaaccggaaaggaggagtacttcaagcacgcgatttaa

SEQ ID NO: 15099 - protein, 196 aa, DROSOPHILA
MRMLNINQVAPNFTTNAVVSGGYRNFALTDLRGRYVLLVFYPADFSYVCPTELQAFSDRAPEFRNVGCEVLACSTDSHFVHCAWMNTPRKNGGLGELDIPLLADKNMKIARDYGVLDEDTGLALRALFIIDREGRIRQITVNDMGVGRSVDEALRLVQAFQFSDEFGEVCPVNWRPGAKTMKADATGKEEYFKHAI

SEQ ID NO: 15100 - DNA, 6041 bp, DROSOPHILA
aaaataaaggagaataaggaggaacgaaaaaataaagccaagagaaatacttttgggcctgctgctgccttttgttgctgactgactggttggtgtttgatctacacagaaaataaataggatcttcactgataaaaatctcaaaattaaacattaaagaaaaaaatatatcaattctgaatgacagtactgtcaaattctctagatacgcttttgtatattctaaaagtattattgttagccataaatatattgggctgtatctttcggcttttttatctttctaaacttcacgtttaattttaataaaaatatatcaattaggcctttaataaattcctcaaattttccccgtgtagttctcattcgttcgttgctgttgctgtgttgcatgcaacatcaattttcagaatctagctgcgagccaggaaactgaaaatagctggccgtaagaaaacagaacagggccaacaaacaacaattgcctggctcgccagctattttactgtttttcttttgctgttgttattgttcctggtgctgcctgttctttccccattcgatttttcttttacttttgctatttcaacatgtaactaggcttttatcgctaaacgctcgcatttgcatattgaatgcaattcccccttgttctttattttgaaacccgaggaagttaaacttgttttcagcgagggtacttcttttttcggccagcagctattccagatcacttttcataactgaacaagatcgtggtctggactttaaacggttcttatgatgcgttttgactttatcatataaacaaatattctttaccatcttgaagcgtaaggaacttgaaaaataaaagcttttcattaagaataaaatggaaacgcgtgaactaaaatcattctttcagaaaacagctaatcatataaatactgattctcctaatcctctccagcttccaacttaaccttgcctttaaccctctgcttaaagctaaccccactcacatgtgcagatttctagacgccggcgtcggttgctggttcggtggcaatggtaggctctgctgctggatgccacccgccaggggaatcatctgtggagcaggcccacccaccgacccgccgcccatcagcaaggccgcctgctgttgctgctgctgctgcgtcgtgttgttgttgccgcgaatttgctgctgttgctgctgctgttggtgcaacgatggttgccggcggaagctgccaggttgctgcggtggcggtggcagcatgaactgctgctgatgatgatgcaccgagtggggcagtggcatcgcctgctggtggacgtggtgatggtggtggtaagaggcgtggttgatcggcacatggcaactctgaccagcaacattggatcgctgcgatgaggagacatccggtagagcgaaccgcagcttttgccagaacagcttatcaccccactgcagatacgtgttcgtcttcagatacaagcgaagatcgggatcgagttccttctggggcacctcgcccagcacaataactatcaatcgccggcgacgatctcttagcaccgactgatgggcggacttgaactcgaaccggcaccactccgatttgatgaagttctcgctgaccaccattatggttctccggctgctgtcgatcgcctgcacgatggtttccggtagatagccacccacaggaaagtccctctggtgcaggcacagcttgtagcgatgttcacccatttccagcatgggagccagctcctcgttgacaaacaactcatccttggaggagtacgaaacgaaggcgtcgaacagcttctccctctcgttcttgtccacatccttttgggcgttgtaaaagagtcggactccgaatctcgagtggcaccacacacgcatctcctgacggaagatgaacaccagcgaaatgcagatcattacgaatatgaaggcggtcagaatggccaccaggatgggtatgtaatccagtttcggcggctgatttaggatcattttcgtggaggtggcattcgaggcattctcgccaccagcctgctctgcatagttaaagttgttatccagacccaagggcaaggtctgagagcactgaacaacgggcagggaagcaggttctccggatcccgggtagatgaccatctgctgggtgctatttccactgatcacatcgcacttcatcttcagcttgtccaccacatactcatgacgatttatgtagtccctaagcttatcaatgaattcacagctgcaggtccagggattggaggccagacgcagttcgttcagataactgggcaggaagttccagacggcgaatgatgtgatggcattgtgatccaatcgcagaattttcaggtgatacaggtgcgtaaaggtgagggtatcgatcgtagctatagcgttgtgctgtagatatagttcttggaggttatccaatccctggaattcgttgccatttaaggccttcaactgattactttgcaattggagaacctccagctccagaagtccataaaaggtgcgattgtgaagcacctcgatcctggagtggttcaagtgcagcacctttagcctcttgcgaccgatgaacgcatgactctgcagctcccggaaattgtttccatccagatacagctgagtggaatccatgggaatgtgtgatggcagagtctgctcataggaagcccggctgcagtccaccacattcgatgtccaggactgatcgtggtagcaggaacacctatccgggcactccattttgcagtcacacgcctggaaatcgcagcaatggcacagggcaaagcaatgtgaggcgtatttgcaaaggaaatcatcggacttggcctctatcagggagacatgtgaagatcctcgagcgtaagccaaccggcagtgaatctggtccaagtccatgagttgcggctgagtacgcgactcacgattcaccttttgcagccagtccaagttacagtcacactcgtaagcattgtgaccaatatagaactccggaatctcacgatcctcggcgatgggtgacaagcggagagcattgggttccaaggtggtcaagcgattcctcaccaaatccacccgcgtcaaattgggcttcttgaagaacgtgtacggctgaatcttggagatctggttatcgttcaagtacaaaacttccacactatttggtatagagctagccgttatctccgtcagcagattatagctggcatcaaaggtactcagactcagttcgctttcgatctcgaaatagttgcccaactgagtgatcctattggcccgaacatccagccactgcaatccgatgggaatgtgcgagtaatcgaatttctcgagacgattacccgagatattcagccacaccaagttgggcagttccgtgaagaggccagcaatggattttagctgatttccatccagtctgatggcctgaagctgactattcctctgcagtgaaccagcctcgatggactttagcttgttctgggacaggttaaggatctgcagggagctcatgcgatcgaaaactcctcgccggatgtgggtgagagagttctccgtcatccggaggccatacagactctccagctgggtgatgctagtgttctcgatctgactgatcatgttctcgcccacatcgagggttttgagtagttgaacatgggccagagcttcgggcaccgcctgcagcttgttgtcgttcaagtgcagatcctgcaactggctgcagttcaccagggatctctgatccattcgggatatcctgttgaagtccaaggagagcacaagtagattcttcaagccctgcagagtgcgctgttcgatgactgagatgcgattgcgcgagaggatcagtgtgtgcaggttggtgagatccgcgaagattccccccggcagctgatcgatgtagttatcctccagtttcaggatctgtaaactggccaggggcctaaagatgtgagcctccaggcggctgatcttattagccgataaatccagcatcatgagacgcttgagacccacaaatgtggcagcattgatccactgggaattcagttcgttgcttgccaagtcgagaactaaaagttcagccaactctccgaagattcctggggccagtacattgatggaattgttcctcaagtaaatttcctgcagttgtttggtctccgcgaagagctctggcggcaaagaggtcaatcggttcgccgaaagatccacaaccctcagcgaaagaagaccctcgaaggcgcgatcggccagaaaactcatactgttcttggccatattcagatgggtcagtcggcccagagccgataacattgccgtgggcaagctgaccatcttgttggcactcagatccaaactttgcagtgtggagccgcaaactcgtgccttccgcgaactgagcgaggcactgaagtaaaagttgctgatgtcctgaattttgttgtacgaagcattcaggtgctgcagggatttcagggggcacaccatgccatccggtatcagccagatgttgttgagactcagatccaaacgctccagctggcggaactccacgaagctattggatgccatctccagcgacattgtggaccaatcgccattgtgcgtgcgaatcgtgaggtttcgcagctcctgcagaccacggaaagatccatccgtgagattgcccagcttgcagtactcgatggtgagatccctgagttccaccagcgatctgaagctatccggactcagactgctctggaagaacagggcatcgttgcactccagacgcaggcgcaccgtgttctgcggctggatcacgctaaagttggtgttctccagctccgagttgatggtcctcaggtgacagaccagagtgatgtcatgctccccgccgccggaccagcggcactcatcgggagcctggtacaacaccgtcttgctgagggctgccccgaaaatgggtattacacaggtggcaatcagcacgtacagcatgtgggtggtggccagcatttttggtggttcctaaacttcgaatggggtttcgattttggttaatcggggaggttatgaggggcttcttttggtctttcactgctcgttctatttttcgcccattttgtgtgtgtgcttatttgggattttttaaattattttgttttttgtttggttttatagcgcagctttgcacaatcgccacttttcacaacaacaccacatcaaccgatttaatgcttgatctaaaacgattttcttgtttcttcccgctggctatgtaattttctttatcttcttatatcttttgatttcggttgcattcgtttttcgatttctatatcttaattttattgctttgcagttgtttcgcgttgaccgtaatccaagtggggggtgcgatagcgcgattgataaattgtgttccaatttttctcgaagcgatacttcttcttttttctatttcatccgctgaacgacaaacgcgcgtccgctcggctcgaagtcaactcaaaaactgatcgctctctccggttttcagccagcagcaagtgccgctgaaaatcactcatccgcctgagtgactatgtgagtgagtagctgagtacctgagtaaatgagtaagtgagcactcattgagcacgcacacagaaccaaggaactagagcgagatgcgatcgagtaaacaaaactatgcaatccgaacgcaaacgcattgcacgtaatggcccacagtgcacagtgggccgaatagcaacgaattgcactcggtgggcaggtagaattagcatggggttttgcaacaaagcaaagcaaagatggaagatgtgaggaagtgagatcgcgggagatgggcaggtgatattagtctacagaaacatgtgtaattttaagaccaaggatattccaaatctgcaatactttagggtcaaggatgccgacggaaggaataggtaaatcgatatgctagatctgtatagcgatctcccgatctgataaaaaaagttccctagagaag

SEQ ID NO: 15101 - DNA, 4041 bp, DROSOPHILA
atgctggccaccacccacatgctgtacgtgctgattgccacctgtgtaatacccattttcggggcagccctcagcaagacggtgttgtaccaggctcccgatgagtgccgctggtccggcggcggggagcatgacatcactctggtctgtcacctgaggaccatcaactcggagctggagaacaccaactttagcgtgatccagccgcagaacacggtgcgcctgcgtctggagtgcaacgatgccctgttcttccagagcagtctgagtccggatagcttcagatcgctggtggaactcagggatctcaccatcgagtactgcaagctgggcaatctcacggatggatctttccgtggtctgcaggagctgcgaaacctcacgattcgcacgcacaatggcgattggtccacaatgtcgctggagatggcatccaatagcttcgtggagttccgccagctggagcgtttggatctgagtctcaacaacatctggctgataccggatggcatggtgtgccccctgaaatccctgcagcacctgaatgcttcgtacaacaaaattcaggacatcagcaacttttacttcagtgcctcgctcagttcgcggaaggcacgagtttgcggctccacactgcaaagtttggatctgagtgccaacaagatggtcagcttgcccacggcaatgttatcggctctgggccgactgacccatctgaatatggccaagaacagtatgagttttctggccgatcgcgccttcgagggtcttctttcgctgagggttgtggatctttcggcgaaccgattgacctctttgccgccagagctcttcgcggagaccaaacaactgcaggaaatttacttgaggaacaattccatcaatgtactggccccaggaatcttcggagagttggctgaacttttagttctcgacttggcaagcaacgaactgaattcccagtggatcaatgctgccacatttgtgggtctcaagcgtctcatgatgctggatttatcggctaataagatcagccgcctggaggctcacatctttaggcccctggccagtttacagatcctgaaactggaggataactacatcgatcagctgccggggggaatcttcgcggatctcaccaacctgcacacactgatcctctcgcgcaatcgcatctcagtcatcgaacagcgcactctgcagggcttgaagaatctacttgtgctctccttggacttcaacaggatatcccgaatggatcagagatccctggtgaactgcagccagttgcaggatctgcacttgaacgacaacaagctgcaggcggtgcccgaagctctggcccatgttcaactactcaaaaccctcgatgtgggcgagaacatgatcagtcagatcgagaacactagcatcacccagctggagagtctgtatggcctccggatgacggagaactctctcacccacatccggcgaggagttttcgatcgcatgagctccctgcagatccttaacctgtcccagaacaagctaaagtccatcgaggctggttcactgcagaggaatagtcagcttcaggccatcagactggatggaaatcagctaaaatccattgctggcctcttcacggaactgcccaacttggtgtggctgaatatctcgggtaatcgtctcgagaaattcgattactcgcacattcccatcggattgcagtggctggatgttcgggccaataggatcactcagttgggcaactatttcgagatcgaaagcgaactgagtctgagtacctttgatgccagctataatctgctgacggagataacggctagctctataccaaatagtgtggaagttttgtacttgaacgataaccagatctccaagattcagccgtacacgttcttcaagaagcccaatttgacgcgggtggatttggtgaggaatcgcttgaccaccttggaacccaatgctctccgcttgtcacccatcgccgaggatcgtgagattccggagttctatattggtcacaatgcttacgagtgtgactgtaacttggactggctgcaaaaggtgaatcgtgagtcgcgtactcagccgcaactcatggacttggaccagattcactgccggttggcttacgctcgaggatcttcacatgtctccctgatagaggccaagtccgatgatttcctttgcaaatacgcctcacattgctttgccctgtgccattgctgcgatttccaggcgtgtgactgcaaaatggagtgcccggataggtgttcctgctaccacgatcagtcctggacatcgaatgtggtggactgcagccgggcttcctatgagcagactctgccatcacacattcccatggattccactcagctgtatctggatggaaacaatttccgggagctgcagagtcatgcgttcatcggtcgcaagaggctaaaggtgctgcacttgaaccactccaggatcgaggtgcttcacaatcgcaccttttatggacttctggagctggaggttctccaattgcaaagtaatcagttgaaggccttaaatggcaacgaattccagggattggataacctccaagaactatatctacagcacaacgctatagctacgatcgataccctcacctttacgcacctgtatcacctgaaaattctgcgattggatcacaatgccatcacatcattcgccgtctggaacttcctgcccagttatctgaacgaactgcgtctggcctccaatccctggacctgcagctgtgaattcattgataagcttagggactacataaatcgtcatgagtatgtggtggacaagctgaagatgaagtgcgatgtgatcagtggaaatagcacccagcagatggtcatctacccgggatccggagaacctgcttccctgcccgttgttcagtgctctcagaccttgcccttgggtctggataacaactttaactatgcagagcaggctggtggcgagaatgcctcgaatgccacctccacgaaaatgatcctaaatcagccgccgaaactggattacatacccatcctggtggccattctgaccgccttcatattcgtaatgatctgcatttcgctggtgttcatcttccgtcaggagatgcgtgtgtggtgccactcgagattcggagtccgactcttttacaacgcccaaaaggatgtggacaagaacgagagggagaagctgttcgacgccttcgtttcgtactcctccaaggatgagttgtttgtcaacgaggagctggctcccatgctggaaatgggtgaacatcgctacaagctgtgcctgcaccagagggactttcctgtgggtggctatctaccggaaaccatcgtgcaggcgatcgacagcagccggagaaccataatggtggtcagcgagaacttcatcaaatcggagtggtgccggttcgagttcaagtccgcccatcagtcggtgctaagagatcgtcgccggcgattgatagttattgtgctgggcgaggtgccccagaaggaactcgatcccgatcttcgcttgtatctgaagacgaacacgtatctgcagtggggtgataagctgttctggcaaaagctgcggttcgctctaccggatgtctcctcatcgcagcgatccaatgttgctggtcagagttgccatgtgccgatcaaccacgcctcttaccaccaccatcaccacgtccaccagcaggcgatgccactgccccactcggtgcatcatcatcagcagcagttcatgctgccaccgccaccgcagcaacctggcagcttccgccggcaaccatcgttgcaccaacagcagcagcaacagcagcaaattcgcggcaacaacaacacgacgcagcagcagcagcaacagcaggcggccttgctgatgggcggcgggtcggtgggtgggcctgctccacagatgattcccctggcgggtggcatccagcagcagagcctaccattgccaccgaaccagcaaccgacgccggcgtctagaaatctgcacatgtga

SEQ ID NO: 15102 - protein, 1346 aa, DROSOPHILA
MLATTHMLYVLIATCVIPIFGAALSKTVLYQAPDECRWSGGGEHDITLVCHLRTINSELENTNFSVIQPQNTVRLRLECNDALFFQSSLSPDSFRSLVELRDLTIEYCKLGNLTDGSFRGLQELRNLTIRTHNGDWSTMSLEMASNSFVEFRQLERLDLSLNNIWLIPDGMVCPLKSLQHLNASYNKIQDISNFYFSASLSSRKARVCGSTLQSLDLSANKMVSLPTAMLSALGRLTHLNMAKNSMSFLADRAFEGLLSLRVVDLSANRLTSLPPELFAETKQLQEIYLRNNSINVLAPGIFGELAELLVLDLASNELNSQWINAATFVGLKRLMMLDLSANKISRLEAHIFRPLASLQILKLEDNYIDQLPGGIFADLTNLHTLILSRNRISVIEQRTLQGLKNLLVLSLDFNRISRMDQRSLVNCSQLQDLHLNDNKLQAVPEALAHVQLLKTLDVGENMISQIENTSITQLESLYGLRMTENSLTHIRRGVFDRMSSLQILNLSQNKLKSIEAGSLQRNSQLQAIRLDGNQLKSIAGLFTELPNLVWLNISGNRLEKFDYSHIPIGLQWLDVRANRITQLGNYFEIESELSLSTFDASYNLLTEITASSIPNSVEVLYLNDNQISKIQPYTFFKKPNLTRVDLVRNRLTTLEPNALRLSPIAEDREIPEFYIGHNAYECDCNLDWLQKVNRESRTQPQLMDLDQIHCRLAYARGSSHVSLIEAKSDDFLCKYASHCFALCHCCDFQACDCKMECPDRCSCYHDQSWTSNVVDCSRASYEQTLPSHIPMDSTQLYLDGNNFRELQSHAFIGRKRLKVLHLNHSRIEVLHNRTFYGLLELEVLQLQSNQLKALNGNEFQGLDNLQELYLQHNAIATIDTLTFTHLYHLKILRLDHNAITSFAVWNFLPSYLNELRLASNPWTCSCEFIDKLRDYINRHEYVVDKLKMKCDVISGNSTQQMVIYPGSGEPASLPVVQCSQTLPLGLDNNFNYAEQAGGENASNATSTKMILNQPPKLDYIPILVAILTAFIFVMICISLVFIFRQEMRVWCHSRFGVRLFYNAQKDVDKNEREKLFDAFVSYSSKDELFVNEELAPMLEMGEHRYKLCLHQRDFPVGGYLPETIVQAIDSSRRTIMVVSENFIKSEWCRFEFKSAHQSVLRDRRRRLIVIVLGEVPQKELDPDLRLYLKTNTYLQWGDKLFWQKLRFALPDVSSSQRSNVAGQSCHVPINHASYHHHHHVHQQAMPLPHSVHHHQQQFMLPPPPQQPGSFRRQPSLHQQQQQQQQIRGNNNTTQQQQQQQAALLMGGGSVGGPAPQMIPLAGGIQQQSLPLPPNQQPTPASRNLHM

SEQ ID NO: 15103 - DNA, 3446 bp, DROSOPHILA
tgaggctccatttcggaatttgctccctgggaggggagaagtacaattaagacgatcgtgctgcgcattcggaatttgacaaaaataccatgtgaacttttaccaacgtttttttacgataaagatttccatgttaattcaaagaagtatttaagtgcgcttactaatggaataagaagtcctcgtaaagcagaattatagcaaataaaaaatcgaagcccagtgctcactggatcattgacctcaagaaccttttccttccgccgaacgaaacatcaaccacaactggtcgcattataaattgattacaactcgcaacgtgactaatgaacattaatttgtccaactccttgacaaggaggacgcagttgtgccaccgaagatggggctaaatgccagcacgtgctgtgtgtgtagttctagtttagatgccgccacgatgacaactaggcgtatgagcaacaatgcccggacaacgttggcggactccgccatcccatcctgccgccacacatccctccagtgccgcattctgcgttgtgtgggtgtcgtgtcacgtaaacgtgggtaaatgttgcacgtatgaacggcattgttgtggatggctggcgagcatatggaggacactccggctattactccacacgcacccactctcgactaccctttaatcgtgattgcaatcattgtggaaattgaatttgtaagtaggcaattttagaacgatggcaaggcgcaaaaataagaataacgcgactcaattaaactgaataaaagctcgatagatattactctcacaaccctctaccttaaatcatactagcactttacaagaacaacctcattttattctttatgtgctttgaaataaattaaacgatcgtaattgcctcataaaaagcacgaagtttttgcgagtgtttgattatgactagtcctttagcccaaactaacactcaggcggagcacccacgatttgcataaatgctttgagccaagtttatggctgacttgcgattgcatcgacgatgagttgtgcctcagatgtctgaagacctggggcaaggggtcacaggtcagaggtagcggtttcgatgttttctgttccacttgccaggttattagtcgtttggctggcacatttggtttgccattaaaatcatttgcatagtttgtgtttcttcagccgcattggtcttcgtggcaagcttgccttggtttgcattattaaatataacgcatacgcactgttgacctgtttttgagcgagcagctctgtgtgcaatcaatgcggaattgaatgcctcatgaaggtgcatgcgccgtttatttagcctgactctggtcgagtttgcttagcaaataaacaagagtccgaggccaggagtctggaagctaccaattatttgactagtggacaggatgccattgaggtcacacaggttagaataggtgggttggaaagcaaatgtttgaatagacggtttcggagctaaatgacataagataacttagattcaagtttggtggttcggtataaatgaaggaaaataatcaatattttaatataaatcttcgttatatttattgtgtgcttctgttaccagaaaagtatataattctttcttttgtgttaaaatacatatacaaaaggtaatactacttttggctgacacacattgcttctcgcactcattcatcatcttcaatttcaatgtacccaaaattaacacgaagctgctcgaaacttaaaaaagtaatgaccgtattgggtaccatgcgcaaaacatagggcaccataccgcgaaaaggtccgcgacttccgaagcgcatcatataggaaatggaatttatcaatcttcttgaatccaccattctgaggtatctcaagttctcaatgggcttgatgattggaccgcagacgaaagcagccgtcacggaacttatcaggtgcagcaatgtgttgtcgtgcttcatgtgaaaaaattctgcgtagatctgcttggcctgtggaattgaacagggaatcaaataacattcatattaaagttatatatttataaaaccatacctgatcgtaagcagcattttggctgatggtgatgaggctggaccgcataaaggagaggaaacatccgctgtacagcttcgtaaagccctcttccctggtcacacggtacagtccatcgaagacgtttcgatagttccaccgcgtttccttgggcagcgcgcgattgacctgcatccgggtgttgatcaactccatgggtgtacccaccacaccagccacacaaccagccaatgcagccaccagcactttgtccaacaaaccagcaggatcatccaggtgctcctttcccatttcgtacaggtgaaaccgcatcgaggtgtatgtcagctgtctcaataactgggcacttaatccatcgtatagtgaaataaaacctaggaaggaaatttcctatcaaaacaaagttctgcattcacacacaagtgtgccacaataggatcctaattgatttttattacagcaaaagttagttttgcaatcttgtataagtatttagatagtgatcctatcctaggtcgctagtgattttatttatagcttgtacccataattaccatgcgttcgaattgcctgttggagatttgaagccattcctctgtccttcttgataaccaccattcgagcctcgatcagatcgaaaggtgccgtaaagcattgcgcaatggcacctgccacaccgccactccaccaccgtggacgtattctgaaaaagttggttaaaaacagatgttaaaggactctaaaggataggactcacatcgttttgatcttttcgtctttgggggcttcaaaccgaatagccagcttgctggatgttgtcctatccgccactttttcgtctttataactctttttgctcgtatgtccatcaatctttttttttctgtttcgaggggaacttttccggatgggattaatttgacagcaaagtgaatgtgtacttttgagtatttggccgaaacagaaactgtcagctctctgtgctttcggacataaatatttttagatggccagatcaggctgttattcactcatcgaacacttatttttttacatcaaaatcatgttagtacgggtacgtactaaaatccaaaaaatccaaaccaacgaactgatttttaatgaaatagtcgtatgacttatagtttcgtatgtgtttccttattatttgtggtttcttagcatttccacttaccaacttgtgggacttctcattgacatgcgtcgttcacaacatcatgctgctaaggagaacgatccacgttgcccaattgctggacaggagtccgaactaattggcccaggacctcctttttgttgctccgcagttgcccagcattctaagcggtgctccgggatggaaaggagccacatc

SEQ ID NO: 15104 - DNA, 636 bp, DROSOPHILA
ggttttatttcactatacgatggattaagtgcccagttattgagacagctgacatacacctcgatgcggtttcacctgtacgaaatgggaaaggagcacctggatgatcctgctggtttgttggacaaagtgctggtggctgcattggctggttgtgtggctggtgtggtgggtacacccatggagttgatcaacacccggatgcaggtcaatcgcgcgctgcccaaggaaacgcggtggaactatcgaaacgtcttcgatggactgtaccgtgtgaccagggaagagggctttacgaagctgtacagcggatgtttcctctcctttatgcggtccagcctcatcaccatcagccaaaatgctgcttacgatcaggccaagcagatctacgcagaattttttcacatgaagcacgacaacacattgctgcacctgataagttccgtgacggctgctttcgtctgcggtccaatcatcaagcccattgagaacttgagatacctcagaatggtggattcaagaagattgataaattccatttcctatatgatgcgcttcggaagtcgcggaccttttcgcggtcttcagacatctgaggcacaactcatcgtcgatgcaatcgcaagtcagccataa

SEQ ID NO: 15105 - protein, 190 aa, DROSOPHILA
MRFHLYEMGKEHLDDPAGLLDKVLVAALAGCVAGVVGTPMELINTRMQVNRALPKETRWNYRNVFDGLYRVTREEGFTKLYSGCFLSFMRSSLITISQNAAYDQAKQIYAEFFHMKHDNTLLHLISSVTAAFVCGPIIKPIENLRYLRMVDSRRLINSISYMMRFGSRGPFRGLQTSEAQLIVDAIASQP

SEQ ID NO: 15106 - DNA, 2618 bp, DROSOPHILA
attgcacacagccgctttaaattgcgcagccaagtatgctacgcatttgcgtttgccttttgcccgacatggcatagtggctcctccctttgccatccgagatccacggcatgccattagggtcggggccaagccagcagctcacccagtgacgaactggatggtggccgggattactggggcaacctgccacatgacgcaatgggcaagcgaattaccgaaatcgtgaaatatgtatttacaacgccgttgctaatgcgccgtttcacataaacataaagaacgagctgccagtttttctttcgaaagcccatttaattgtccgtggccccccaagtagcgccaacaaatgtctttttaatcacgtccaactgttgtcctgccaacgcgtttgatttgaagttatgcgatggccgtgcgactcttaaggatgcacgctatccgtatcctgtccacagacaatggcgcacactctgtcaataacatgggcccacattatgattctcatttccattttcagttttctgagaacatgcgacacgcacagggatatggatacggatgtgggtatgggtatggtggtatggaaataaaggggtaactaggtggagatggaaaccaggacattgtatgcccaccttttacacaacttgttgttttgcgcgctttatgagctcttccccgcaagacagggccaataaaacgatccacatgcgacgataatcgtaaaaaattattttaatgccccaccaacgaacctaaatgcgcaggaacccaagagcccaagaacctaggaaccaaggaaactacgaatcccggtcgcccccaactcacacgcgccataaatagggccctcaacttatgtatttgtaattccaactaattgaaggctacagaagatgggggaattgggacagctaagctaatattaggcggttacttataatgtccgagaacgcagctccctccagtgggacaggtcgttaaataagccaggcgtttaggcatttagtggttgccgtttaccgggaggactccactcaccttgcgagaactgaaagagcttgcagaggaactcgccaaagatgaagtttcgcagcagggtgcccaccagggtgacgggcatgcagagcacgcccagcagcatgtccgatatggccaggttgagcaggaacacgttggttatggtacgcatccggcgattctgcaccagcgtcgagatgaccagcaggttgcccagcacggcgaacagcagaatcatgctatagctgggtatcagccagacgggcatgccagtggaagtactggagctggaagcgggtgtggaactgggacttggacttgaactggtgcccagggagaaggccagttcggtgaccaggtcactgggctcggtgtccatatagccatccctatcatcatcgccatagctgcttgtcgcattgcccgccaaggagacagtgcctccgtttccagttccattgtagggtgccacgttgagcgacactatgtgacccgccgcacttggcgcattggcatagtagtcgagcagtgccctataggcagccgctgcagccatggccgcctggtcggcatccccctcctcgtagttgaacatcccggatgaccgggtgattcgtggcaatcactggccaccaccgcctgacatgtcccgttgcgggtcaccgaaaaaaataaaataaaatttcactcaattgctattgaaacggcgacgcttgcgcgcaggctggcaaagattgcgatatggaactcgggggtatccgagcacacgagctggcggctttggctgccaggagagggctcgcctgctaccgttgcgggtaacgcgtcgtgggcaactgacgactggcggacgaggacgacgcctccgctccgctgggctagctgccgcaacatgttgcgtgggcgatgccgaatggcgcaaactcaccacggcaacttgtggctagcagcatgctgccaggcagccctgttgccgggcaactcccatgttgcgcggaggacgttccctgccgattgggacaaattaatacggtgcactgcatcatccatggcgtctgcagcggcggagcagctgctgttcggcccacgcaccgcgctaatcatcaaatcagccgcattcctacggcacttgagtgccagagaatacaatctcggctcgttatgtgtttgcacaaatgttctgcgctaattccacggatcgcattcccagccgacaagctggcagggatcagtgctgatctagacatagttttggatatatagcgattccgattagcacctatagcatctatttcaaagactaccttttcgcttgcaattgttgctcgttttttcggcgcaggaagtgaatggaatagccctcgatgaaggaaaataacatgaccgggagctgcagtggtaagacgtgactccactgggatactggatatgactatgccaggaatccgtgttgccgaagaaacccaataaatccaataaattcatgttttgatagaatagatagaattcacttctcgtaagcctcttcaccatcgaggaagagatcttcttcaagggattcagctgatccttaaggacgtacatagtttagatgg

SEQ ID NO: 15107 - DNA, 618 bp, DROSOPHILA
atgttcaactacgaggagggggatgccgaccaggcggccatggctgcagcggctgcctatagggcactgctcgactactatgccaatgcgccaagtgcggcgggtcacatagtgtcgctcaacgtggcaccctacaatggaactggaaacggaggcactgtctccttggcgggcaatgcgacaagcagctatggcgatgatgatagggatggctatatggacaccgagcccagtgacctggtcaccgaactggccttctccctgggcaccagttcaagtccaagtcccagttccacacccgcttccagctccagtacttccactggcatgcccgtctggctgatacccagctatagcatgattctgctgttcgccgtgctgggcaacctgctggtcatctcgacgctggtgcagaatcgccggatgcgtaccataaccaacgtgttcctgctcaacctggccatatcggacatgctgctgggcgtgctctgcatgcccgtcaccctggtgggcaccctgctgcgaaacttcatctttggcgagttcctctgcaagctctttcagttctcgcaaggtgagtggagtcctcccggtaaacggcaaccactaaatgcctaa

SEQ ID NO: 15108 - protein, 205 aa, DROSOPHILA
MFNYEEGDADQAAMAAAAAYRALLDYYANAPSAAGHIVSLNVAPYNGTGNGGTVSLAGNATSSYGDDDRDGYMDTEPSDLVTELAFSLGTSSSPSPSSTPASSSSTSTGMPVWLIPSYSMILLFAVLGNLLVISTLVQNRRMRTITNVFLLNLAISDMLLGVLCMPVTLVGTLLRNFIFGEFLCKLFQFSQGEWSPPGKRQPLNA

SEQ ID NO: 15109 - DNA, 4082 bp, DROSOPHILA
aactcctccaattccaccgagctcgttggacaatggcaattcgaatggcatcgtgattaactgaagacagtgtgagtcctaaatgaaggattgcattcgattatccttgttactaatcattaagttcgaaatcacctgggaacaaacagtctccaatggccatcttggtttctatgtctatccgacagtacctaaaggtatccaatgagagtaattttgccgaatcaaagggaggcatacattttcgaaacggcaatctgtacttcttctcgccacatctttgattggaatcgcttttcgaataagcgcagttctccaaatagaaggggtttttcgacccatagttagatttagttacatacgaattggcttttcaattcacaagggccactcccttcctgtgattgcaccacgtgcttccaatttttcaaaggattttcactatctccaaaggactcggtgacaatagcctaccgctgcagcttgcagctgatgggtttgtctctagtgagggaaatcgcgggcaggcagtatttcgtagagctacgtagcttcttacaatctctacttttctcggatgatggtaggaatttccgcagaggctctaccaaagcactgctttctcccaaggatctgatcctgaagcttttgatcacagtttcgttttgatgggtctctacgacggcggatattttgagggtaccactgcccaggtattcccgtatagcctatagtcatagaagggacacttgtccccttcgaactcagtgtaaaagagcaccgacctaatacgatgatcttctattttacttattaatagattgtaggcagcaaaatgtgtggccatcttacctggaagcgatgcccagatccatgtatcgttttcagtgacattcaccaaaagctgaagagcctgaaaggaatcaaagccgaccaactggcttagtattaatgcccagactcatctccattctgtcagataagcaaccatactgaagcatttgatttcactgagtttctcttaggactttatttatttatagatttatagatttcgatcggcacgttcacttatgtgtaattttataaacatctacctaaatcatggattttagttatcagttggcgaagacacgaacataatcgatcttcaaggccggctgtttccatgtgggtagccactggtcttgggcctggtggaactgcagcttcgcctggggatgatagttggcccaaggcttctcataagtggcggtgcgaagatggtccacaaagtcaccaaatccgcccacagagacgcccaacgaaatgtaaaactgaaatgggagataaatttgaattaaacttgttaaatttagatcactaggcttaccattttatcgaacggggccatgggaccgccctgcttccacctgggattctcgtccagttcagtgaaaccattcagcatctctccatagacctgaccatctacggagaagagcagcctattgctgctccaatccaagctgtaggtgtgaaagtcatcgccgaaatgggatatctttcgcttgctcagccataagtcctccctttggtgggcatccgtggagagtacgggtcctccgtatagggatctaccatctacaagctttccgcgcggcatcctcagcacggagttacccctggccaaggccactcgcagctggccggattcgtagcccgattgcccgtaccattcggtgaggggttcgagtagtaggagtggtaccttatgaagagtgggaaatattaatttcaaagctaagacgttgtagttgcataatctcacttactatccaatctccctttggtagcttggcacggatctcaatgcgtccgtattgaaaggcaaaggtttccttggtgctgattcgaggtgttacaattgggggcattatcccactgggtccactgcccgtggaatgcaggatgcattccttaattctgttatgggttccagtacaacgctccgatagatcgagcctggagttggctatggagagatccgggcgatagctggaccaaagaagcggctcaatcaccaggttgccatcgtgaactttggccttcccgtcgtacaagacgaactctgcatccttggagtcgaggggcaggcgaacatcatgtatccacagagattcattcagctgatcaaaagtctcctcaaacaaaagttgtcccttacatatggaaacaccgatttgcggcgaaacctggctttcagaaggttcacagacggagggagcggtgggttccaaagcactgtcctcagtacttagctggttgtcatccgtaaagtcatcatcaccgggcgaacatcccctgggccgatactctccgccgagattgcagactggcaggggctgcgccagatcttgatacacagccttttggtgctgcacacttgtccaaaggtatagaacatcttgggatctcaagggaaccgaactgaagttggtcgtccacctgccgttctggggttcagtcaatctcacattgtactgtccctcgtttatgaaggatgtgaaattccgattgcgatttacattaaaggccaccacttttacgccctcttcatctaaaaagaaaaacaaaatcggataaattagcaagttcatttgctaatttgtagctgattataactataaactgtcaacattgttcggttttttattgctccccagagatcgtaaggttaagaaaaagattaagaagctatgtactacgaggctggctcattccttacttacccggtatggaaacgctaaatccagtctcaaggagctccacagtcggtgtggggatcttgtaggcagtggtgcatccaaaaccaatgagcagaaggattccaatgcacaatcctggcattttgaatcctcgagttcagcacttttcgacaagaatcccgagcctctgactcaatctgtgtgtctatctcactggcagaccggtttctgtcgctggtgaggagcgattactattatttgtttactttaagttggtccggacaatcgcgattcggcgaatgcaaatccacgttgatatcagctccggctgcgatctggcctctctgggatttggacattttttaatcattccgtagaccccgaaaaattagttctaacgttgcccctcctcagtgatccaccttcgagtggaagcttaaacagctgatgagataacaaaagctcgttttacacgactaaaaatgaatgcttacaatttaaaaaaaaaaatcaaaatattatttttcaaagaactaggaattaaataatgtattaatgggcttttattctccttattccgcttactgttaaaataaaagttcattatatttataattgaataataattgaacaaagttaatatttaattcgagtgcagctttaatcgagaaaaacttgaatcgggacaagcttttgagatcaatattttcaatctgatgcaacagtcccaccgcagagcttctcagattaatacgctaatcggattctagttagtacacatattaagagtaattaaaactgcgtcatgaggtgggaatttctgccatgtttattattgctcatttcaaacaataaaatctttggttttaaagtacccagtattaattttgaaatgctaaaggatgaaggattcgaagtgtccataccaggtgacttctacaacacttctatggttaaataaataacatcataaatgtcaatggtttggctaatttattcatatggaaaaagctttgaagtgtatttgaaaatccactataggttcaatagtaaaaactacgtatataaaacaaataaattggtggattagcaaaatcagcctagactaagtcttatttgaataattacttttagtaacgacacgttgttgcttttttcatatcgatccagatgagcctggcatacagcgggtgttctacatgttccaaattgacgacacctgcccggctctaatggactacatcacggaggcagtgaacggaagttgggtctccaagcaaaagatgagtctgcagaacaacgacaagctgcagatatcaatgctggtgcagttca

SEQ ID NO: 15110 - DNA, 1790 bp, DROSOPHILA
atcgcagccggagctgatatcaacgtggatttgcattcgccgaatcgcgattgtccggaccaacttaaagtaaacaaataatagtaatcgctcctcaccagcgacagaaaccggtctgccagtgagatagacacacagattgagtcagaggctcgggattcttgtcgaaaagtgctgaactcgaggattcaaaatgccaggattgtgcattggaatccttctgctcattggttttggatgcaccactgcctacaagatccccacaccgactgtggagctccttgagactggatttagcgtttccataccggatgaagagggcgtaaaagtggtggcctttaatgtaaatcgcaatcggaatttcacatccttcataaacgagggacagtacaatgtgagattgactgaaccccagaacggcaggtggacgaccaacttcagttcggttcccttgagatcccaagatgttctatacctttggacaagtgtgcagcaccaaaaggctgtgtatcaagatctggcgcagcccctgccagtctgcaatctcggcggagagtatcggcccaggggatgttcgcccggtgatgatgactttacggatgacaaccagctaagtactgaggacagtgctttggaacccaccgctccctccgtctgtgaaccttctgaaagccaggtttcgccgcaaatcggtgtttccatatgtaagggacaacttttgtttgaggagacttttgatcagctgaatgaatctctgtggatacatgatgttcgcctgcccctcgactccaaggatgcagagttcgtcttgtacgacgggaaggccaaagttcacgatggcaacctggtgattgagccgcttctttggtccagctatcgcccggatctctccatagccaactccaggctcgatctatcggagcgttgtactggaacccataacagaattaaggaatgcatcctgcattccacgggcagtggacccagtgggataatgcccccaattgtaacacctcgaatcagcaccaaggaaacctttgcctttcaatacggacgcattgagatccgtgccaagctaccaaagggagattggatagtaccactcctactactcgaacccctcaccgaatggtacgggcaatcgggctacgaatccggccagctgcgagtggccttggccaggggtaactccgtgctgaggatgccgcgcggaaagcttgtagatggtagatccctatacggaggacccgtactctccacggatgcccaccaaagggaggacttatggctgagcaagcgaaagatatcccatttcggcgatgactttcacacctacagcttggattggagcagcaataggctgctcttctccgtagatggtcaggtctatggagagatgctgaatggtttcactgaactggacgagaatcccaggtggaagcagggcggtcccatggccccgttcgataaaatgttttacatttcgttgggcgtctctgtgggcggatttggtgactttgtggaccatcttcgcaccgccacttatgagaagccttgggccaactatcatccccaggcgaagctgcagttccaccaggcccaagaccagtggctacccacatggaaacagccggccttgaagatcgattatgttcgtgtcttcgccaactgataactaaaatccatgatttaggtagatgtttataaaattacacataagtgaacgtgccgatcgaaatctataaatctataaataaataaagtcctaagagaaactcagtgaaatcaaa

SEQ ID NO: 15111 - protein, 492 aa, DROSOPHILA
MPGLCIGILLLIGFGCTTAYKIPTPTVELLETGFSVSIPDEEGVKVVAFNVNRNRNFTSFINEGQYNVRLTEPQNGRWTTNFSSVPLRSQDVLYLWTSVQHQKAVYQDLAQPLPVCNLGGEYRPRGCSPGDDDFTDDNQLSTEDSALEPTAPSVCEPSESQVSPQIGVSICKGQLLFEETFDQLNESLWIHDVRLPLDSKDAEFVLYDGKAKVHDGNLVIEPLLWSSYRPDLSIANSRLDLSERCTGTHNRIKECILHSTGSGPSGIMPPIVTPRISTKETFAFQYGRIEIRAKLPKGDWIVPLLLLEPLTEWYGQSGYESGQLRVALARGNSVLRMPRGKLVDGRSLYGGPVLSTDAHQREDLWLSKRKISHFGDDFHTYSLDWSSNRLLFSVDGQVYGEMLNGFTELDENPRWKQGGPMAPFDKMFYISLGVSVGGFGDFVDHLRTATYEKPWANYHPQAKLQFHQAQDQWLPTWKQPALKIDYVRVFAN

SEQ ID NO: 15112 - DNA, 6357 bp, DROSOPHILA
acttcattcttcataagaaatataagcacaggaatataaaaaactaactggcgcaaaatcaaatcaaatttgtgtgtaattttttcgtatttcatttgtttattttacaaaacgttcagctaatgccttgacattcatcgaaaaagtctcatttgctaattgcgcgttgtttttgcatcttttggaattgtgtaggtttatatacaaagaccgctgctacataaataatacatatattcttgtacctctcaacaaaactcaacttacataacgcagagcaaagtagttgcattaaaaaataaatctctatgccgcctggcattattaacattccttcaattcaaacatttagacacttatatgtggaaattgcttgagtgctatgcatttcgtctcattgctttgctttactttgctgtcacggtttaactacaattttgctatcgtactatatatttagttaaatatttacttgttgcataatacttcgcctgtttcggttgtaacactcacacacggaaacacagatattcctaatgcactccaagcaaatctattaagttaggttcttacttagcattgctatataaatattttttgatgttttttcattttgatttagttagttgttatatatcgcctaaggtaaactgctcacaattattttatacgtaattcttttaatattctttaaaatgtatacatatggttgtatatttgtataaatttgtttcgtataattggttgtgtgtgtctttagtgtgttgttgtgtctgctaggaaaatgcaacgactttcagccgttatctaggagctcacagaatcgaaccccgttctcaaaaccaacatgcatttgtgtaatcaacattcaacaattcactcactgaatacggctaatctaataaaaagacacttttttcttgccatttaacaaatggcctatccctctgacaattctggctgctctaataccctgtgactctagtagttcgctaagtttctacatcaggacgcaacacctgcgactggaactggtgctatcggtgaccacgtcgccagtgatgccgctgaacttgttcagcgaactgcccgccggcgaggagccctcgaagtcggatagcacgcttcccgcgcccatgtgacccaatgttggctgcgtcgagatcggtgcggatccgttgttgttgttgttgctggtgctcaggttgttgttgttgttgctgctgctgccgccggctcctaaaacagaaccattagttgttgtggcattagctgctgcaattggatgggcattgctagctgtttgggatgacaattcgaaagtattgaggacattggcggtgcgtgaaagcgagcgttgcttcttcaaattggccaatgtggcgctgtagccatccaaggcaacatgctgctgctgctgctgctgttgctgttgctgctgatgttgctgaagctgctggtgttgctgcaacagcagtacgtgttgctggtggtggtgttgctgctgctgctgctgctgctgttgatgttgctgatggtggtgcgtgctattggtgtctggatgttggaagtttttggcaaggcgttgggtgtgtttggtgtttagtggtgcggtggttgttgtttttattgttgatgatgatgcgggcaggcagacgacacagaacgggcgaaacgaggcacaacaacgacaacaaaaaagaatgaaacggaaacaagcaaatgttattttacttttcttctcttcttttcccgagaactaagttagcagatacccattgaccaattgggagtgatcgggtagatgggatggaggttacatgcgagtcaaatgctaatgcttattgcagccatgctcccctgttttctaagtacgatttctagtatcagaaaacccatttagtgtagtaagctattaaaatggcaataatttacataaatagtaatatatgcttacgctattccactttaggcatttaaataaagaagtcatttacaaagcatatttacaacataatgaaataaaaagtatcttactacaacaatgactgtcatttccataaaatatatctcaactaagctatgcatctcacgaagctatcctattaaaaatctcaaaccaagatatcgattatcatttcctacagggcattcgtcattctatagtctactcatgctgttagctctgcttgcttgttggaagtattttcatttccattttagtagagtcgttaaataaacattaaacattgacattgacacggggacagaatggcgcttaagcagaactcttgtgatacgttgacgctccttgggagccaaacaggatggttggaggtggcgtctggatggggtgcttgagtaaatggttggctttggttgaaaggagaaagcggaagcaagcctgacacgtggccaagggcgcttgactcacccacgaggacggtgacctggacattgatcttgccgttggcagcctccttcgacgactggatttgaacggcctcggcactggccgccgtacccttctcggtgagaatgacggccgccgccgaggtggctcgctgcatctctcccgcagcacctgcagctttcaggcgtagcagttcatcgttttcccggccatccggtggacggcgcgacggataggaatgtgtggcgttggccgacaaagcggcggtggcattatccagcgcatcggcggacttggagtgcggcagtggttggccattcgaactgcccgtcgagggtcgcttctctccgttgttgtttccgtaaccatagccattggtcagcggatcccctgccgatgagggagcctccgagtccgtcgcctcctgcgcctgcagacgcagccgggtctcctcgacggcatcctttttggttgtcagcgttttgtctcgcaaactagtgcgtcgcactgattgggctctgtggaaagcatagttagttttaatggttatgtttaatggctcataaatgttatgtaaatgccttgtgttgttgctctgtgagcgtcgaacgcgtcgtcgctgcgcctcggccagtcgtttgctctcctgctccgtcttcagctgttcgattcgctccctgatttcgggatcttcacagatgtctacaaaggcggatggattgatttgttaatatccagttaaaacgtttaagtgtattcttatgtttatggcaactaacatctaaatgaacgtatgtactatatgtgtttatttgaaatactgagctaggaggaactttacggaaatgggtaacactttttcgagttagccattataaatcgttgatcctgccaagctaaaaaattaatgcaatctttcttcacacctgagagcgctttcctcctactcctactacaaatagtctagatttacacattttccgtgtcgcattaacaacaatttatagctcaatttcatattcatggttattttgctctagccggataaccgttgattcagtgccgcaaccttttcgcatattctcacctgaaggagtctcgtcgtccttgttgcgaacattcagatcagcaccacactgggccagcatctccagcacctcaagctgaaagaaggaaatatttaaaattattattcccatttttcggcttcgaggcttcacttacatgaccccaacaagcggcggcatgcaccggtgtccacagatccttgtccatggcatccacgttgacatgctgctccaacaaaaactccacaacgcggacgtatccattcgcagcagctatgtgaagctgaacaattgagataagttaaatgttgcacacagggaataagtgaggatttaatgaattgtggattcttttttgtgtaggaattattctttgaattaagttttatttgcttctttctgggatcaaaattcctacgttttgttcctcaaagaagacgccacttaccggcgttgcacactggtagtccggctcctccaaatctcctcctgtgcgcgccaactccattaggtcgcgcagcataatccgctccgtggaggagcgcgtctcgtcgatgagctcctgggtcacgccccgttgagccatctcgccctcgatgaagtccaaggttttctcatcgtcgcacaggtcgtagggcatgttgccgtcggtgttgacggccagcagattggcgccgtgccggatgaggatgcggacgagctcgaggtggccgcaggtggcagccgcatgaagcggcgtccacttatcactgtcctgcgcatccacattcgcaccgtactccagcagcagctgcagcatctcgacgttgttatcgatgcacgcctgatgcatcgccgtcagtccatcctcgtttgcggcatccggcgtgattccgtgctgcagcagggcggccacctcgggcatgtcgttccgggatgccgcctccaggagcaccacgctgttctcgaaggatatgtgccgcctgccgctcaacgtgcccgaaccattggcgtgccggaagtggtgcgtggtatctccgttgccgttcatcagcccgttgcccagcgatccggttccgctgccgccgctcgccgtgttgcccttcgcccgctgcaacttggcccactccttgtccttctggcgggacagcttcagctgctgcgcacgacgtctaattaacaataagggattgaggatgagatttgggattagttgtggaagtttaatggctttcaaaatgaagaagaggcggaagttaggggatttacttagacaaaagccatcaatttcttttcctattcggagttttattgaaaaaaaaaaaaataggtggcgaatttttattgtctaatccaaattaactaagatttgaattggaaaggttcgcctttattaagttgccggaaaaaataaccgacgattatcaaacttcgcaattaaatcatttgttaaatatatctgctcataataaagtgaattaaacataaaagaaaagcaagcgaaaaataaaaaatgaaataaaaaatttgacaaaataatgtacataagtgatcgaattgttggcttgagaaatatctacttaatcaaaatagccaacataatgctgttaataaaatatattcgaatctctacgaaaatcaggtaataatatttaaaaatttcaagttcatgtgtatcctatgtatccatgtgtatcctataaagtttatgctatatactaatatactaatcaagtgcatggtggaactcacagtctggccagctggagtcgctcgtgggtgggcaggctctccacggtctgcatctcggccaccagatcggcgtgctccatcttgagctgcttggtgtagctggcatcctcctggctcttgcgctgtatcagaatgcccttgatcatgttgatttgttgacttgaaccctatcctgcccgctcaatgatatgttttgcaagtgtgctccagagttattccgttcaattttatagcatttgacaacaatttgcgaggcttttgttatttgtgctgcagtttgtggtgatgttgctcgtctggtgcgcatgcattcgtatgcaaattgcaatttgcatctttgaatttgatttgattgcgggtgttgtctctggcggctcttatcgttgccctcgttgtttccagttgctcgatgctcgttgctcttggatgtagcagctgtttggattgctgcagcagctgtttcgctgttgctattgctgctgctgctgctgctgtggctgcggttcacttttcccagatcctttcactcctggtcaacacccgaggctgctctcatggcaactaccacgtttatccctcgtcctgtgcggttgtctggtcctgtcctcagtgtttacttatgatttgcttttcccagctgttgatgtttgccgtagctcgtttctctgcaacttttcgttgtaaactctgtaaggggaaaatcgaaaaaaaataaaaataaaataaaatacatataatatttcataaaactgtaaagtttcttagttactcccatctaaaatctagctgtccgataaaattaagcatgataaatgaatcctaaacgggtggggcctgggcaatcgagttaatggattcaaagttcatgaagcaacaaccattattccttttggtgcactttattttatagctcaaagatgattttcttagcttaggttgaggaaagtgttaaaatataaaagaaatatataggtataaaacacggttattatgccattcaatacaaaaagaagtgctatatatttatgttgtaattcttaattttgctagttagtacttatttaatttgattcagatatccttcgagcgctctaaattaaaacaatttcgctcatttttcatttgttagttacaatttaatcaaag

SEQ ID NO: 15113 - DNA, 2289 bp, DROSOPHILA
atgatcaagggcattctgatacagcgcaagagccaggaggatgccagctacaccaagcagctcaagatggagcacgccgatctggtggccgagatgcagaccgtggagagcctgcccacccacgagcgactccagctggccagactacgtcgtgcgcagcagctgaagctgtcccgccagaaggacaaggagtgggccaagttgcagcgggcgaagggcaacacggcgagcggcggcagcggaaccggatcgctgggcaacgggctgatgaacggcaacggagataccacgcaccacttccggcacgccaatggttcgggcacgttgagcggcaggcggcacatatccttcgagaacagcgtggtgctcctggaggcggcatcccggaacgacatgcccgaggtggccgccctgctgcagcacggaatcacgccggatgccgcaaacgaggatggactgacggcgatgcatcaggcgtgcatcgataacaacgtcgagatgctgcagctgctgctggagtacggtgcgaatgtggatgcgcaggacagtgataagtggacgccgcttcatgcggctgccacctgcggccacctcgagctcgtccgcatcctcatccggcacggcgccaatctgctggccgtcaacaccgacggcaacatgccctacgacctgtgcgacgatgagaaaaccttggacttcatcgagggcgagatggctcaacggggcgtgacccaggagctcatcgacgagacgcgctcctccacggagcggattatgctgcgcgacctaatggagttggcgcgcacaggaggagatttggaggagccggactaccagtgtgcaacgccgcttcacatagctgctgcgaatggatacgtccgcgttgtggagtttttgttggagcagcatgtcaacgtggatgccatggacaaggatctgtggacaccggtgcatgccgccgcttgttggggtcatcttgaggtgctggagatgctggcccagtgtggtgctgatctgaatgttcgcaacaaggacgacgagactccttcagacatctgtgaagatcccgaaatcagggagcgaatcgaacagctgaagacggagcaggagagcaaacgactggccgaggcgcagcgacgacgcgttcgacgctcacagagcaacaacacaaggcatttacataacatttatgagccattaaacataaccattaaaactaactatgctttccacagagcccaatcagtgcgacgcactagtttgcgagacaaaacgctgacaaccaaaaaggatgccgtcgaggagacccggctgcgtctgcaggcgcaggaggcgacggactcggaggctccctcatcggcaggggatccgctgaccaatggctatggttacggaaacaacaacggagagaagcgaccctcgacgggcagttcgaatggccaaccactgccgcactccaagtccgccgatgcgctggataatgccaccgccgctttgtcggccaacgccacacattcctatccgtcgcgccgtccaccggatggccgggaaaacgatgaactgctacgcctgaaagctgcaggtgctgcgggagagatgcagcgagccacctcggcggcggccgtcattctcaccgagaagggtacggcggccagtgccgaggccgttcaaatccagtcgtcgaaggaggctgccaacggcaagatcaatgtccaggtcaccgtcctcgtggacaccaatagcacgcaccaccatcagcaacatcaacagcagcagcagcagcagcagcaacaccaccaccagcaacacgtactgctgttgcagcaacaccagcagcttcagcaacatcagcagcaacagcaacagcagcagcagcagcagcatgttgccttggatggctacagcgccacattggccaatttgaagaagcaacgctcgctttcacgcaccgccaatgtcctcaatactttcgaattgtcatcccaaacagctagcaatgcccatccaattgcagcagctaatgccacaacaactaatggttctgttttaggagccggcggcagcagcagcaacaacaacaacaacctgagcaccagcaacaacaacaacaacggatccgcaccgatctcgacgcagccaacattgggtcacatgggcgcgggaagcgtgctatccgacttcgagggctcctcgccggcgggcagttcgctgaacaagttcagcggcatcactggcgacgtggtcaccgatagcaccagttccagtcgcaggtgttgcgtcctgatgtag

SEQ ID NO: 15114 - protein, 762 aa, DROSOPHILA
MIKGILIQRKSQEDASYTKQLKMEHADLVAEMQTVESLPTHERLQLARLRRAQQLKLSRQKDKEWAKLQRAKGNTASGGSGTGSLGNGLMNGNGDTTHHFRHANGSGTLSGRRHISFENSVVLLEAASRNDMPEVAALLQHGITPDAANEDGLTAMHQACIDNNVEMLQLLLEYGANVDAQDSDKWTPLHAAATCGHLELVRILIRHGANLLAVNTDGNMPYDLCDDEKTLDFIEGEMAQRGVTQELIDETRSSTERIMLRDLMELARTGGDLEEPDYQCATPLHIAAANGYVRVVEFLLEQHVNVDAMDKDLWTPVHAAACWGHLEVLEMLAQCGADLNVRNKDDETPSDICEDPEIRERIEQLKTEQESKRLAEAQRRRVRRSQSNNTRHLHNIYEPLNITIKTNYAFHRAQSVRRTSLRDKTLTTKKDAVEETRLRLQAQEATDSEAPSSAGDPLTNGYGYGNNNGEKRPSTGSSNGQPLPHSKSADALDNATAALSANATHSYPSRRPPDGRENDELLRLKAAGAAGEMQRATSAAAVILTEKGTAASAEAVQIQSSKEAANGKINVQVTVLVDTNSTHHHQQHQQQQQQQQQHHHQQHVLLLQQHQQLQQHQQQQQQQQQQQHVALDGYSATLANLKKQRSLSRTANVLNTFELSSQTASNAHPIAAANATTTNGSVLGAGGSSSNNNNNLSTSNNNNNGSAPISTQPTLGHMGAGSVLSDFEGSSPAGSSLNKFSGITGDVVTDSTSSSRRCCVLM

SEQ ID NO: 15115 - DNA, 2338 bp, DROSOPHILA
cccaggtacttgagggactcttgggaggtcacctgtgtcgcattgacagaggactagcatattctccacctttttcctgctgcttagtacttactgcttcggtcttgcgagccgctattgctagcccggctttccagtggacggcagctccaatcgtggtgttacatttgtcctgcaactctgcaattgttttggcgactgctgtaattgccgcatcgtctgcaaaacagtgcagctctactcccaagggcctgttgatgctcctctactatcgtatcctcgtccagtccactgcaggatagtgctattctttgagctgccgcacagatgccaaatcattgaccgtcgcctctagatcgcttttatacttgggaaagcttcccgaggcttttcccactacttcgagcaacagctcatctagctgagttctccgaattcttctgcccagttcgctaaggctcgggtccgatcttagtttccggagcatctctgcgtaccaagcctcacccgtcttcttcacgatccgtgcctcaggctttttacgcgggcgcataggcttcaccttggtccaatatgcactcgtgctagcattcttggcgacagatgcgtagctgcctgtattggactcgtttgatctggatgtcgccttcccttctcctctaccagtcgtgcggtttgagcgccagaactttgggcacttgtcccttggacacctgcgcattgtgagaagcgtttttggtaggcttttgtactttagtctgggtagcaatgctcgtcaagcggtgctcgctagtgaccccttcgtacaactctatcatcttgttaagggctgaatgttcagaaactaggctcttggtctctcttgtgacggttatgtcggttaagtctcaaatgcggatagcagcaagtttatcttgccattcatcctggtgagtatgcacttcaggtcgttgttctggagagccgtggtcaggtccgaagaccgattaggggatccagctggctacatacgcaaccagatgggtgacgagatgtccaagcacaaaaagttcatcttcctgacgtggatcgggcaggaggtgggcgttatccagcgggccaagatgtccacggacaaggcgctgatcaaggatgtcctcaacgtgagtagccaatagctagagatgccagagcccagaggcagaaatagatcctctcatcactaatcttttgcagaattttgccgtggaacttcaggcgggagtggaggccgagctggacattgagctcttccgtgaagcactgaacctccaagttactttatatatactgcttaccaaactgctcctttctctttaattattatgaattaattttatgaaatttaaaaactgtacattttatgaaatattatacaagcaattgtaaaatcagtttctataccatacattttgttgtgtctatagtgggactgctgaatttctatgataataagacaaaaattttactcactaaacacaaaattctaaagtggacagacatggcagaattcacttaaactagtctagtttgctaaacatacgctggatggatcgactcgaattttataagcgcgaaatgaaaatggattacgttgttgaactaaatagaaaaaattatctagttgctgtagttcccgggctctgcctcgcacttcctagcgggccctgaagagtaccgagtgaagtgcatcgatgtccacctccacgccagacgagtttgtggtcacggtgcgagagctacggccgagaacgttgaacaatactgcgtgatatctttaaagcatatcactcacctggccttgtgcaccgagcgacgggaggagtgcggattgaccagcacacagtgcatgggctggtcatcgaactgacgatggtgataggtatctacggccttctcggcatgttccagtgacttgtaaataacttcggcggtgccgggacgcaccacacgagcgtcgtacactgggccgatgtcgctaaaaagctcgcgaatatccgcagtagtcacgttagtatgcagattgctcaccagcaggcggtatccatcctttgtgttcgacgtacgcagcgacaatggggatggcgaacggcgcttgttcttcgatggagcagctgcatcaccatcactatcagtaccgctatcgctatcactaccaccaccgccaccaacagcctttctccggttctcgttggcgtagatgccatgagaaatgtgaggatctctcttaccgacaaacagacgagaccgcagcgattctgggagtttacttgtgcttgctgtgtcgcggtggcggcgctcgagaggctccttggtggta

SEQ ID NO: 15116 - DNA, 265 bp, DROSOPHILA
tggctacatacgcaaccagatgggtgacgagatgtccaagcacaaaaagttcatcttcctgacgtggatcgggcaggaggtgggcgttatccagcgggccaagatgtccacggacaaggcgctgatcaaggatgtcctcaacaattttgccgtggaacttcaggcgggagtggaggccgagctggacattgagctcttccgtgaagcactgaacctccaagttactttatatatactgcttaccaaactgctcctttctctttaa

SEQ ID NO: 15117 - protein, 81 aa, DROSOPHILA
MGDEMSKHKKFIFLTWIGQEVGVIQRAKMSTDKALIKDVLNNFAVELQAGVEAELDIELFREALNLQVTLYILLTKLLLSL

SEQ ID NO: 15118 - DNA, 3764 bp, DROSOPHILA
attactgataagtaatgctgataaatttaactattaattaactttaataaaaaattttcatagaattgacccagcactgaagctctaaaacatcgaactgcccgcaacggactagcattgcccagaatatgtattgcattgaacttatatgcaacagcatctccagttgtattcaaatcaattttgaattgaccaggagaacaggaacattcactaaagcgacatccacagattctcctgcagcgcagttcgatatgaacttagaagtcgccctgggtttcgccaagtttataacaccacggtcatacatatgtacataagtcttcttctaacagttttgggtgcacttaccccgatcatcgatttcttttgaaataattcaaacgtccaagttgatatggatgtgaaccatctctgacgttctcaagagttcctatcatcatagttcgaaaagattggaaaattcttgaaatctcctaaagtatcttctttaagttattacccttcatggtgaattcttcccttacctcacccgaatgtttcaatcttacacaggacaacgcaaacagaatgtggagtcaaaattgagctaaccaacttccatgtccatgaccacttacaatagttctccaatgtgcctccaatgtgaattctgatttaatggtaatttcgtttttaaggcagctagaaaataacacaacttcggaacttttgattacattaaatatggcatcgaatggacttttattaagtaccctaaactagacaaaggcattgagttaagtttataaatgacataaacgcacgacttaattcactatttggcagatttctataagaacatacaattacgcatacaaaatatatataaacggtgggtgatcattgcagttgaaaaacaagtcctcctttcttttggctgtgaaaaggagttattgcatagattgcctataaaataacatatgtagttgctaccatctagaactgcgaagggtagaggtcaagatcgggtggagggggtggagcagcaggccatggacacatccagcgggagatcctgcgagaaggcaaaggtcgtgctagaagtctcgttgaagccactgtccgcccgatatagcggaattctggctccttgctgtggcatcgcaaccgatggtggctctgctggctggatggagcccgcaccaccttgtgtctgatccgcctcctcctccaaattggcactaaaggactgcgagagattcttgcgttgtgcggagcgatgtcttttatgtccgcgcggagtatctgagttggaagagctgcagttgaagctcacggtcgatagttgcatggcgtccgcctcctcgtcatcttcggattcagcctcctcttcctccccctcagtttcctcgaaaagcggctgatcccctgtctcgatcacaacctgtcgcgtgctattcacacgcagccgacgaactctctgattaatgctgcaatcggaatgctccagtccgccgcccatgggcgaggaactcctgtctggcgtgaacttcaatgccgtgcgctctgacaacgtgtcgtgctgctccgtaacgctgatctctaccttggagtgcaccaatctccgactgagatgctccgacggggcaatgggcgacggcagctccagctcgtgcattagaagtttcctctttcccgagcaagtaccattatcgggcgtgccaggcggcagtccgcataggtttctaatgggtgaaaggcagccgaagctactttccccggatgcggaatccgacagtctgccagcgaacattgtttgcttgccctgcggactggagcccaccatggacctcgatggctctgccgtgtcctgttcgcccaaaacaatgacattgtgcagatcgaagagtttccggcgcatggaactattaaagatgtcgggaccaccacttgacttgctcctgccagacaagcggccagccaaatgtggctggaagtacggacgcagggcatcctctagggcttttggcaatatcggcggcaaagtaagttccgtttgcacctcgcaatcccgcatccttcgcgacttattcgatatgggagtgttgtcctcgctgcaattgagtattatgcgctgttttcgcaatgggcaatccaccggactgggcacaatgagtgactccttgaaaaaggcactgatggccaactgggccttggattcctgctcgggatcgggggaatcgtggaactgggtttcatggggctccacgtcggcgggttttagttgggagacctcgtcaatgttccactcgaactgggtggacgagagttggggtgtccgcgagcggaaaagtgaggggctgccaggaaaagagagggtcgcgttaagaggatttttcgagcagacgaaaaactcacctggcgatcagtggcaggtgtaaacgatcggccatcgctccttcgaagggattccgcaccttgtgcagccttttcgggggcggggtgcacacatttcccgacatctgggggctgtattttccattttctttgccgccattcgttggcgttgccgacgccgccgacgagttgctgctgttcgagtggctgttacggcgcgcccggcacttcaatccgttcacatttgtaatgtatcgattcttgagggcttgcggcgttcgcacctcgtcgttgtacatctttttcagtcactaagtcgcctaatttcgacttaaaataaaacaagcgcgcctgctgcgactcgcaggcagatgtcggtattttcaaatgcagcagtgttgtatagcgatgcagcggagttatcgaatcgttggcaattcgaaaagcagaatgcgaaagtgagggatgttcaaggaaaaaaaggtgctaacgactgatttgtcacttaatatttatttattcgcatatctaaaagtgcctgcaaattatttcgactcccgtctaacttttagtatttttattttgcgcgccacccgctgcttgctgtcgataacacatcagctgggcgactttaaccgttttataataaaatgggaccagtctaaaaataaagaatggttactggtatacaaaattgtatcccattataaacttgaggaataagtagctcgtaattatccgaatatggatgcatttcaatatttgggctgctagaaccttttattgttcctataacccgaatagagattccatttcaatataactttatcttgaatggtttagtttactttctatttaaactaatattccgttttaaatgtttcaatactcttatattagaaaaataccaatgccaacatctgagtacgatttcgcaactggtcacactgacagctgtcttctaccaacacatatgcgcgcgtgtgtatgtgtttgcgtgcagtgcgaaatagaaacaagaaaagcaagcgaaaaatcacagaaattcacaaaaaaaaagcccaactacttccaaaattgggccgcccggcgaagaaccgcaaaagtggccaaaattcggcgaaaacagcgcaagtgtgacaaagcattcgtgccgctgcagtcgtcggcgaaacgggcgaaaacaaaagagaatagtgttgatagtaatacgagcgtatttagcagtagcagcagcagcagcagtggccgaagcttcggcaggggaacggaacggtgggcggtgggtgcagaagcgggccggggaacggccgagaacgaaacactagcagtagcagcagcagcagcgacaacaacaaatgccggtcgctttatcaccgccgatc

SEQ ID NO: 15119 - DNA, 1706 bp, DROSOPHILA
gaaaataccgacatctgcctgcgagtcgcagcaggcgcgcttgttttattttaagtcgaaattaggcgacttagtgactgaaaaagatgtacaacgacgaggtgcgaacgccgcaagccctcaagaatcgatacattacaaatgtgaacggattgaagtgccgggcgcgccgtaacagccactcgaacagcagcaactcgtcggcggcgtcggcaacgccaacgaatggcggcaaagaaaatggaaaatacagcccccagatgtcgggaaatgtgtgcaccccgcccccgaaaaggctgcacaaggtgcggaatcccttcgaaggagcgatggccgatcgtttacacctgccactgatcgccagcccctcacttttccgctcgcggacaccccaactctcgtccacccagttcgagtggaacattgacgaggtctcccaactaaaacccgccgacgtggagccccatgaaacccagttccacgattcccccgatcccgagcaggaatccaaggcccagttggccatcagtgcctttttcaaggagtcactcattgtgcccagtccggtggattgcccattgcgaaaacagcgcataatactcaattgcagcgaggacaacactcccatatcgaataagtcgcgaaggatgcgggattgcgaggtgcaaacggaacttactttgccgccgatattgccaaaagccctagaggatgccctgcgtccgtacttccagccacatttggctggccgcttgtctggcaggagcaagtcaagtggtggtcccgacatctttaatagttccatgcgccggaaactcttcgatctgcacaatgtcattgttttgggcgaacaggacacggcagagccatcgaggtccatggtgggctccagtccgcagggcaagcaaacaatgttcgctggcagactgtcggattccgcatccggggaaagtagcttcggctgcctttcacccattagaaacctatgcggactgccgcctggcacgcccgataatggtacttgctcgggaaagaggaaacttctaatgcacgagctggagctgccgtcgcccattgccccgtcggagcatctcagtcggagattggtgcactccaaggtagagatcagcgttacggagcagcacgacacgttgtcagagcgcacggcattgaagttcacgccagacaggagttcctcgcccatgggcggcggactggagcattccgattgcagcattaatcagagagttcgtcggctgcgtgtgaatagcacgcgacaggttgtgatcgagacaggggatcagccgcttttcgaggaaactgagggggaggaagaggaggctgaatccgaagatgacgaggaggcggacgccatgcaactatcgaccgtgagcttcaactgcagctcttccaactcagatactccgcgcggacataaaagacatcgctccgcacaacgcaagaatctctcgcagtcctttagtgccaatttggaggaggaggcggatcagacacaaggtggtgcgggctccatccagccagcagagccaccatcggttgcgatgccacagcaaggagccagaattccgctatatcgggcggacagtggcttcaacgagacttctagcacgacctttgccttctcgcaggatctcccgctggatgtgtccatggcctgctgctccaccccctccacccgatcttga

SEQ ID NO: 15120 - protein, 539 aa, DROSOPHILA
MYNDEVRTPQALKNRYITNVNGLKCRARRNSHSNSSNSSAASATPTNGGKENGKYSPQMSGNVCTPPPKRLHKVRNPFEGAMADRLHLPLIASPSLFRSRTPQLSSTQFEWNIDEVSQLKPADVEPHETQFHDSPDPEQESKAQLAISAFFKESLIVPSPVDCPLRKQRIILNCSEDNTPISNKSRRMRDCEVQTELTLPPILPKALEDALRPYFQPHLAGRLSGRSKSSGGPDIFNSSMRRKLFDLHNVIVLGEQDTAEPSRSMVGSSPQGKQTMFAGRLSDSASGESSFGCLSPIRNLCGLPPGTPDNGTCSGKRKLLMHELELPSPIAPSEHLSRRLVHSKVEISVTEQHDTLSERTALKFTPDRSSSPMGGGLEHSDCSINQRVRRLRVNSTRQVVIETGDQPLFEETEGEEEEAESEDDEEADAMQLSTVSFNCSSSNSDTPRGHKRHRSAQRKNLSQSFSANLEEEADQTQGGAGSIQPAEPPSVAMPQQGARIPLYRADSGFNETSSTTFAFSQDLPLDVSMACCSTPSTRS

SEQ ID NO: 15121 - DNA, 7467 bp, DROSOPHILA
agttggccctacttcaattgcggacagaatccaggccaaaatagtgattttgcccagccgacgaggcctaagacctctatctgcgagcactgcctcaattatccctacggatacattctgcaaaatggtctgcccgcccagtgtgccggttgtttccagggatacggagctcccctcatgtataatcctccttggatgtacaatccatattatgtggcatatccagcctttaacaatataccggccatacagaacaataataatggcaacagcggtgacaccagtgtagataaaaccattgcagatgatgatgacgatggatggactctatgtgacgacatcgaaaaatgcctagacgcggaatacaaaggctcgcagaacagcgggtcacctgaacatctggtcgacgacgacgactacaacgtttcagttcagcgaaggagacgccgtccaagccgtcaccactttgtgagatcagcctacagcaaacgcaatcgcaagcacaactgatcaattccagatgaaaccacaaactctttagattttctgcaaaccttttgcttcagaaagaaatagtctagaaatattgtatttctgattaaccaaaactaaggtgtcttcatataactactacatttctctacatattttactgaataaaagtgtttttgctaaccaaatgaataaatacaaatgctatcgaattcaaagtgtcgacggaaagttatacataaatgtatgtataaattgctgcctgaaagctttgaatataatttcatttcctttacaatgtacataggtccgataaatgagtgtactttaaataacgatttatttgatacgcagggtatgaagctgggtgacagggcggggagacctcgttctccttatggactaaacaacgtttaataaaatctggactcgtcctgctcgaatgcttacgcttgcgatctgggcatacataatattaataatttgattagatgtgaaaacatttgttctggcatttcaattgcaggtagatagtttcgaaggcatccgggcaagagtttagcccgtatctcgatgaacattggtggaacaagacaactggaacttatggtaatattgcgcgtgtgttgattttaattggtttgttcgctacaaatataagggccttccatttggcagagaactctacttaatccccaattccttgagttcggtctcctcatccacggagtcctcgtcatccgaaccgtgaaccgatggagctggagtggtgtgccctggtgataaacattttattagacaatgcattgcatttatcgtttctatagtatcagcaatatcgctcattagttaaatatttacattttcgccttgaaggtatatgcattctaattcggttgctaaagacattagttgtctattacgatttatcagtaaaaaataatagaattacactcaagatcaaatcttaagttgcagcttgcttttggacctagttatttatttaacatgatttatttaaacgtttattactacttgttgagaatcgtgaaagtaaaatgtccagcagctgttttattcgagactaaaatcttttggatccaaagtacatcaaaagtatttaaaaatgcattcacattgaaatgtgttgagtagatatgaactaaatatttatctttctagcgatctgcgtcttcttcctgccacttacgcgatgaagtaggactgggaggttcgctgtgcggtcgcgagaagatcaagttgttcttcgatccatagagagacaattcatccacatagtctgggtaaacagcttgcagggccttaaccctggcctgtctgtagtactgcaaatgaaagtgtcatgggttaataattggattttataaaatgaaagcattggtcgcttccgcgacgtaagtgaacccaatgaatactaacaatgcccagggtgcgccagtccagaagatcgctcaaccgctccgtgcgattacgctggataatgcgctggcggcggttcagcctggagaactccatcataaagctggacagctgctgaacgctgttctccaagccgatatagcggcgatccacgatgtagataccgtatgacttgggatcactgatgtgctcctccatgaagcagccaaagccggacagattggtggttacgctggggatacccatcaccgtacactcggcgggagtgtaaccccagggctcgtagtatgaggggaagacacccaagtggcagccacggacaaattcttcgtagtcgattccaaacagaggatttgtggatgtgaggaactccggatggaagaccatcttgacacgatcgtggcgcgagttgaacagatggcaacgacggattgaggatagcaccggatcattccagtcatcagccacattgtgcgtggtaacaggcggcatcgaatcgcgctgcatggcgaacatgcaacgcttgatcttgacgaggtcatccttctgaagcagatcatcggcattgggtatgttgccctgcagacaagtgtcgaacatccgcttgcccacggcctgctggacgttgttgatcgtatcgcgcaactgcttgatcacggcatgtcctcgcagcgagtccacgttgaagttgttggtcttggtggggaagatgagaaaggccaccaccgtggtgtccggcttctcgtgcttgagcatcgcgttcaagcgagccagtgcctcgatgaagatgtcggctcccttgtttccaaactcgtagcgaccggcgatgaagaagtacagggtcttatctaaatcaaagtcaatgtggctgtagggataggaaatataataggatattatttattactatacaacttgataaaggctttcaaatgaattagtattttatcagtttgataatgaattgattattatcaaatgtatttgtatctaacctataaatctatagaatcctttttaaatgttaggttccatgctcatattaaaatactatagcctacaaatcatataatcatgcatgtagattatagagagacatgtttctatcgattaacctttattcaagggtgtagaatattgaaaacatttccgcataacattttctttagataatactatctctcttgcatcgtaaaatgaaatcagaatcgatgaattgtcattgtcaattagctaataattaattatttactctaatgtcggatattgcagatttggtgagcaggagttctgcattgtctactcacccgtaaaagtgaccccgcacgaattcgttgatcttctccttggcaacggcgtgcaagttctggaactcgtggatggccgagaacttcttcacgttcagtccattgggcgtgatgatgtccggtttgcgcttgagcagatgctctgcctcgtagcccgtaatctcggagacggtggtgaacacatgagccaagtgggtggcacctcgctccaggcaataacgatgatagatttggcgcttgcccgcctcttcgtccacggcgaacttgtccagattgttgtagaaatcggtgttgccggcgcacaagtaacgacccaacaatgtggcgtgggtagtgaacacagtggcgatctccaccagacgagtacgtaggacaatgagacccacgccagcttgccattcgtggaagtgggcgacaatcctcggagcgctcaattcgttgttctgcgaataagtcacggcaaagttgcggaactcctccaggaactcggcaatcataaagccaaggataatggcatcgttcgtctcgatatccaaatgaggtattccaatatggcacttctcccacatctccgatttgaactgatccagcttccaagcggctgatccaatatcgaacaggattaattgaggatttccgtccaccagccagcgaccggtgtggattttatagcctcgcgagcgcaatgagttgacagcgtctagtagggggtttcccctggggaactccatctcctccatctcggtgcgggcacagtgctccttgtagggacccatcatacacaactgctcgcccatctcctcggtggagacatatgccttcgaccggatcaccgtgtaaataccgcccaccttgttggccacctcccatgccacctcgaagttccagcggttctcccgggaagcgatatcaccccgatcgaaataatccttaaggtccgccccggactccactctcgaaaagcgacgattcatctggaacgacggttgcaatagtagcaattagttttagtataatctctgccttttgttctgcccaaagttgatccccaccctcagagcgtaagacgtggactcgttgtcctcgaaacggtaggactgctgtctgcgcatctccttgatatgttgggaacgggatgctataatctagacgccgctgatctatagctgtacccctccgttgaggctctcgtcgcggactgatagtgtcaactaaatttagccaccggcttgacccacattacaagcagtgattccttatcgcttacacttgtatattaagacaaagcttatatttcacacaaaaagctattaattcaaattaattaattaattattttattcgaataagcatcttaaaggattctacattggaggtaacgagtatttcgagtattcgttttccagttatgaaaataagagtgaatagttgaaacctgtatgaagatcgcctgatttctcgccgtgcatcgaccgcgcttgatgttggcgctgttcgtattggtatttattcattgtcatcacgccggcatttgttgcatcaccacgcagcgaggtgcgatcgatcggctatcaggcgagtgcagttgcatcgctgcagtttatggactgataaccggtgctatgcgacatcgcccatgtccctgacagtcggtcatttatgtacgtgccatattctatagctatagatgaggcctctataagccaaaggtctattttcggatgtcggaaatgtttagttcagtttcattagtgagcaaagatgagtttgccaaattttccgctctatgtgtacgactatacatgaaaatttggcaaatgttttttaattgtcaacgtcacaaattgagaggaaaaatgctgaaggcgtcagtttctcctatagcactaacgacttagaatttgtcttctacttatttagttttcaggtttatccatctaatcaaattcgaagtcaaaagggggagttgaattcttaattgaacactgtccagaatgaccttggcaaacgaggaaaccacaaaatatcaattggctcaaattttcgagacaataaaattttttaacatattaattatcttatctgtgttgatataacgaaatacgggctataatctcttgacataactttctctacggctttggatttgtacctaataattcaccttttatcataggactctctttgtacttccgtaccttgtcctttcaaagttcgcattatttgtaattaaacataaactaaggtctaaactttttcaggactatatccactttatccgacgctagagggcgtgatatcttaactatcactcgattgcacttgtctccttcgcacttctcactcaatacaatcacaattatgtttaaaagcaattaacgaaggaatgcaagcaaaagtaaaagtgagaaaaacctcttggcacgattactaacagttgaacaattgtcgacttcttgcacttgataatttatttatgtgattgcgaaggaggaggtgaaaatgaagtgctatctcactcgcacccgcacatacgcgcttctgcaatgcaactccgaaattaaaaacaacaagaacaacagcagcaacaacaacacagcggcaagacctcaagtgtacgtctgtgtttgtgtgtttgtggcaggcagagatattttttcattgccagctaaaagtcaaataaaggtcagtggcggcgtgctgctgagcgagagcgagagcactaaaaattgttcaccattattggtattattcttgcgccccattttgttattgtttgttcgtgtttttttgttgtaccaattgttgttgccgtattcaacccgctcaacaagtttaaaaacttgataattttgtttttgttgcactctgtggtgggcgaaagagagggagagagaggacgccaggaatttgtattttctttttcatgcggccggcgcattgataatgctaataacgcttatcaccgcctatttgtttatgtttcgcgtttatcacttttccatcaggtagtgctataaagtctgataacgtatgtttccaaagcattcgcttggcgccaattacgaaatgcaacaaaaactgcaagccgctgataacgaatgtttgcttgaaagtgcatcaatcggtgtgtgggagtaactttaagtttggcacgcgcacggctatatattatatatatagtcccccgatctcggaaatacaatcaccttggggccaccgcagtcgctgttgttggccacacgaaacaaaacgaataactgaaaaagaattcgaaaacaaaaagaaaatccatgggcagccgggagagttcttgttcctgttgtttttgtattggcgagtgggagtttgcgcagagagaaatgcggagggaaatttatatttttctgtctgggcacactgctactgtcttcgcctgtgcccagtgtggcaaccttttcattggcttgccaaaaactggcagtcttaatatagcaattttaaacgatgccttttaataatcgacgtcatagagcagatgttggtacctgtgtcgtcggcaataagtgcctatgcttttgatgatgaccattcatcattttgttgatgacaacttgaaaagtgtcaggattctggttaatatgttcctgatgtaccagtcaaaactcatatattatcaagcacgttaaaaatttaatttaccttgaataacaatgaatatataattttatttacaatatttttaagctctcatgtcaactaaggcaaactttttaaaaatgggcgccaagttttttgaaaaaacgtaagcaagtaacgcaagcagcattgccagctgtaaataaaatcagttcgtacttcgccatagagcggaaattttaaagttcagtctagaacctttttatttaagtatcgcagttctttatgtcatacaattacatcggaagattttgagttgttatttaagattgaaatattccatctgcttaaatgtttactaacaaataaataatttataatattatgaatgatatatcattctttcttagatgcattttatctttgtttcttttgcaaataggaattggatatttggttgccatcttaccttgatccaaatccgtttggacatttaattgtccatcgtcaacgctcaccttgaattttcttcacttatcgcataaaaagccatatttcacagaaatttgaacagtttgtcgtaaccttgctctataaacaatttaatgtc

SEQ ID NO: 15122 - DNA, 2520 bp, DROSOPHILA
cgactgcggtggccccaagctttttgtgtgaaatataagctttgtcttaatatacaagtgtaagcgataaggaatcactgcttgtaatgtgggtcaagccggtggctaaatttagttgacactatcagtccgcgacgagagcctcaacggaggggtacagctatagatcagcggcgtctagattatagcatcccgttcccaacatatcaaggagatgcgcagacagcagtcctaccgtttcgaggacaacgagtccacgtcttacgctctgaggatgaatcgtcgcttttcgagagtggagtccggggcggaccttaaggattatttcgatcggggtgatatcgcttcccgggagaaccgctggaacttcgaggtggcatgggaggtggccaacaaggtgggcggtatttacacggtgatccggtcgaaggcatatgtctccaccgaggagatgggcgagcagttgtgtatgatgggtccctacaaggagcactgtgcccgcaccgagatggaggagatggagttccccaggggaaaccccctactagacgctgtcaactcattgcgctcgcgaggctataaaatccacaccggtcgctggctggtggacggaaatcctcaattaatcctgttcgatattggatcagccgcttggaagctggatcagttcaaatcggagatgtgggagaagtgccatattggaatacctcatttggatatcgagacgaacgatgccattatccttggctttatgattgccgagttcctggaggagttccgcaactttgccgtgacttattcgcagaacaacgaattgagcgctccgaggattgtcgcccacttccacgaatggcaagctggcgtgggtctcattgtcctacgtactcgtctggtggagatcgccactgtgttcactacccacgccacattgttgggtcgttacttgtgcgccggcaacaccgatttctacaacaatctggacaagttcgccgtggacgaagaggcgggcaagcgccaaatctatcatcgttattgcctggagcgaggtgccacccacttggctcatgtgttcaccaccgtctccgagattacgggctacgaggcagagcatctgctcaagcgcaaaccggacatcatcacgcccaatggactgaacgtgaagaagttctcggccatccacgagttccagaacttgcacgccgttgccaaggagaagatcaacgaattcgtgcggggtcacttttacggccacattgactttgatttagataagaccctgtacttcttcatcgccggtcgctacgagtttggaaacaagggagccgacatcttcatcgaggcactggctcgcttgaacgcgatgctcaagcacgagaagccggacaccacggtggtggcctttctcatcttccccaccaagaccaacaacttcaacgtggactcgctgcgaggacatgccgtgatcaagcagttgcgcgatacgatcaacaacgtccagcaggccgtgggcaagcggatgttcgacacttgtctgcagggcaacatacccaatgccgatgatctgcttcagaaggatgacctcgtcaagatcaagcgttgcatgttcgccatgcagcgcgattcgatgccgcctgttaccacgcacaatgtggctgatgactggaatgatccggtgctatcctcaatccgtcgttgccatctgttcaactcgcgccacgatcgtgtcaagatggtcttccatccggagttcctcacatccacaaatcctctgtttggaatcgactacgaagaatttgtccgtggctgccacttgggtgtcttcccctcatactacgagccctggggttacactcccgccgagtgtacggtgatgggtatccccagcgtaaccaccaatctgtccggctttggctgcttcatggaggagcacatcagtgatcccaagtcatacggtatctacatcgtggatcgccgctatatcggcttggagaacagcgttcagcagctgtccagctttatgatggagttctccaggctgaaccgccgccagcgcattatccagcgtaatcgcacggagcggttgagcgatcttctggactggcgcaccctgggcatttactacagacaggccagggttaaggccctgcaagctgtttacccagactatgtggatgaattgtctctctatggatcgaagaacaacttgatcttctcgcgaccgcacagcgaacctcccagtcctacttcatcgcggcacaccactccagctccatcggttcacggttcggatgacgaggactccgtggatgaggagaccgaactcaaggaattggggattaagtagagttctctgccaaatggaaggcccttatatttgtagcgaacaaaccaattaaaatcaacacacgcgcaatattaccataagttccagttgtcttgttccaccaatgttcatcgagatacgggctaaactcttgcccggatgccttcgaaactatctacctgcaattgaaatgccag

SEQ ID NO: 15123 - protein, 689 aa, DROSOPHILA
MNRRFSRVESGADLKDYFDRGDIASRENRWNFEVAWEVANKVGGIYTVIRSKAYVSTEEMGEQLCMMGPYKEHCARTEMEEMEFPRGNPLLDAVNSLRSRGYKIHTGRWLVDGNPQLILFDIGSAAWKLDQFKSEMWEKCHIGIPHLDIETNDAIILGFMIAEFLEEFRNFAVTYSQNNELSAPRIVAHFHEWQAGVGLIVLRTRLVEIATVFTTHATLLGRYLCAGNTDFYNNLDKFAVDEEAGKRQIYHRYCLERGATHLAHVFTTVSEITGYEAEHLLKRKPDIITPNGLNVKKFSAIHEFQNLHAVAKEKINEFVRGHFYGHIDFDLDKTLYFFIAGRYEFGNKGADIFIEALARLNAMLKHEKPDTTVVAFLIFPTKTNNFNVDSLRGHAVIKQLRDTINNVQQAVGKRMFDTCLQGNIPNADDLLQKDDLVKIKRCMFAMQRDSMPPVTTHNVADDWNDPVLSSIRRCHLFNSRHDRVKMVFHPEFLTSTNPLFGIDYEEFVRGCHLGVFPSYYEPWGYTPAECTVMGIPSVTTNLSGFGCFMEEHISDPKSYGIYIVDRRYIGLENSVQQLSSFMMEFSRLNRRQRIIQRNRTERLSDLLDWRTLGIYYRQARVKALQAVYPDYVDELSLYGSKNNLIFSRPHSEPPSPTSSRHTTPAPSVHGSDDEDSVDEETELKELGIK

SEQ ID NO: 15124 - DNA, 4764 bp, DROSOPHILA
agaagaacgtgtaaagaatttatttgatataccctaagcctaagccatgacttcccgttagcagtaaagcttccttaataataatgacattcgagtttgggaaacagctattttgtttaagaaaggcattataaaaaccgtaatttgttatcatacccattactcatagaggggtatattaaactcgttaaaaggaatacaaatttctatcgatatgccaagataattttgaaatttctctctcaaactcactcccactatctggtatctgatagtcgagaaattcgactataacattctttcttgtttaaaaaaattgtctaaatttagggattcaaaagtggtttaccgatgataagctttcttgagccccacttaatatgatcacaaggtttaatttcttttctgcatttatttttaaaattattcgccgttgttatttcgtagataaatcggtagtggtcaacttttttttattaactgtcaggccaaaaacaaatggaatttaaaatagttcaaatcaaattcgaatacgaaaataagtgttgtattttgaaaaagaaaaaaaattcgtaatttcacaccatggccgaggagatagaggttgaggagacggaggacttccacgacatggacttcaatgacgaagagccatcctgtagtggaggagctgtccaggccaggacggagcgctttgtggtgaagaaatgggttgcgcacgccatgtggggatgggacgtagcagtggacaactgtgccatctgccgtaaccacatcatgaacctgtgcatcgagtgccaggcggacccgaatgcaaaccaagacgagtgcactgtggcttggggcgagtgcaaccacgcattccattaccactgcatcgcgcgctggttgaaaacgcgcctggtctgtccgctggacaacaaggagtgggtctaccagaagtacggccgctagcgaggaatatggatcgggatattaggtggtgatagctgtttgctggcatgtaattactgtaattaaataagaacggacttgggttccaaaagaaggtttacgcttcctggtcgggcaggagttgctgggccgtgggcctgacgccagttatatgttcgatttgagagtaaagcgaatcgcgctcctccactaagctagcgtacttttgctgcagctccttctcgcggtccatctggcgacgcacgtcctcttgcagcgattccaggcgtcgcggcacagcgatggcctcctgttcgcccaaaaagcggaatgtcgagagtgagacagagttctgctcaatctggccgtacgtgtcctgaagctgcttaatcagcacctgggcgcgcgcctggtagccgccggtgagaatcttcagcttcttctcgatcttgccgcagcgcttggcttccttggccatgtggcggcgatttgtctccagccgtttctcggcagactctaatcgatccttcttgctggccaaattggcgcgtgtgtagcgatgttgggagggtaggtaaagaacctggccgaggcactcctgccacacctgggcataaacgtctaggggcagttcgccatgcgccatgcgctccttcaccacctccatttcctcggtgagcatttgcttggccttcgccaactcttgctgcgagatgtcctcgtagggattggccttaaagtagctttgtagctgttccaacttgtgctgcgattgaccaggcacgggatccttgaccgagtcgtacactgccaagaaaaaggacgttagttacttgggttaaaatggaaacgttgggtttactcacgctgcatggtgatcatttcgtgtttaatcagctcttcggcctgctgctgttccgtaaggttctgtttctcggactgcggtcgcagaatcttggtgttcacttcagttggtcgcgggagactacgctgaataacctgggagcgcttctctagctctcgctttcggcgcgcctcttgttcagccaataacctggcgtcgacatccgcctgatcctcgacggcgggttctgagttggtctcaatgcgttcgctttcctcctgctcaggcaccacgatctcatagtcattccgtggagcgggcagcgtggagagaccgtcacgcagtgtagactttagttgcttttggtagtttttgtaatgtgctggggtctcggtgacgcccatactctcctcaggattgatgcttagcttgtccctcacgtaggcaggtgtattgacgacacccgtagcccctcctgccccctttacgggaactagggctccggaggagggcgtttggaatccgccgggagtggctgctccgccctcgcgttgggttctaaacggcgtggcaatcactgtgttaggcgtggcgatggaggccgccttgggcagcacgccggagaagtctgactcgtgcagcggtgtgttcaggccacctttgagtggcgtctctgtgtgggtgagggccatcatgttttgggcctcctgcatgatgcgatcggtgtacggagccggagtacgtggagtggctgctacctggggtgtaatggagtagtcggctagcaaagcatccgtcgtctctatgccgctctcaccggcaatttcctttgccatctcactggcgcgtcccagcttgactacctgctgtagttccatgtcggaaatctgcggcgtaggcaggactagtttggagcgcttccgctcgggctccatgttttgcagcattgcggtgggcacttcattctctttgcgctgcttcagcttctgcttgtcccgcttgcgttcgcgttcctccttctctgagcggagttctccatctaggtcctgctgccgcatcttgttgaagtcgggttcatttttctgcaagtgttcctcggaagtgtcgtagaatccgtgggcaggtcgcttttcgaagggaatctcggcgttgtagtctattcccttgatccgcttgcgatttccgctgccaattccggcggcacgaagttcgcgccgcttttggagagtggccaggcggcgggcttcctccagttgcttttcgcgagccttgcgcttggctttcttgccttgcgtgttggccaagcgggcgcgtgcctcggacagcatttccagctcgtcctcgtccatgtccttgggatcgggccgcgccggcttggtctctggattggggtcaatctctccgggcttcaacttgcgaggatcatccatcgtgtcctcgccatcctctttgcgttgggcttggtctctgtacggcaggaaagggatcagaaattttctacttagtatgttgtgcgttggactcacagcaagtactcatagcgctccaggcactgggctgccgtccgtccgatgatcggggctatggtgcgccactgcgtcggcatcagcttggccaagtggagcagtttctcgtcctcctcacgggaccactcggtcttcttgatgctgggatccagccactcgtaccacctggccttgcactgcttggcggactttctgtgcaggagggaggcaattcgactccactggttcttgccatatttcataaccgcagctttgaggatttcatcctgggaaaatgaaatcggtagccaatgtaagccatgtgtggttaaccgatagactattgggataattacctccgtgttgcgccacacgccgcccttgatcattattcgcggcattctggggccttatgttgctttctgtcgcgtatacaatggattttcacaattttcactcgagtccacgaaactccgctcttttttttgcagtagccgctagcgatggttagtcttcgataacagcgatatctccagcacgttttggtatatttatagaacctctagttaaactattctagcttagtacaaaaaaatttcattatattgtatttagtcttcgtataccgtttgatttaacttcggtcttaatattggtaacttaaattattcaatttaataaagggcctatacacacgacataacataacgcgacagtgtgaccgaatatagttgtgcaaacaccgctgccacactgtgtacagcaacagctgttcgctatcagttattttgtgatgaaaagttttttttctgcgtaatgccaatttttgtgatgcggaattaagaggcgtgtgcccaggaagcggaaaaccggcaaccggcaaccggaatccggcaccgggaatcaactggaccaaggaaggcacccacgatgagcgatgcgacctatccgggatattacggcggcaaccaggtgagcaaccagcgagtacctctggccagaaaaacacgccgtgtgtcttccagctgctcccgttgtcgcatccgcatcctacacatccgcaccaagacctgtcgctttccacgccggttcactccttggagcaggactccaacttcgggggattctttgacgaagagctggtcatcggatcgggatccggatctgcctccgcgtctgctgcaaacaccaccccttctggaactactttgtggctggccgatggcgggaatcgatcacctactgaggtggcggtggagtcccagcccaatcagggcattccctttgtccagatccacaccaccgacttgcagcaaccagagaaaagctaccgcaatgccttccgcaggcgtacagcggaaattaagtcggaggaactaatcaagtcggaacttgcggaagcggcagccaaggatcgcctgaatgccacgccaacgccaccaactcgaaattccagctgcgccagcgtggagggcaaggcaa

SEQ ID NO: 15125 - DNA, 2577 bp, DROSOPHILA
aaagagcggagtttcgtggactcgagtgaaaattgtgaaaatccattgtatacgcgacagaaagcaacataaggccccagaatgccgcgaataatgatcaagggcggcgtgtggcgcaacacggaggatgaaatcctcaaagctgcggttatgaaatatggcaagaaccagtggagtcgaattgcctccctcctgcacagaaagtccgccaagcagtgcaaggccaggtggtacgagtggctggatcccagcatcaagaagaccgagtggtcccgtgaggaggacgagaaactgctccacttggccaagctgatgccgacgcagtggcgcaccatagccccgatcatcggacggacggcagcccagtgcctggagcgctatgagtacttgctagaccaagcccaacgcaaagaggatggcgaggacacgatggatgatcctcgcaagttgaagcccggagagattgaccccaatccagagaccaagccggcgcggcccgatcccaaggacatggacgaggacgagctggaaatgctgtccgaggcacgcgcccgcttggccaacacgcaaggcaagaaagccaagcgcaaggctcgcgaaaagcaactggaggaagcccgccgcctggccactctccaaaagcggcgcgaacttcgtgccgccggaattggcagcggaaatcgcaagcggatcaagggaatagactacaacgccgagattcccttcgaaaagcgacctgcccacggattctacgacacttccgaggaacacttgcagaaaaatgaacccgacttcaacaagatgcggcagcaggacctagatggagaactccgctcagagaaggaggaacgcgaacgcaagcgggacaagcagaagctgaagcagcgcaaagagaatgaagtgcccaccgcaatgctgcaaaacatggagcccgagcggaagcgctccaaactagtcctgcctacgccgcagatttccgacatggaactacagcaggtagtcaagctgggacgcgccagtgagatggcaaaggaaattgccggtgagagcggcatagagacgacggatgctttgctagccgactactccattacaccccaggtagcagccactccacgtactccggctccgtacaccgatcgcatcatgcaggaggcccaaaacatgatggccctcacccacacagagacgccactcaaaggtggcctgaacacaccgctgcacgagtcagacttctccggcgtgctgcccaaggcggcctccatcgccacgcctaacacagtgattgccacgccgtttagaacccaacgcgagggcggagcagccactcccggcggattccaaacgccctcctccggagccctagttcccgtaaagggggcaggaggggctacgggtgtcgtcaatacacctgcctacgtgagggacaagctaagcatcaatcctgaggagagtatgggcgtcaccgagaccccagcacattacaaaaactaccaaaagcaactaaagtctacactgcgtgacggtctctccacgctgcccgctccacggaatgactatgagatcgtggtgcctgagcaggaggaaagcgaacgcattgagaccaactcagaacccgccgtcgaggatcaggcggatgtcgacgccaggttattggctgaacaagaggcgcgccgaaagcgagagctagagaagcgctcccaggttattcagcgtagtctcccgcgaccaactgaagtgaacaccaagattctgcgaccgcagtccgagaaacagaaccttacggaacagcagcaggccgaagagctgattaaacacgaaatgatcaccatgcagctgtacgactcggtcaaggatcccgtgcctggtcaatcgcagcacaagttggaacagctacaaagctactttaaggccaatccctacgaggacatctcgcagcaagagttggcgaaggccaagcaaatgctcaccgaggaaatggaggtggtgaaggagcgcatggcgcatggcgaactgcccctagacgtttatgcccaggtgtggcaggagtgcctcggccaggttctttacctaccctcccaacatcgctacacacgcgccaatttggccagcaagaaggatcgattagagtctgccgagaaacggctggagacaaatcgccgccacatggccaaggaagccaagcgctgcggcaagatcgagaagaagctgaagattctcaccggcggctaccaggcgcgcgcccaggtgctgattaagcagcttcaggacacgtacggccagattgagcagaactctgtctcactctcgacattccgctttttgggcgaacaggaggccatcgctgtgccgcgacgcctggaatcgctgcaagaggacgtgcgtcgccagatggaccgcgagaaggagctgcagcaaaagtacgctagcttagtggaggagcgcgattcgctttactctcaaatcgaacatataactggcgtcaggcccacggcccagcaactcctgcccgaccaggaagcgtaaaccttcttttggaacccaagtccgttcttatttaattacagtaattacatg

SEQ ID NO: 15126 - protein, 791 aa, DROSOPHILA
MKYGKNQWSRIASLLHRKSAKQCKARWYEWLDPSIKKTEWSREEDEKLLHLAKLMPTQWRTIAPIIGRTAAQCLERYEYLLDQAQRKEDGEDTMDDPRKLKPGEIDPNPETKPARPDPKDMDEDELEMLSEARARLANTQGKKAKRKAREKQLEEARRLATLQKRRELRAAGIGSGNRKRIKGIDYNAEIPFEKRPAHGFYDTSEEHLQKNEPDFNKMRQQDLDGELRSEKEERERKRDKQKLKQRKENEVPTAMLQNMEPERKRSKLVLPTPQISDMELQQVVKLGRASEMAKEIAGESGIETTDALLADYSITPQVAATPRTPAPYTDRIMQEAQNMMALTHTETPLKGGLNTPLHESDFSGVLPKAASIATPNTVIATPFRTQREGGAATPGGFQTPSSGALVPVKGAGGATGVVNTPAYVRDKLSINPEESMGVTETPAHYKNYQKQLKSTLRDGLSTLPAPRNDYEIVVPEQEESERIETNSEPAVEDQADVDARLLAEQEARRKRELEKRSQVIQRSLPRPTEVNTKILRPQSEKQNLTEQQQAEELIKHEMITMQLYDSVKDPVPGQSQHKLEQLQSYFKANPYEDISQQELAKAKQMLTEEMEVVKERMAHGELPLDVYAQVWQECLGQVLYLPSQHRYTRANLASKKDRLESAEKRLETNRRHMAKEAKRCGKIEKKLKILTGGYQARAQVLIKQLQDTYGQIEQNSVSLSTFRFLGEQEAIAVPRRLESLQEDVRRQMDREKELQQKYASLVEERDSLYSQIEHITGVRPTAQQLLPDQEA

SEQ ID NO: 15127 - DNA, 4652 bp, DROSOPHILA
agtgagagtcccagatactccgaaaccacaatggtgcgctctgaaatgaaggggtttcgcgttagaagtgagtcgtggcagtcgtggaattagtgagtgttatccgtagatgaatctgtaatcttggcacgtgtggaattaatgggagttttgtggggaaacgagatgtaatagtgggtgtttccggattctcgccggattagaccggttgcttggcttcctgggcgctggctacccaccgtgtttgccgcggatcacatccaggtactggcacaggtgctcgtcctgcagctccttcagtttctgggcacgccccaggatcgcaatcgagttgggcgttaggggcaggccgttgctgccgcacacgtcgccgggatgcagtttcgcgaagaaggtgaccgcgcacaggcggcactccctttcgcgctcccgcgtgcccatgatctcgatgcgatttgcaaatcacagcgatttccttggacttcacgccagcatcagcaacaatttaatatttttttttcttttttttttgcgagcggaatgcaaaaacagctgttcacgttgccagacttcggcgagtgcaacgccctcaatttgttggctgatgctagcaaaagcgcacaagtttaagcgaaatatacgtatggtaaattcacaattagggtggtactcatacgccatctataagtctaaagtttatagtttttttttttccataaacagagcaacagttgagagcgcttagccgcgaggcgctgccagaatttacatttgctgtttaactcttattgggaatttgttcgaggtatgatgaaacgtgtttacattaattacgaagtaggcaatgttatatctatctatctatatctactttttgtatatctttacatagttacattacaaattattagaaagctaaaaacgaaacatctggcagctctgcgcaacggcagtagggaagcctcttcgctcggtttgcaacaccaattgctagttatcgcctatcgcttgttttgttgtcgccttgttgttgcttccgtttgttgttgctattggcatagcggttttgtttttattgcgcactcgaaattgttttgttatttgctggcgatacgattcgaaaaacgctcctcagatggtgcaaaatttagtttagtccaatccagacgctcgtcgcgtttaaatgcaagtttgtttgtgtctgtgtcgtaagtaactgttgaatgcaatttggctatttggcaattgcagttgcaactttgcaaactgcaactttgtgaatgagaagcgcgacaagaacgcaaatcaccgaaaaatgtcgctttttgtggaatatacggagccgaagtggcgccacctggatatgcgcgcgctatccgttgacgagttttacctgtacctgcgctcggagttcagcagccagacccatctgtactcactgtccgacgaatgctacacggtaataaattgatggccccatgtaatcacatcgcgcaatcggtttccctttcaattgggtggccatcagtgaattcgattttaattgtattctttgccgttttcaattcgcagtgtccgtataccaaagtgaaagctctgcccgctgccgacgtcgctgccgtcgtcgttgaaccgttacgtttgagttcggcatattcgctgaatttcaaaatattcgacctcgatcagggtcactatgcctacgacaatgtgtgagtatcactcaacgtacagtgggcactcgcttagaatggcgcggagtcacaaggtacagtggtcacacgctgaggttgaacgctagcacttctttgagtaaatctacaatacttctctcaagaatcttgtaatgattagaatggtttattgtgaccaagtgggctataggcgatggccactgtgcatcttgtgattagcatacatgtacatgtaactagtttaagcgcaactgcttgcacctgttctcctctaagtctgtatgatcagcagtgtatcttgaatcgattcgattttcacgcagctcgtcgctctgctggctgcgtcgcagcgatctgcaggaattcggtgtctacaacttgaccctgcaagcgaatggcacctgtgcctttgccgtggacaagccgggcgtaccaattaattacggtgagtgccgctttaatccgccaagtgccactccagatacatattacttatcgctaatactatgatccccgcagctttcatcgccgttttcgttctggttgccgccctgctaatcgccctgaagctagtgagctgcgcctggcgttattatcgctatgacgaggccaccgccgctgccgacagcatcggcgaagccgccaccaaggcgacgcagaggaagcgcctccgcagcctggacacctttcgcgggtaaagcatattgtccatgtgttttgaaaactaacaccgctctcccatcgatcgccatagaatttcgattgttctgatgatcttcgtgaacagcggcggcggcggttacgcctggatcgagcatgcagcctggaacggactacacttggccgatgtcgtcttcccctcgttcctctggatcatgggcgtgtgcataccgctctccgtcaaatcgcaattgtcgcgaggcagcagtaaggcgaggatttgcctgcgcatactgtggcgatcgataaagctgttcgtcatcggcctgtgcctcaactcgatgagcgggccgaatctggagcagctgcgcatcatgggtgtgctgcagcgattcggagtggcatacctggtggttgcgattcttcatactttgtgctgtcgcagggagcctatcagtcctcaaagatcctggcagcgcgccgttcacgatgtgtgcctgttcagcggagagttggctgtgctgctggccctggtggccacctatttgggcctgaccttcggcctacgcgtgcctggctgtccgcgcggctatttgggccctggcggcaaacacgactacaatgcccatcccaagtgcattggtggcgcagcgggctatgcggaccttcaggtgctgggcaatgcgcatatctaccagcatccgactgccaagtatgtttacgattccacagccttcgatccagagggtatattcggtgagttattgaaatgaatgcgttgaattgaatctaattttaaaccaattgcaggctgcattctaagcgttgtgcaagtgctgctcggcgcctttgccggcgtaacactgcttgtgcatcccaactttcagtcaaggatccgtcgctggacactactcgccattcttctgggcctcattggcggtgctctgtgcggattctctcgtgagggcggcgccatacccatgaacaagaacctttggtcgctgtccttcgtgtgcgtcaccgtcagcttggccctgttgattctctcactgatgtactacttcatcgacgtgcgggagacgtggagctggtcgggctatcccttcaccgaatgcggcatgaacgccatcgtgatgtacgtgggccactcagtgctgcacaagatgctgccctggcactggcggatcggcgagatgaacacgcacttcatgctcctgctggaggccacgtggaacacgctggtctgggtgggcatcgcgctgtatctggacgcgcaggaattctactacagcgtgtagggccacacgagagtaaccatatgcacaatcaattcaattgccaaataaattagatactatcgttgtacgatcgcaaatcaaaatcaacaaaagtaattataaatcagacaaagataaacacactgcggctattttttttttttaaatttattcatttgtatttagtctttacaaaaacatgttctcttaacacataaataattgtttctgtttgtaaggctacaatttgtatggttctgtgtttgtgtgtgtgtgtgggtgtttgagtccacgcagaacaactcattccccattctgttcttaagggccccccagtatcctgtagttggactcaaacaagtccctccttccgctcgacagacgctggaaaatcaaagccagcggaagtgacttccggcggttaagattttccagcgcctgtgaagcgccgggagcgaacttgttggagtcaaactacaggctaccagggcgctacattcaataattaacacactaataatggttacaatttgtatggctctgtgtttgtgtgtgtgtgtgggtgtttgagtccacgcagaacaactcattccccattctgttcttaagggccccccagtatcctgtagttggactcaaacaagtccctccttccgctcgacagacgctggaaaatcaaagccagcggaagtgacttccggcggttaagattttccagcgcctgtgaagcgccgggagcgaacttgttggagtcaaactacaggctaccagggcgctacattcaataattaacacactaataatggttacaatttgtatggctctgtgtttgtgtgtgtgtgtgggtgtttgagtccacgcagaacaacttattccccattctgttcttaagggccccccagtatcctgtagttggactcaaacaagtccctccttccgctcgacagacgctggaaaatcaaagccagcggaagtgacttccggcggttaagattttccagcgcctgtgaagcgccgggag

SEQ ID NO: 15128 - DNA, 2046 bp, DROSOPHILA
cctatcgcttgttttgttgtcgccttgttgttgcttccgtttgttgttgctattggcatagcggttttgtttttattgcgcactcgaaattgttttgttatttgctggcgatacgattcgaaaaacgctcctcagatggtgcaaaatttagtttagtccaatccagacgctcgtcgcgtttaaatgcaagtttgtttgtgtctgtgtcgtaagtaactgttgaatgcaatttggctatttggcaattgcagttgcaactttgcaaactgcaactttgtgaatgagaagcgcgacaagaacgcaaatcaccgaaaaatgtcgctttttgtggaatatacggagccgaagtggcgccacctggatatgcgcgcgctatccgttgacgagttttacctgtacctgcgctcggagttcagcagccagacccatctgtactcactgtccgacgaatgctacacgtgtccgtataccaaagtgaaagctctgcccgctgccgacgtcgctgccgtcgtcgttgaaccgttacgtttgagttcggcatattcgctgaatttcaaaatattcgacctcgatcagggtcactatgcctacgacaatgtctcgtcgctctgctggctgcgtcgcagcgatctgcaggaattcggtgtctacaacttgaccctgcaagcgaatggcacctgtgcctttgccgtggacaagccgggcgtaccaattaattacgctttcatcgccgttttcgttctggttgccgccctgctaatcgccctgaagctagtgagctgcgcctggcgttattatcgctatgacgaggccaccgccgctgccgacagcatcggcgaagccgccaccaaggcgacgcagaggaagcgcctccgcagcctggacacctttcgcggaatttcgattgttctgatgatcttcgtgaacagcggcggcggcggttacgcctggatcgagcatgcagcctggaacggactacacttggccgatgtcgtcttcccctcgttcctctggatcatgggcgtgtgcataccgctctccgtcaaatcgcaattgtcgcgaggcagcagtaaggcgaggatttgcctgcgcatactgtggcgatcgataaagctgttcgtcatcggcctgtgcctcaactcgatgagcgggccgaatctggagcagctgcgcatcatgggtgtgctgcagcgattcggagtggcatacctggtggttgcgattcttcatactttgtgctgtcgcagggagcctatcagtcctcaaagatcctggcagcgcgccgttcacgatgtgtgcctgttcagcggagagttggctgtgctgctggccctggtggccacctatttgggcctgaccttcggcctacgcgtgcctggctgtccgcgcggctatttgggccctggcggcaaacacgactacaatgcccatcccaagtgcattggtggcgcagcgggctatgcggaccttcaggtgctgggcaatgcgcatatctaccagcatccgactgccaagtatgtttacgattccacagccttcgatccagagggtatattcggctgcattctaagcgttgtgcaagtgctgctcggcgcctttgccggcgtaacactgcttgtgcatcccaactttcagtcaaggatccgtcgctggacactactcgccattcttctgggcctcattggcggtgctctgtgcggattctctcgtgagggcggcgccatacccatgaacaagaacctttggtcgctgtccttcgtgtgcgtcaccgtcagcttggccctgttgattctctcactgatgtactacttcatcgacgtgcgggagacgtggagctggtcgggctatcccttcaccgaatgcggcatgaacgccatcgtgatgtacgtgggccactcagtgctgcacaagatgctgccctggcactggcggatcggcgagatgaacacgcacttcatgctcctgctggaggccacgtggaacacgctggtctgggtgggcatcgcgctgtatctggacgcgcaggaattctactacagcgtgtag

SEQ ID NO: 15129 - protein, 576 aa, DROSOPHILA
MSLFVEYTEPKWRHLDMRALSVDEFYLYLRSEFSSQTHLYSLSDECYTCPYTKVKALPAADVAAVVVEPLRLSSAYSLNFKIFDLDQGHYAYDNVSSLCWLRRSDLQEFGVYNLTLQANGTCAFAVDKPGVPINYAFIAVFVLVAALLIALKLVSCAWRYYRYDEATAAADSIGEAATKATQRKRLRSLDTFRGISIVLMIFVNSGGGGYAWIEHAAWNGLHLADVVFPSFLWIMGVCIPLSVKSQLSRGSSKARICLRILWRSIKLFVIGLCLNSMSGPNLEQLRIMGVLQRFGVAYLVVAILHTLCCRREPISPQRSWQRAVHDVCLFSGELAVLLALVATYLGLTFGLRVPGCPRGYLGPGGKHDYNAHPKCIGGAAGYADLQVLGNAHIYQHPTAKYVYDSTAFDPEGIFGCILSVVQVLLGAFAGVTLLVHPNFQSRIRRWTLLAILLGLIGGALCGFSREGGAIPMNKNLWSLSFVCVTVSLALLILSLMYYFIDVRETWSWSGYPFTECGMNAIVMYVGHSVLHKMLPWHWRIGEMNTHFMLLLEATWNTLVWVGIALYLDAQEFYYSV

SEQ ID NO: 15130 - DNA, 3965 bp, DROSOPHILA
ctagctgagttctccgaattcttctgcccagttcgctaaggctcgggtccgatcttagtttccggagcatctctgcgtaccaagcctcacccgtcttcttcacgatccgtgcctcaggctttttacgcgggcgcataggcttcaccttggtccaatatgcactcgtgctagcattcttggcgacagatgcgtagctgcctgtattggactcgtttgatctggatgtcgccttcccttctcctctaccagtcgtgcggtttgagcgccagaactttgggcacttgtcccttggacacctgcgcattgtgagaagcgtttttggtaggcttttgtactttagtctgggtagcaatgctcgtcaagcggtgctcgctagtgaccccttcgtacaactctatcatcttgttaagggctgaatgttcagaaactaggctcttggtctctcttgtgacggttatgtcggttaagtctcaaatgcggatagcagcaagtttatcttgccattcatcctggtgagtatgcacttcaggtcgttgttctggagagccgtggtcaggtccgaagaccgattaggggatccagctggctacatacgcaaccagatgggtgacgagatgtccaagcacaaaaagttcatcttcctgacgtggatcgggcaggaggtgggcgttatccagcgggccaagatgtccacggacaaggcgctgatcaaggatgtcctcaacgtgagtagccaatagctagagatgccagagcccagaggcagaaatagatcctctcatcactaatcttttgcagaattttgccgtggaacttcaggcgggagtggaggccgagctggacattgagctcttccgtgaagcactgaacctccaagttactttatatatactgcttaccaaactgctcctttctctttaattattatgaattaattttatgaaatttaaaaactgtacattttatgaaatattatacaagcaattgtaaaatcagtttctataccatacattttgttgtgtctatagtgggactgctgaatttctatgataataagacaaaaattttactcactaaacacaaaattctaaagtggacagacatggcagaattcacttaaactagtctagtttgctaaacatacgctggatggatcgactcgaattttataagcgcgaaatgaaaatggattacgttgttgaactaaatagaaaaaattatctagttgctgtagttcccgggctctgcctcgcacttcctagcgggccctgaagagtaccgagtgaagtgcatcgatgtccacctccacgccagacgagtttgtggtcacggtgcgagagctacggccgagaacgttgaacaatactgcgtgatatctttaaagcatatcactcacctggccttgtgcaccgagcgacgggaggagtgcggattgaccagcacacagtgcatgggctggtcatcgaactgacgatggtgataggtatctacggccttctcggcatgttccagtgacttgtaaataacttcggcggtgccgggacgcaccacacgagcgtcgtacactgggccgatgtcgctaaaaagctcgcgaatatccgcagtagtcacgttagtatgcagattgctcaccagcaggcggtatccatcctttgtgttcgacgtacgcagcgacaatggggatggcgaacggcgcttgttcttcgatggagcagctgcatcaccatcactatcagtaccgctatcgctatcactaccaccaccgccaccaacagcctttctccggttctcgttggcgtagatgccatgagaaatgtgaggatctctcttaccgacaaacagacgagaccgcagcgattctgggagtttacttgtgcttgctgtgtcgcggtggcggcgctcgagaggctccttggtggtatttgagcgtccaactacgagtcggttggtcagcgaaggacgctcaatgcgattgcgggccgcctcgtaaatggagaatgcattgttatctattttgttatttagtggggccatggacatctccacgtcgtcgccgcggttcaggtcgagcccaccaattgagtagcgtggcgacgcttgcttcatttgccctaagtgcagtgtgcgagatatttcctctgaaagtagaagagtgctttttaggaacggcttggcagagaaaggcactaactaaccatcctcgaggtcctgcatattatcaagatcaatatagcgtcgtggagcaaagggtttgcccggcttatgggatctggggtcaaaggttcgacgcaagccggacaacatgtggttacccagttcaacgaccccgtcgtccgagtcccatttcgcctgaatggtgccgtccgcatggtttgacatgctaaggcggtgaccaaactgaccgatgtgcactccctttccgcgtgcgcgatgtgatggctcaaacgactcttcttcgtcatcaataagtattgggcccgccgaacgggccttctttcgctccagcaacagttggcgggcatcgatgcccgagtcgcgcacgctcttgttgatcagatcccgggcatcggctatcttggcccgtgtcttcgcggcaatcgtgtttctggcatcgaaggtgcgctttgccggcatatcagagtgagatcctcgtgcacccgatggcttgaaaaaaggcttgttcagcagctggcgcggcttggagaagttcgcattgctgcaatggaaaacgcattgagtgacattatattttttcggctgtcctgtaaatgtacttacaactttctgtcgaggggacgatagccgcgttgcccgcgcttccgctctataatctcgtccagactcaaatcgatgtccatggctcgcagtatacgcttttcacaccctttcctaagctatgtttgaagtaaaaacaaccagattcaaattatcctgactattcgagctacgttcgtaaaaaaaataggactggcgtttcactggtgacacttggggtcgccaactatcgcccggcattatcgatagcaactatcgcttattaacattttcgtgatgctggaaataaaatgtaaaatagaaacagcaatatactaacactaatacaaatatacaaataatactattaactatttgttcattcacaaaaacagtttttgcatgtcttaacattagtttgtagaagattgaaaattctcagaactgacaatggtagcttagaatacataatacgttttatccactgacattacgcgccactaattcacagtgtgccccttcgcacagccgagaacaatcgcgcttaggtgctagccgacgtctggtctggtcacactgctacctgcacaacaacaacaacaacaacacactgaaaaacagcaaaatagagccagccttagctaccaaatatttatattagaatttcagctaccccaactgcgagtgcgcgctttttactgcgattttttggctgcccctcacgcgcacgcacacgaacagtgattgcgcaattccagtggaacgagtggagtgtggtggtgtgcggtgtgtgtgtgtaaacaacaagcggacgacaaggaaacagaaaccgaaacagaaacaacgggaattgattgggacgagtggagcttttgatgggcaactcgcaaccgcgtaatgcaagcagaagcagaaggacatcccagtggccacaaggcgcagcggaactaggcgcctcagccagcgatcaccactaccaccaggaggagctgtatcaggagcagcagcagcagcaacaacagccgcaacaggagcaaccgagcagcaggagaatccagttccaggcccacaccaaccagccaacacagtcgcatcctccgggcgacgaggaacagcctgtacaatcacagcaggtaatgagtaagaaaagtcgcaagtgggtggtgggtggacgttgtagtatatgtgtaggacaggctgataaggcaacc

SEQ ID NO: 15131 - DNA, 1790 bp, DROSOPHILA
ctattttttttacgaacgtagctcgaatagtcaggataatttgaatctggttgtttttacttcaaacatagcttaggaaagggtgtgaaaagcgtatactgcgagccatggacatcgatttgagtctggacgagattatagagcggaagcgcgggcaacgcggctatcgtcccctcgacagaaagttcaatgcgaacttctccaagccgcgccagctgctgaacaagccttttttcaagccatcgggtgcacgaggatctcactctgatatgccggcaaagcgcaccttcgatgccagaaacacgattgccgcgaagacacgggccaagatagccgatgcccgggatctgatcaacaagagcgtgcgcgactcgggcatcgatgcccgccaactgttgctggagcgaaagaaggcccgttcggcgggcccaatacttattgatgacgaagaagagtcgtttgagccatcacatcgcgcacgcggaaagggagtgcacatcggtcagtttggtcaccgccttagcatgtcaaaccatgcggacggcaccattcaggcgaaatgggactcggacgacggggtcgttgaactgggtaaccacatgttgtccggcttgcgtcgaacctttgaccccagatcccataagccgggcaaaccctttgctccacgacgctatattgatcttgataatatgcaggacctcgaggatgaggaaatatctcgcacactgcacttagggcaaatgaagcaagcgtcgccacgctactcaattggtgggctcgacctgaaccgcggcgacgacgtggagatgtccatggccccactaaataacaaaatagataacaatgcattctccatttacgaggcggcccgcaatcgcattgagcgtccttcgctgaccaaccgactcgtagttggacgctcaaataccaccaaggagcctctcgagcgccgccaccgcgacacagcaagcacaagtaaactcccagaatcgctgcggtctcgtctgtttgtcggtaagagagatcctcacatttctcatggcatctacgccaacgagaaccggagaaaggctgttggtggcggtggtggtagtgatagcgatagcggtactgatagtgatggtgatgcagctgctccatcgaagaacaagcgccgttcgccatccccattgtcgctgcgtacgtcgaacacaaaggatggataccgcctgctggtgagcaatctgcatactaacgtgactactgcggatattcgcgagctttttagcgacatcggcccagtgtacgacgctcgtgtggtgcgtcccggcaccgccgaagttatttacaagtcactggaacatgccgagaaggccgtagatacctatcaccatcgtcagttcgatgaccagcccatgcactgtgtgctggtcaatccgcactcctcccgtcgctcggtgcacaaggccagctctcgcaccgtgaccacaaactcgtctggcgtggaggtggacatcgatgcacttcactcggtactcttcagggcccgctaggaagtgcgaggcagagcccgggaactacagcaactagataattttttctatttagttcaacaacgtaatccattttcatttcgcgcttataaaattcgagtcgatccatccagcgtatgtttagcaaactagactagtttaagtgaattctgccatgtctgtccactttagaattttgtgtttagtgagtaaaatttttgtcttattatcatagaaattcagcagtcccactatagacacaacaaaatgtatggtata

SEQ ID NO: 15132 - protein, 474 aa, DROSOPHILA
MDIDLSLDEIIERKRGQRGYRPLDRKFNANFSKPRQLLNKPFFKPSGARGSHSDMPAKRTFDARNTIAAKTRAKIADARDLINKSVRDSGIDARQLLLERKKARSAGPILIDDEEESFEPSHRARGKGVHIGQFGHRLSMSNHADGTIQAKWDSDDGVVELGNHMLSGLRRTFDPRSHKPGKPFAPRRYIDLDNMQDLEDEEISRTLHLGQMKQASPRYSIGGLDLNRGDDVEMSMAPLNNKIDNNAFSIYEAARNRIERPSLTNRLVVGRSNTTKEPLERRHRDTASTSKLPESLRSRLFVGKRDPHISHGIYANENRRKAVGGGGGSDSDSGTDSDGDAAAPSKNKRRSPSPLSLRTSNTKDGYRLLVSNLHTNVTTADIRELFSDIGPVYDARVVRPGTAEVIYKSLEHAEKAVDTYHHRQFDDQPMHCVLVNPHSSRRSVHKASSRTVTTNSSGVEVDIDALHSVLFRAR

SEQ ID NO: 15133 - DNA, 4549 bp, DROSOPHILA
accacctgaatgcattacggtttatgctacgttttttatgcctatttgtgggcagttttgtgaacgatatcagcgaattgagagcacagcaatggtcataaaaatatagaagagcgcacaataatggccggtgtggtcagtgcattgtgcactcaataaaatttgattgtagaaattccaaacccgcgactcactcattagaattccatgcgagttgccctgaataatcaattcagccgggggaacgcacctttccagggattcacgcatccacggtgactgcggttttcctcggcctgtcactcaagtcactcttgttgtacaaggcctaacatttcaattagggccgtgcatctatgtatctatggcttctggccaccaccaccaatggaagcccattaagagtgaatggatcaaatcgcatctcttcgcgttctgggagcttccgcctatgaagaaggcattaattgatttcggtgcctttttaattacagcctcttgtttgcttttcgcaactttctctctagaaggcgagccaattaaatgataacaaattcgaagggaagaggcggtttttcaattccgatgctgttgataggcaggcgccgctggcaagtgaatggcgcaatcagaatctcgcaacccaaagccgacacccaaacgaaaaaccccaagtggcaagacagaattctcaccgaagttgaggccactgtgcgcggcggcttgtctgtttactgggcggggaatttgggggaacttggaggaataggcggcctggggatcgcacaaatttatggccacattcaattgtcaagtttatgtgactgcggctgaggatcggccaatatttgcataagaggcgtcccttgattccctagaattctccctggcatttgaaagtctcattgtcagggctttattcttttgggtttgctttattttctgcatgtatataactgctctataaacaaaaaaccatctacttcgcttttctttgcagatatacgaagatcggagtgcgtccctaatgtttcctcgctggcacacaaatgacgaattatgagaacattataaatttgccattaaactttaatgcaaataatcacgccgctggtaataatgagaacaatgccaaaattgccatcgttggcgagcagctgctgaataagatgtcgcagcgggatttctccgaagtaagtcgaaaggcgaaaggaaatcgtattattgtttaattatgcttttggactgtggccatacgaccacctcagccaccgccccttgtcccaacgaactctcgaaaaacatgtttgccagctcatgtatttccagtttgcagttcaaacaccatgacaattatttatggccttcaaatgtataaaacttaatcaggcattacgctcgccgaaaaaaaaattcaacaaagcgatgagatgaggcagtggaaataagtcaataagaaaaaagcgagtctgtgcgctttttgtacaggggaaaaaaaaaggaaaacaatcaggggcaataatcaaaatgatggcaaaatgatttcaatgttgattaactcagcggcaagactacaaaagggcttagctacaagggccaaattaaacaaaagcccagccgagcggggagataaaaatgccaaaacgcaaaacctcaagcgattgcgaatgggaacgggaatgggtctgacactgactccaaactccgactcctcctctgaccctgactccttttccctgggccctttcatcatattccgcgctgtcatgtcatgggcaggaacaaaaaaagatccaacaacaacttgaggaacagacgacaacgtcaacgatgttggataagtttcaggctctgtctctgcgacggaccagtccagaattcggaatccagatgatcagggagtccagcatccagcatccagattcagacccctgcggcctgtctcgccgtctgactgactgactggcattcgagtgtccctttttgccagctagacggacgataggaagtgaccaatcccttgcccattcccagacccaatcccgttccccacagtttctgcaatcagagaagcgtggccaggaatttcggtttggtggccagcgaagtgggggaatcagcagctaaatgagtgcataaattccagactaatgtcgatttcgattaagtctaaacagacaaatatttaaaggttaccctctgatggccatataaaataaaatcttgaatttaggtttgcttttattgcaaagatacccaacccgtccataataatgtgatgtttgcaactcaagcctgttcttaataagcttttatatttgttttataattatgtttaaatgcagttagtatattaatctatagtgttataggaaatctgcgtcttttgagatcattaagtggaatacaatctaaatgaagagcatatattaaacacaaaacgcggtgtctaataaaattaaaactttaatgcctggattaaatttctaagaggcccaacttcctgcctacgctgcaatgggataatcggagattaggcgcggtttttttttttttcaaagaggcagagattcagaggagctcagcccgcagctaattattttattacgcgttaaattgcaacaaaattctcaagctgagcgcaaaacatgccaatgtgcgccacgagcaatcgtgaaattgtttgcattccaatgcggctgactttatcgatgctccagcctctggggctaacacacatatgtatactccgtacatatgtatatgtggacaaaaagccaacttggccaacgcatactagcccgtttggttccaggcggcagcccgagtgcatctatgggtgccactttttgtcttactgagcgctcactttattttcctctttttttttttttgctttggctgctgggcggacagccaggaaaacggcgaccagttctcgaatcgcaggtttttctcttgcattcctgaattccaaccgccgacttgcaacttcctttctctacccgcttttctccctttctcattgcataaaattcttgtccgtctttgactattttctaaaatgctgctgttgcacggttggcccaagtttgctgctgcagttgctgttggccatgttggtgcggcaacagcaacagcaacagccactgcaactgctgctgccaatttagctggaattggcgaagcgagatagccagactatcactttacatgacttctctatgtgccatttgggcgccaattcctaaattgacatacacagcacggtgtgcaacaataaaaaaaaaaaaaaaacggagcgaaagggcagaaaatccagaaaaagatccactgagattttgcgcactgtggtaaggaaagaaaggtagttaattaggagatacaaatactgaaaagtgcctccagtgatcttgttacagatccggagctcatccagcaccagaaagaaatgactcgcggcaaaaatggaattcgtatagtcaataaaagtggtagccagttacttaaaagatacttaattcattggagaaaccgtttttatatgcttttcaaggatgctttcacgagttttcagcttagcaaatagtgggcttaaaccgtaaaataaataataaaacatagtgagcacttcccctaaaggtatacttactttaaaataatgtctaccatctgtcatcgctggatcacggaatactcatacttctgcagcattcccacagtccgagcttatccctatcctaagccatcgacattccggctcaagttcggactgactactattattattattatttttttagtcaaagtgataacatctgctaatgccattccgtctgaattcccagagcggcgctccctaccgccgaagaacttcttcgttggccatttggagggcatgttcctgctctctgtgcgtgttatttgactttgaccattggcagcagaaacgccatatcatgtctgcgagatctactcggctagcaccgccaacgctcggaagatgaagagtccaagttcggtttggaaagggtccattaactaagtcagaagttggcgaggaactccttagtaacttgggatcatatgtgtttatttttcattttcaataacaatatctaatgtgctagtgtatttagcaattcggtttccatgcgctctccttttttcggtgtttcccttatttttgttttgttttttttttttattattttttttggcaacgccctcttcatttgggccttatcgctggggccaagtccgttttggccggcttttataggcagcataaaacgaaaattgcgttctgcatctgtcagatactttgttgcaggctgatttattcgaagctcgaagagttcgcggccagaaggccaatctagctgttcacacatgaacacgaatatatttaaagacttacaattttgggctccgttcatatcttatgtaaatgaatcgagagcgataaattatatttaggattttgttatctaaggcgacatgggtgcattgctcaaaaacatgtaatttaagtgcacactacatgagt

SEQ ID NO: 15134 - DNA, 543 bp, DROSOPHILA
atatacgaagatcggagtgcgtccctaatgtttcctcgctggcacacaaatgacgaattatgagaacattataaatttgccattaaactttaatgcaaataatcacgccgctggtaataatgagaacaatgccaaaattgccatcgttggcgagcagctgctgaataagatgtcgcagcgggatttctccgaaagcggcgctccctaccgccgaagaacttcttcgttggccatttggagggcatgttcctgctctctgtgcgtgttatttgactttgaccattggcagcagaaacgccatatcatgtctgcgagatctactcggctagcaccgccaacgctcggaagatgaagagtccaagttcggtttggaaagggtccattaactaagtcagaagttggcgaggaactccttagtaacttgggatcatatgtgtttatttttcattttcaataacaatatctaatgtgctagtgtatttagcaattcggtttccatgcgctctccttttttcggtgtttcccttatttttgttttgtttt

SEQ ID NO: 15135 - protein, 100 aa, DROSOPHILA
MTNYENIINLPLNFNANNHAAGNNENNAKIAIVGEQLLNKMSQRDFSESGAPYRRRTSSLAIWRACSCSLCVLFDFDHWQQKRHIMSARSTRLAPPTLGR

SEQ ID NO: 15136 - DNA, 3457 bp, DROSOPHILA
actctttgaagctgagctccttgaccagcgaaagtttgtgattcagtacattcaactgggtgctgaaatcccgctccgtaaccggggtttccattattatgttgatcatctcctcggacacggccatgtcctcgataaactgggacaattgagccttgaccgactgacgattggtcagttggagggacatggatacggattttctttgcagctgcgtgatctcagtgcttatgttgttcaaaacgctctggaagctcatcagcatattttccatgcgctccaggacatcgtcgcaatcgtttatctgattgtgcaggttggctatattctgcgactccgctatatagtctggtattcaaagggatatcattagagctaagtttgcatatggaacatggtgcttaccctctatggacttattctccacctccttaaactccttttcaatctgtcgtgaatattgccgcagatccgtggtgttctttaggatctcccgcacctcctcgttgtccagttgttccgtcatttgcggggacggcacctcggccatttttgttttccaatttaaaggtatttttcccaattgtttttctcaactaccaacaaaaataaagtatgtcatcaaaacagctgtttttgttatcggagtaagatgtgcttttggaaagaccctaatattggtgatgagaactaaactatgttttcaaaaaaaaaaaagatttcttggttcatataaaaaattacttaactaatacaattttaattaaaattaatttttgggtgaaaattgaaattgaatttaagaccaatttttttcaattattcatttatttgtacacaagcaatcaatgagtttcttttctagtacaacacttgacttgtgcctcttatattctaccaattatacaacatgaacacaaatttatttttaagcaataaaagctaaactatcgccctacccagaacttgcgaattaacagctgttttgactatcgatacacaattggagagtgtgcccccattggcagccatcgagaatagataatatcgaaagtatcgaaatagaagtttacgcgaagagaaggaaacacatagcaaaaaagaacgcaaaaaataaaggttagcgaaatctgtgcgacgaagatgaccagtttccgcaagcgcaccgtgcagaagccaatccgcggcacccgcacctcaccgcacacggcgcaggtgatcacctccagcggaaatccgtacttggacgtggtcattggcggcggtctgcccatgggttcgatctgcctgatcgaggaggatcgcttcatgacgcacgccaaggtgctggccaagtactttctggccgagggtgtgatttccaagcaggagatatttctgggcagcctggacgacattccagccgagatgctgcgccgtctgcccagaccgctgaccgaccaggaatcgatggagcaaagcgaggtgcaagcgctgggagatgctggcgccgaaaatggcctaaggatcgcctggcgatacaatgatctgccgctggtgaattcggaacatgccacagcaaaaatcggacaccatttcaatctgatggaacagatggactccatgatgctctacaatgtcaagactaccttgtgggacgatagccccaagcatctggacatcgtcattgacgaggagttctccaagagcagctccccaaccactccgtcgctggagcagcagcccgtggaggatgccccaccgattccgggcacggagaccgctccgcaggagaagatgccagcccaggaggaggagaactctgccaacaacaataataacaacaataacaatagcagcagcgtgaccagtagcacaaaaacaggcagccaggattcgccgttgcaggtgttccacaaccctcggtacaaaggactgctcaacgatattcaacagctgctgcgtaacgagagcttcgtcgctgggaccaagaataacctgtgccgcgtctgcctgacctcgttgggatcgccgctgtggtacgacgaacacttcggcgaggatctgatcaagtttctcacactgctgatggccagtgtgcggaactgcaactccgtgtgcctgatcacgatgcccatgcacctgattgccaagtacgatgccagcctagtgcccaagatccgccaactggtggactatgccatcgaactggagtcgtttgccggttcggagcgtgaaacgcacccagccttcaaggagtacagtggcctgctccatttgcacaagatgtcggccatcaatacgctggccgtgcacatgccggaaaccccggacttggccttcaagttgcgccgcaagaagttcatcatcgaaaagttccatctgcccccggagctgcaggagtcatctgccaagccggacaattgcatctctggtctactgagcaattccaatgccacagcctcgctggatttctagctgtcagcggaattagaaactaagtgcgcgtatgtaaccacgaaacaactaaattgcataataataagccaagtaaatgcattaatatatcagccctgattttgtaccattttgaaaacaaaccgctcttctcgtcttatcgtttatcgattgccctgcattgcgctcagctgttcggtttggtcatcggtttgtgtttggcaacgggacgcctaaaatgtaaacatgtcggatttccatcgtatttttggggatttaagggtgtactacgagccgaatgtgcagtgggtggatgtggaggagtggctgtacggcgaggaggccgagggcagtgtgctgcagcagcgggcggagaagttctggactatggccatgtgcctgcaggatggtggccaccaggagacgcagctgcagttgctccgggacttatccgccatcatacgagccatgagagacgagaaccaggccagctatagcaacacccacgacaattggtccaacttaattggattttctccagcgcttggctacctgacgtatatatactcgcttgtgagcctggtggttttgcccgagcatgtgcagcaggctgctccgcagcagctgaatgagaacatcaatatgcagctagccctcaatgcggctacaacctacctgctcactttgaccattcctggtgccaaaatctttggcgtcttcgacgaggatgtgatcgaacaggttctcaaggtcttccgtcttctggagatgaacaataacaaaagcttacgcgctagcatgatctggatgttcttcctgacgatctgcgatgacctgaagatcgtctttcgctacgtgcacttcaaggagcacctgaaaacgcgcgacaggatcattcgttgtctgctggaggtgctctacatgaactttaaaatgggatatcaaaatacatgtaagtgtaacccattatgttatacttatttagtaactttaaatttaagaacaaacgaaggcgaaattt

SEQ ID NO: 15137 - DNA, 1457 bp, DROSOPHILA
caattggagagtgtgcccccattggcagccatcgagaatagataatatcgaaagtatcgaaatagaagtttacgcgaagagaaggaaacacatagcaaaaaagaacgcaaaaaataaaggttagcgaaatctgtgcgacgaagatgaccagtttccgcaagcgcaccgtgcagaagccaatccgcggcacccgcacctcaccgcacacggcgcaggtgatcacctccagcggaaatccgtacttggacgtggtcattggcggcggtctgcccatgggttcgatctgcctgatcgaggaggatcgcttcatgacgcacgccaaggtgctggccaagtactttctggccgagggtgtgatttccaagcaggagatatttctgggcagcctggacgacattccagccgagatgctgcgccgtctgcccagaccgctgaccgaccaggaatcgatggagcaaagcgaggtgcaagcgctgggagatgctggcgccgaaaatggcctaaggatcgcctggcgatacaatgatctgccgctggtgaattcggaacatgccacagcaaaaatcggacaccatttcaatctgatggaacagatggactccatgatgctctacaatgtcaagactaccttgtgggacgatagccccaagcatctggacatcgtcattgacgaggagttctccaagagcagctccccaaccactccgtcgctggagcagcagcccgtggaggatgccccaccgattccgggcacggagaccgctccgcaggagaagatgccagcccaggaggaggagaactctgccaacaacaataataacaacaataacaatagcagcagcgtgaccagtagcacaaaaacaggcagccaggattcgccgttgcaggtgttccacaaccctcggtacaaaggactgctcaacgatattcaacagctgctgcgtaacgagagcttcgtcgctgggaccaagaataacctgtgccgcgtctgcctgacctcgttgggatcgccgctgtggtacgacgaacacttcggcgaggatctgatcaagtttctcacactgctgatggccagtgtgcggaactgcaactccgtgtgcctgatcacgatgcccatgcacctgattgccaagtacgatgccagcctagtgcccaagatccgccaactggtggactatgccatcgaactggagtcgtttgccggttcggagcgtgaaacgcacccagccttcaaggagtacagtggcctgctccatttgcacaagatgtcggccatcaatacgctggccgtgcacatgccggaaaccccggacttggccttcaagttgcgccgcaagaagttcatcatcgaaaagttccatctgcccccggagctgcaggagtcatctgccaagccggacaattgcatctctggtctactgagcaattccaatgccacagcctcgctggatttctag

SEQ ID NO: 15138 - protein, 437 aa, DROSOPHILA
MTSFRKRTVQKPIRGTRTSPHTAQVITSSGNPYLDVVIGGGLPMGSICLIEEDRFMTHAKVLAKYFLAEGVISKQEIFLGSLDDIPAEMLRRLPRPLTDQESMEQSEVQALGDAGAENGLRIAWRYNDLPLVNSEHATAKIGHHFNLMEQMDSMMLYNVKTTLWDDSPKHLDIVIDEEFSKSSSPTTPSLEQQPVEDAPPIPGTETAPQEKMPAQEEENSANNNNNNNNNSSSVTSSTKTGSQDSPLQVFHNPRYKGLLNDIQQLLRNESFVAGTKNNLCRVCLTSLGSPLWYDEHFGEDLIKFLTLLMASVRNCNSVCLITMPMHLIAKYDASLVPKIRQLVDYAIELESFAGSERETHPAFKEYSGLLHLHKMSAINTLAVHMPETPDLAFKLRRKKFIIEKFHLPPELQESSAKPDNCISGLLSNSNATASLDF

SEQ ID NO: 15139 - DNA, 2934 bp, DROSOPHILA
atatgtatatacaccatatattttgtgcttctttttccattaatatctgctctgtcgacgtgtacgtcgaagtcgacgcagctcggcgtttttgtgcgctgtgtaaagcggaaaaaattcattttcagttggcgcttttggtgtgtgggtgtgcgtggcacgcagaaaaataaataaaataattataataaaaaaaaagctcgtgaaaaatattaaatgtaactcaagtgattccccaataaacaaactgaattcgcacgggaatttgcaatccgttcttttggccgccagcttgttgagcgtgagtgggagtgggagggcgatagtgacacagtgatgtgcacttggctacttattcgttagaactatatgcatatataatgtacagcttagaaaaaaggtttttcgcataaatttatagtaggttgtattaaagtaaaatggcatatcatatataatgcctttctgatggaaggtaacccgcggtagaaggcaagccctttgcaactaatgttcgatttgtttctttaaggtggatctgatattcaacgaggagggctcctgcccgctatgcaacaaaactttctcgcgcaaatcctcgctcatgacgcacatacgaaatcactcggcggagcgtaagtttgtgtgcacctactgccacaaaggtgagtcccatatgccgttcgcacacatcatctggttcttaacaatcgatgtacctcttggattttcaggcttcacgcaggcggccaacttgcggaaccacgaacgcatccacacgaacgatcggccatatcagtgcgtggactgtggcaagaccttcacgcagatcaccaatttgaacaatcaccgccggctgcacaccggcgaacggcccttcgtttgcaatgaaccggagtgcggtcgcagcttcgcccaggtcagttccaagataaattgataaattgcagaggatttatgataataacggctcgatatgttctcgcattgcaggtgacgaacctgaacaaccatatgaagtcgcaccacaaggtgcagcagtactgctgcaacgtgtgcaacaagaagttcacgcaggtgacctcgctgaaccagcacctgcaggcgcacgctggggtcaccggctactactgtccgcgttgtccggagaagaacttcaaactgcagtcgcagctgcatacgcacatgaagacccacggcctggcctttccgtacgagtgcgacaagtgcgacgagaagttcctgcagcaggcccatctcgaccagcacctcaagatgcacgacgagttcaagttcaagtgcgacatctgcccgagtagcttcaatcaggagtcgctgctgaagaagcacgtgcagcgccatgtcgagggtcgctacctctcctgtccggtggccaattgtgccgagtcctttgcggtgcgccagcacctctccaagcacctgctcaccaatcacgcccaccacgagctgccgcctccgaagcgatccaagaaggcgggcacgctgcagacgtcgcaacagccgctggcgatgatcggccagccgttgtcactgcagcacacgacagggcaacgtaagtgctcaccattcactcattcactttgaatctcactacgcctttcgttgcatatccaggtgggcgtccgccgaagaacaagaacaaggcgacaacgctggccgccacggccatcaagatcgagatcaacgaatcgctccacagccagcatatcagcaatgtcagcggcctgtccatccagcagcagatcaatcagcacatgcagcagcaggcggcacagcagcaggcgcagcagcaggcggcacaacaacagcagcagcaggcggcgcaacaacagcagcaggcggcgcagcagcagcaactgctgcacttgccgatgggacaggcggtcaaggcgcgtttcatacccactaagtaggctagttaagaatggaaagaaggtctcttttagcttaagccccgaacgatcagctgctaaagtccctgattagcatagccatagccaaagtagcatcacattcagcacatacacacgtaaaatatgttagatatatggcgcggatgttttggagtctctgcagatctctaaatacttttgggtgtctgaagttgatgtagaaatcattctttatatgcgttacccgtggagttaagcgtatgctggattggtgaaaaaaaggtatggaacaggcagtaggaagcgttttcgtccttgaattctgaatcagaatggaatgggggagttagtcgagttcatcgattaaagctagcttttagtttttctgagatgcacttgtcctactctcgcattgagttcagcatcaactttttgggtatcagaatccacttaattatcttgaaatcggcgagtggacttccaaaacatcccgaatttagagtcggcggcaagctgctggttcagtttggtgtctgtctcccacttcctgttttgaattcagcagccaaagcaatagaggaaccaaatgcccctgaataaatttccaagaatattagcagcaatgcatgacatcgaaagagataaggagaaaaagcagcagcaccagatggacagacaaaaacacaactgacttataaaattatgcacataacacccacatctatatatacattatattatataaacatgagatcgggttgagaaatctgtaaaacttaaatcgaattaaaattttattgtaatgcaaaggcgcagcgaaacggaaaatataatgttgaaaaaacaaaaaaaaaaaaaaaacagaaagcaaatacaaattacctacaattgatagtaattacgcatagagaaaagtaacgaaaacaagaagtgaaaaacaattcgattaaattcggtatgtatttatgttaggcattagcttaagtgtttttattttttttttaataaaccattacaaaaa

SEQ ID NO: 15140 - DNA, 1266 bp, DROSOPHILA
gtggatctgatattcaacgaggagggctcctgcccgctatgcaacaaaactttctcgcgcaaatcctcgctcatgacgcacatacgaaatcactcggcggagcgtaagtttgtgtgcacctactgccacaaaggtgagtcccatatgccgttcgcacacatcatctggttcttaacaatcgatgtacctcttggattttcaggcttcacgcaggcggccaacttgcggaaccacgaacgcatccacacgaacgatcggccatatcagtgcgtggactgtggcaagaccttcacgcagatcaccaatttgaacaatcaccgccggctgcacaccggcgaacggcccttcgtttgcaatgaaccggagtgcggtcgcagcttcgcccaggtgacgaacctgaacaaccatatgaagtcgcaccacaaggtgcagcagtactgctgcaacgtgtgcaacaagaagttcacgcaggtgacctcgctgaaccagcacctgcaggcgcacgctggggtcaccggctactactgtccgcgttgtccggagaagaacttcaaactgcagtcgcagctgcatacgcacatgaagacccacggcctggcctttccgtacgagtgcgacaagtgcgacgagaagttcctgcagcaggcccatctcgaccagcacctcaagatgcacgacgagttcaagttcaagtgcgacatctgcccgagtagcttcaatcaggagtcgctgctgaagaagcacgtgcagcgccatgtcgagggtcgctacctctcctgtccggtggccaattgtgccgagtcctttgcggtgcgccagcacctctccaagcacctgctcaccaatcacgcccaccacgagctgccgcctccgaagcgatccaagaaggcgggcacgctgcagacgtcgcaacagccgctggcgatgatcggccagccgttgtcactgcagcacacgacagggcaacgtgggcgtccgccgaagaacaagaacaaggcgacaacgctggccgccacggccatcaagatcgagatcaacgaatcgctccacagccagcatatcagcaatgtcagcggcctgtccatccagcagcagatcaatcagcacatgcagcagcaggcggcacagcagcaggcgcagcagcaggcggcacaacaacagcagcagcaggcggcgcaacaacagcagcaggcggcgcagcagcagcaactgctgcacttgccgatgggacaggcggtcaaggcgcgtttcatacccactaagtag

SEQ ID NO: 15141 - protein, 397 aa, DROSOPHILA
MTHIRNHSAERKFVCTYCHKGESHMPFAHIIWFLTIDVPLGFSGFTQAANLRNHERIHTNDRPYQCVDCGKTFTQITNLNNHRRLHTGERPFVCNEPECGRSFAQVTNLNNHMKSHHKVQQYCCNVCNKKFTQVTSLNQHLQAHAGVTGYYCPRCPEKNFKLQSQLHTHMKTHGLAFPYECDKCDEKFLQQAHLDQHLKMHDEFKFKCDICPSSFNQESLLKKHVQRHVEGRYLSCPVANCAESFAVRQHLSKHLLTNHAHHELPPPKRSKKAGTLQTSQQPLAMIGQPLSLQHTTGQRGRPPKNKNKATTLAATAIKIEINESLHSQHISNVSGLSIQQQINQHMQQQAAQQQAQQQAAQQQQQQAAQQQQQAAQQQQLLHLPMGQAVKARFIPTK

SEQ ID NO: 15142 - DNA, 5544 bp, DROSOPHILA
gcttgaaagactctaggtgcttctgcggtattccctaaaactgcttgccttcatttcagcgaacttcaaaataagaaagaaactggttttggcattgaacaagcaaatcagcacgaaacaattggcgatacatgaagagacaacgagactgtttgttgtgggccgaggcgagacattaaagtcgcattatatatcgcaggcatccgacaaagctcctctggtttcgcaacttgcgaggcgcggattcccgaccaccgaggccttgaacgagaaacattccaaagaatgatctttaattgcccaagagttttttaattagtattggagtggagacactgctcaaagttgaaatcataatgtttgcactggtttcatttatatttagcttcgggctctacaaatttgttttgtaaattactgtttacagatgtgctgcttactggaccgatgttaggaatagataactcgacaagccgggtcaaattgagatatatcccaagcgataagtttcccgattgaaccgcaagtgaacttcttcgtcgggcgaattcgctgcgactgaattccatcctctgacatgctccatttttgctgaagttccccaaagcgccacatttcgagcaaaatgctgtagcgaaaagctgcgtacatttttattgaaagctttcaaacgaaagcggatactttcaccacgaaagaagacagtgcgcagagcgccgttcaatcgattaagctttagggtcagctttcagcaagtgtgagtatgcaatactttacttgaccaattggaaatgcaaccgatggtattggtatttcaacgtctttaataattactaatgttcatggctatatcacattgatatttttttttaatgatataataatttataatataataattactaatgttcatgtctatatcacattgatattttttttgttaatagtcactttctaaagacacaaaacgaggttatcggcaaaatatattgacaaaatattattgcagtattattttttatttcaaatgttaaaaaacatcttatgttcaataaacggtgttaaatccatctgagttagttgaatagttttaagaaaagtgatatacagaaaccgttatttatggtttgaatattaataagatacaaacatatacttattacagcttttaagccaatggcgagttccgtgctttatttttaggagttgttcccacggtaatacgacttgccatagatctgttagaaatgacactcctcgtggatttaggatggttcctaggaaacaaactcgaattagaactatgagaaaacataagaacacaattgaaaagtaaaagtgcaaaaacaagtaaataaaattgtggggacaacaaacaccattctgatagtaagcagaaattaaaaggtgaacaaccaaaatgcagtgcaagtggttcaaaaccgattagtttagccaagaaaacaggcttaacatactaaataagtgcattcgatcttacatgtaaggtcaagcaagttattagtagaacaaataattccaacaccaaataactaataaatagttctcttgggattacctataataggacatttcgtgtcgtcgtgttttctagcgaaatctcttcctcactgttgtttacctcctcaccctcccccctaatgctgctcaggcagagataataagtggacctgattagaagaaattcttgcagacatgcagattgcttacctctcctgcaagagtctccacgtgctgcgcttcagaacgaacagtataaatatgatgattccttgagaccaatttaaatagtcagccaccagaaagacgttggcccaagtttggttggattgcgaaaagtaggagcctatctccaagctccaggacaatcccataatgatgaagagccgtaggaagaaggtgtaactttaatgaaatcataaagaggccgttattcgagagactttcttcaaggaagtcgtttaacttgcgtctgtttgtcggagttcagcttctgctttctctcttgcctgtgcgcaaagttctgaatgtccttcttcactcctaatatacgcttagccgtcaggatgaacatggttatgttaaaggcaataagaaataccattggaccgtaaaagtagagcatggctgaccaggcttgagctattgatgacaaagaagaaagctcaatggtgaactatgtgcacatacatatttatagttggatgttggtactcactatatatccaacagtgtccctcgtggcccacacgaggattccaatcctggttttccacgatgttatcggccagaacggtaattcctgtcaggaccaccgccatgccccaagcataggtattgtaggccagaaaccgatgctcaaataagaagcgattcgctttgtgggaggagcctctgaacgtgttccaaaggtgcagactgatgacggaaagccaaaaaaatgcggccatgacaaagaagtaacccagaaaacctaagaaagacgttttgaacatgttcttcaccgtatcgtcgacatgatctaacctgctggtttgcaaaagctaatggatatctgccacaaatcgagcaataggaaaagatatcccataaagagacacaccatgtagcagatgaagcattttccatgcaagttttgtagtttcttgacgaagaggtatacggcgatcgttagaaccatgcatatcagcgaagagatcatcactgtggggagaatggtataatcacacggcaaatcagctgatcgtatggtatagcttaccaaccgtctgaccggtaattgatggcactatcaaacagttgtgaggtgcaattcgaatagacgtagcattaccatctgcgaatgtaagatgctgaaggcagtattcccgcttgcgaagagtcacacggtcaaagtggcgaaagaaagttccgttctagaattagaaaataccaagtaaaccaaatatgttcattatgaatatattagacaactgaacctcgaacaacgtgtacttatcctgttcttcgcggttgtctaggtagaacattccgtcacacggcatcggtaggtcccactggacgattagttcgtttttaaagtgtctgcgggacaccgacccgtcgtcaagagtcacattaaggaagggatcgagttcagccagctcctcgtcggacatgttgtcgtagcagacaccattatccatgatatggtcgtgagggcagcaaaatctgacacagggcttcagcttgcacacacatcctcttatgtgacgagccaccttctgcttcgagtcgtccgggagaatcctaaagtcatattctcccgtcaaaatggccggaacgagcaacccctcaaataagtacgatccattctgtagtttttgagctgccgaaatatcgacagtgtcgaaataatcgcattcgagaatgtctgcatatgatttttgaataaccagcacaacaagtatgacagttgatatccgaagaaccaaaagagttttcatttatctgcaaaggacacaagaaaggacgcctttgccaagatgttttttgccgtagttggaattgaaaatagcaaaaccaatgaaaagaacttaaatggtatggtagtatattgtacaaatgataaatgagaaccaaactttaattgacaacacaaagatagtccacatatttttcctcgtttgtcatactgggtgatgttgatttgtatgtacatacatacattctgttgtaaagcttgtatttagcttctagcagtgggcatcgaacagctatgaaaggcattttaattccaaattcattgttaggtacggctgcattctgtggtaattcgattttcattcggttcatctgatcctgatgatcctaattacaaaagtggagatgtggatctggtgactgagtggcctggccccatatttgaccacaacccaattttgattaaacaattatgttgttctgggaaaaccaaagttattttatatttattattttccaaaactaatggtatgatattcttgtacatatatacacaaaatatgatatatttaaatattaatatgtgtatacatattatgcatatatgcataactgcacttacacagtacacatgatatcagcctcatttttcttattcacttccacgaaaagaagtctcgttgtaaaaaaatatttattttttttgattttttcttctcgatcggtgtatcacagttaaaatggtaagatattcttgtacatatatacacaaaatatgctatatttaaatattaatatatgtattttatggagttaaagtcagatgcgagagctctgccaataattaaattcgtcgtatgtatgtatgtgtaagtgcacacaagatatcaccatagtccgtctttttttttatttactgccacattcagtacaattacattgtacaaaatatttacgcttttttgttctcgatcggtgtatcaagcggacatggagcgttccgcgtttgaactttttttaagcttaaaactcacacagatgtgtgtgacaactaaactttactctgctctctctcctaaaacttgaacggaaaaaaagaatgaatgttgaacaatggtggcagaacaaacccgtctgccgccacgatcagtgtcgttttgtgcagagtaatttttcgtaacatagtttctggactgagaatattttttattaattgaaaatatggatgggcatgtggaatgatgtttttctttcaataatatgattcgattttatttacaacattatgtttgacatcggcttattcagttacgttttaatcgatatatcgtacatgcacttgcactgacgatagtcagttttgatgccctgtttccaaggagcacatttcagtgttaaggctaagcgaccgctttaactcgatgaaaagttttgggatcagctgataagtgctgttttatacatggaattataataaccgtaaaaaaaattcaacttcttataaccaatatcgtaatcttatcggaactgttaactcgattacacttatcaattacaactagaggttatatcgatactatcgtgcgaggctagcatccatcactagccagtccattttttcattgtgtcggttcagtttatttgggtttgtttttcgtttcttccgtttccgtgaaaacccctagttaaggacaaaggacattaagccaagttcgcgcatttatattgatcgttaaccggcctgcgtgaatttctttctacttttgttgtcctataaagcggcagcctgagtgcgagtgtgtgagtccggtggctatgcagtgtgtgctctctttccgaatgcgttagaaacatattctgcatttgttgaatacaaaatctagttggtgcaagtatagtacagcagccagaaaaaagagaggtaagaagagcccgcctctctgcctttccctttgtgctgcaacttctttcgctgcagtgtttgtaattattattgttattcttcctcttgctctctacctcttccggagttccacgcaggcggacaagggagaggaatag

SEQ ID NO: 15143 - DNA, 1928 bp, DROSOPHILA
taaagtttagttgtcacacacatctgtgtgagttttaagcttaaaaaaagttcaaacgcggaacgctccatgtccgcttgatacaccgatcgagaacaaaaaagcataaatgaaaactcttttggttcttcggatatcaactgtcatacttgttgtgctggttattcaaaaatcatatgcagacattctcgaatgcgattatttcgacactgtcgatatttcggcagctcaaaaactacagaatggatcgtacttatttgaggggttgctcgttccggccattttgacgggagaatatgactttaggattctcccggacgactcgaagcagaaggtggctcgtcacataagaggatgtgtgtgcaagctgaagccctgtgtcagattttgctgccctcacgaccatatcatggataatggtgtctgctacgacaacatgtccgacgaggagctggctgaactcgatcccttccttaatgtgactcttgacgacgggtcggtgtcccgcagacactttaaaaacgaactaatcgtccagtgggacctaccgatgccgtgtgacggaatgttctacctagacaaccgcgaagaacaggataagtacacgttgttcgagaacggaactttctttcgccactttgaccgtgtgactcttcgcaagcgggaatactgccttcagcatcttacattcgcagatggtaatgctacgtctattcgaattgcacctcacaactgtttgatagtgccatcaattaccggtcagacggttgtgatgatctcttcgctgatatgcatggttctaacgatcgccgtatacctcttcgtcaagaaactacaaaacttgcatggaaaatgcttcatctgctacatggtgtgtctctttatgggatatcttttcctattgctcgatttgtggcagatatccattagcttttgcaaaccagcaggtctgggttacttctttgtcatggccgcatttttttggctttccgtcatcagtctgcacctttggaacacgttcagaggctcctcccacaaagcgaatcgcttcttatttgagcatcggtttctggcctacaatacctatgcttggggcatggcggtggtcctgacaggaattaccgttctggccgataacatcgtggaaaaccaggattggaatcctcgtgtgggccacgagggacactgttggatatatactcaagcctggtcagccatgctctacttttacggtccaatggtatttcttattgcctttaacataaccatgttcatcctgacggctaagcgtatattaggagtgaagaaggacattcagaactttgcgcacaggcaagagagaaagcagaagctgaactccgacaaacagacttacaccttcttcctacggctcttcatcattatgggattgtcctggagcttggagataggctcctacttttcgcaatccaaccaaacttgggccaacgtctttctggtggctgactatttaaattggtctcaaggaatcatcatatttatactgttcgttctgaagcgcagcacgtggagactcttgcaggagagcattaggggggagggtgaggaggtaaacaacagtgaggaagagatttcgctagaaaacacgacgacacgaaatgtcctattataggaaccatcctaaatccacgaggagtgtcatttctaacagatctatggcaagtcgtattaccgtgggaacaactcctaaaaataaagcacggaactcgccattggcttaaaagctgtaataagtatatgtttgtatcttattaatattcaaaccataaataacggtttctgtatatcacttttcttaaaactattcaactaactcagatggatttaacaccgtttattgaacataagatgttttttaacatttgaaataaaaaataatactgcaataa

SEQ ID NO: 15144 - protein, 513 aa, DROSOPHILA
MKTLLVLRISTVILVVLVIQKSYADILECDYFDTVDISAAQKLQNGSYLFEGLLVPAILTGEYDFRILPDDSKQKVARHIRGCVCKLKPCVRFCCPHDHIMDNGVCYDNMSDEELAELDPFLNVTLDDGSVSRRHFKNELIVQWDLPMPCDGMFYLDNREEQDKYTLFENGTFFRHFDRVTLRKREYCLQHLTFADGNATSIRIAPHNCLIVPSITGQTVVMISSLICMVLTIAVYLFVKKLQNLHGKCFICYMVCLFMGYLFLLLDLWQISISFCKPAGLGYFFVMAAFFWLSVISLHLWNTFRGSSHKANRFLFEHRFLAYNTYAWGMAVVLTGITVLADNIVENQDWNPRVGHEGHCWIYTQAWSAMLYFYGPMVFLIAFNITMFILTAKRILGVKKDIQNFAHRQERKQKLNSDKQTYTFFLRLFIIMGLSWSLEIGSYFSQSNQTWANVFLVADYLNWSQGIIIFILFVLKRSTWRLLQESIRGEGEEVNNSEEEISLENTTTRNVLL

SEQ ID NO: 15145 - DNA, 3796 bp, DROSOPHILA
ttagcgcattttttgttgtttacgtccatacatacggcagtctggtgtgatccagcacaatgggcacatgatgttttaactgaacaattatttgatccatgtccaaatagttggcaattgtagcattgagtaattttattctgcaatttcactttatactcccagcgtactttagtgtggttgacatacataaagtttttgcgcagttcctttactgtgatacttttgtttacgaaataaacaatgtacagtaataattcatgatcagacttagttttcttttccacaattttgacttcggtgcattgtaatcctaggttttgtagcatggatttgacagtttcaattggtagtttatccagcccggataaaatggctttgtatggcttgtttgatctagtattgtacgtgtagaactcacagttatgttccttgagttggttacaagctgcattgaaacagtccatatttggtaaaaatattttaattccaattgagatggttttaataaagtaatcatcagttttaattttagccattagctcgtgtacaaattttgtattttgtttaattaatgttataggaggtggcttgattattatttcatcaagtgtgtccgtttcaataggtttatcatcattatcatcgtctaaagtttgtagtggacgaaaataatttgtaaattgcttggagccccgttcgttctggcgctccactagtggtttattccttttagtacgcattttttcaacggcagatgcttcagcatcgccaattgcatcacttgaacgtttgattgtagtttttttgcgaatatcacaattaaagaagaaaacagaaaatatttaatgtacaccaaaatgttctcagagagaatagaagattttacatccgcgttcgacaagagctagtcgaagactgtaataagcagtaatattaacgtctttctatgtaagttaaagtatgtttatttaagttgcagagagacaaattgttttagctaatagcacttcttgttgcaccaatcccagatacatccgtccattgcattgcaaccaaattctccaggataaatgccacaaaagtcctcgatattcatgaaggcacagcttcctttgggacagtagtaactgtagcagcccggtgagcacttatcccgctggtgatccttgcagccggagcaatccaaaatgtctgtggaaacacaagattgtattaatgatcctgaaatacattttttatccttatctcttcgataagttcgttaagcagatactcaatgtaaataataaaagaaacgatttgaagactcaccgctctccttgcaatccggcgtgctgcacgccagaagtggaggatttggcggcatgaccactcgtttcgcgttttcgtcatatacgaccttcggtggcttgagatataccaccggggccgtgcagactctggaatcgcagaacttattctccttgttggagcacacccagttgggcgcatagttgatgcagatgcgagggctctttacaaaacagcattgcggtggaggatgacgccccggaaagacttcattagccgccgactgttccgtagatggcctcaaactggggtatatccagggacgtctggttgttgttgtggctacgatgttatctatagtatagtcatagctcttgtcgttatcgggatcatagggtgcggatgtaatgtactccacacgatttatattttcgctggtcaccgagtacttgtgctcattgtggatcacattgtcaatctcaaggatagtggtgataaatcccggttgttggcagcgtttttgataccacacggttcccgctgggcatgccaatgaaatgcaacggccagccttatattcaccctccgaacagacgattttcctgcactgcgagtcgaagtaaatcgatcccggtggacagcgagtcagttctgtaatgacgggaggcgcagttgttgttgttgttgttgtggtagtgggctctgttgttgttgttgtggtagtgggctctgttgttgttgttgtggtagtgggctctgttgttgttgttgtggtagtgggctctgccgttgttgttgtggtagtgggctctgttgttgttgttgttgttgtcgtagtagtagtggtcgtcgattcaagcgggcaaggctcaggattcgtacgatagcatagttcatcaatgctaagaaagtatcctaaacaaaatgacaacgaaaaaaaaaaacaacaaaaaatctcacgaattaaagatttataagttttttactaagttaccaggcccgcacgttttgttagtctgtggataacattttccatccgctttcaattgatatcctaatgaacgataaaaccaaaaataatataataataatacattggtttttcatatacttttttaaaattatcagttaaagcattgagtagttctataaatagtcatacacagctgctgattaaattgggcaccatttttggtacagcgagattaaccattttttcagagatttcttacctgtttgacaaacgaaagagctttgccacacgccgttgacatcctgatatccctgcggagatgtcggcttctaggggaatatatttgtataagaatagacaccaatcctcagagtaaaccacattcggttaccgcgatgtatgcttgagcacttccgcaaggcacaagggtgatcaggcaggcaaccagggccgatctgaatgacttcacaagcatactgtttaacttgcttgctgatccgggagctgagacacagattcgcgatgtacggcggtccgcactaggcgagagactaatcgaagcgacgctgagctcgctgggatgcctttggaaagcataattgctggcgctgcgataaccttcgtgttccagataacggtgaaggtcgcttgggctgcagcttcagccgttcctaatccgtcaccggtgagccgggatcagttcgaatcgaaatgtctgacagtgaagtgggtttccgtgtgcaacggctgctgctgttaatctgtcttggactatttcccgcgacggttatcaccaattatacaccaaatccctgccaaaatggtaagttcgacttggaagcgtttatccgtcagtccactgatgacatcattcacatcttaggtcaggttaatgcttatatcgtttgcagccccattattttgaatatgtatagtaacctgtgcggaggtcaaacggggattcaatgcaatccttccaatcctgtgactactgttgttcctggtacccccggttgccctaacactcctcaatatcctacagtggttccgaataatccatttaatcccaatgtaaatgttgttcctggtactcccggttgccccaacactcctcaatatcctacagtggttccgaataatacatttaatcccaatgtaaatgttgttcctgctactcccggttgccccaacactcctcaatatcctacagtggttccgaataatacatttaatcccaatgtaaatgttgttcctagtactcccggttgtcccaacactcctcaatatcctacagtggttccgaataatacatttaatcccaatgtaaatgttgttcctgctactcccggttgccccaacactcctcaatatcctacagtggttccagataagccactttgtcccaatacaccaacaactccagcttgtcccaatgccaatggtccgagttcctgtaattcgaacggcccatcttcgtatcccacgaacggtcctagtatcaatgctccttccccaacttctccaccaact

SEQ ID NO: 15146 - DNA, 1357 bp, DROSOPHILA
ccgtacatcgcgaatctgtgtctcagctcccggatcagcaagcaagttaaacagtatgcttgtgaagtcattcagatcggccctggttgcctgcctgatcacccttgtgccttgcggaagtgctcaagcatacatcgcgaagccgacatctccgcagggatatcaggatgtcaacggcgtgtggcaaagctctttcgtttgtcaaacaggatatcaattgaaagcggatggaaaatgttatccacagactaacaaaacgtgcgggcctggatactttcttagcattgatgaactatgctatcgtacgaatcctgagccttgcccgcttgaatcgacgaccactactactacgacaacaacaacaacaacaacagagcccactaccacaacaacaacggcagagcccactaccacaacaacaacaacagagcccactaccacaacaacaacaacagagcccactaccacaacaacaacaacagagcccactaccacaacaacaacaacaacaactgcgcctcccgtcattacagaactgactcgctgtccaccgggatcgatttacttcgactcgcagtgcaggaaaatcgtctgttcggagggtgaatataaggctggccgttgcatttcattggcatgcccagcgggaaccgtgtggtatcaaaaacgctgccaacaaccgggatttatcaccactatccttgagattgacaatgtgatccacaatgagcacaagtactcggtgaccagcgaaaatataaatcgtgtggagtacattacatccgcaccctatgatcccgataacgacaagagctatgactatactatagataacatcgtagccacaacaacaaccagacgtccctggatataccccagtttgaggccatctacggaacagtcggcggctaatgaagtctttccggggcgtcatcctccaccgcaatgctgttttgtaaagagccctcgcatctgcatcaactatgcgcccaactgggtgtgctccaacaaggagaataagttctgcgattccagagtctgcacggccccggtggtatatctcaagccaccgaaggtcgtatatgacgaaaacgcgaaacgagtggtcatgccgccaaatcctccacttctggcgtgcagcacgccggattgcaaggagagcgacattttggattgctccggctgcaaggatcaccagcgggataagtgctcaccgggctgctacagttactactgtcccaaaggaagctgtgccttcatgaatatcgaggacttttgtggcatttatcctggagaatttggttgcaatgcaatggacggatgtatctgggattggtgcaacaagaagtgctattag

SEQ ID NO: 15147 - protein, 433 aa, DROSOPHILA
MLVKSFRSALVACLITLVPCGSAQAYIAKPTSPQGYQDVNGVWQSSFVCQTGYQLKADGKCYPQTNKTCGPGYFLSIDELCYRTNPEPCPLESTTTTTTTTTTTTTEPTTTTTTAEPTTTTTTTEPTTTTTTTEPTTTTTTTEPTTTTTTTTTAPPVITELTRCPPGSIYFDSQCRKIVCSEGEYKAGRCISLACPAGTVWYQKRCQQPGFITTILEIDNVIHNEHKYSVTSENINRVEYITSAPYDPDNDKSYDYTIDNIVATTTTRRPWIYPSLRPSTEQSAANEVFPGRHPPPQCCFVKSPRICINYAPNWVCSNKENKFCDSRVCTAPVVYLKPPKVVYDENAKRVVMPPNPPLLACSTPDCKESDILDCSGCKDHQRDKCSPGCYSYYCPKGSCAFMNIEDFCGIYPGEFGCNAMDGCIWDWCNKKCY

SEQ ID NO: 15148 - DNA, 10026 bp, DROSOPHILA
ataaggtcctcgccgctcaagataggcagatgtgcccgagcgtgggacctcgataaggcggggactatttacttaggcctctgcgtaggccatttactttaagatgcgattctcatgtcacctatttaaaccgaagatatttccaaataaaatcagtttcttacaaaaactcaacgagtaaagtcttcttatttgggattttacactagccaaggtatccaccgagactcacgcctcgccagctggccacgtttcctatcaaggactggccaactgggcactcggttggcagtgcttcacagtgctggcctaatgcatttgcatactcattgcatttaattgcttcaaaaaatatgtaaaaatttccacgtcgttgtcacggtctcgtctctcaacgtcccggcaatgtggatttggccgtgaccatggccatcggtggcctatgccaaaaaaggccacagatccacagctactcagctagtaagctactgattcaccagcagcatagtcgtggtcgtctgttcacttcagttcttgggccacgaattcgtggaattgcttccgcatttgatggcctggccagcgaacaggatcgggagctgggagcttggagctgtgagctgtgagcagtgcgagctgtgaacagcagttggccgggaaacgtgactcggtggccgcatacctgtgttccgagggcaggcgacttgacttggccgccaagctggtgcgtcggcatttaacataattacaacccactgacggaccgcactgtgggtcagccagtcggcggggtttacctggaaataaaggttctacgggatacgttgaagattaggaacattggataataaacaaaataaaggcagggtaatttaaaaatcattaaacttccctttcagctgccatatatattgtatgtatatgtattcattccatttgatcaagtatctttagttttctgctctgaaaaatgcaactcaagcccactgtacttcccaataacagcggcagatgtgcaatcatacagactcttccctcaattctgcaaatccccaactggcactcctggcaccgcctgctccttcacttttgtacagttgtgtttattgctctacttaggccatcgcattgtggaatgctcctcatcccagtaatttggccataatcaatgctaactctaatcggttacacgtagagaaaatatcaactgaattgatatatttcgaagcaatgatcgatgaatgctcttcctaagaaacccctttaattaatgccatccacttgacccatttataaaatatagtataaaaacacatgctcacttgcttgaaatattttccatccgcagaatgagccggaatgcacgccggagttgcccgctgcaaaccgcgccctcttcctggagaaggtgcgtcaatcgaatgccgcctgccagagcggtgacttcgctacggccgtgctgctctacacagatgcactgcagctggatccgggcaaccacatcctgtacagcaatcgatcggctgcgttgctgaaacagggtcaatttacggccgctttgcaggatgcgacgcaggcgagggatttgtgtccgcaatggccaaaggcgtacttccgtcagggcgtggcgctgcagtgcctcggtcgttatggtgaggctctggctgccttcgcctccggattggcccaggaaccgagcaacaaacagctgatggcaggcctggtcgaagcgtctttgaagagtcctctgcgtgcggcactggagcccacgttgcagcaattgcgcaccatgcagttgcaggagtcgccatttgtggtcagctctgtggtgggtcaggagctcctgcaggcgacacagtattcggcggcggtgactgttctggaggctgctcttcgcattggcagttgctccctgaaactgaggggttctgtcttcagcgccttgagttcggcgcactgggccctgaatcagttggatcaggctattggctacatgcagcaggatttggcggtggccaaatccctgggagataccgcaggcgaatgtcgagcgcatggcaatctgggctcggcctacttcagtcaaggagcccacaaggaggcactcacagcgcatcgctatcaactcgtcctggcgatgaagtgcaaggatactcaggcggcagccgcagccttgacctcactgggacacgtgtacacggctagcggggattaccccaatgccctggcctcccataaacagtgtgtgcagctcttcaagcaactgggagatcgattgcaggaggctcgagagattggcaacgtgggagcggtgtacttggctctcggagaatgtgaagccgccttggactgccattcgcagcacttaagactggcacgtaagttgcacgaccaggtggaagaggccagggcgtactccaatctgggctctgctcatcaccagcggcgtcagttcacccaggcggctgcctgtcacgagcaggtgctccggattgcccaagctctgggagatcgatccatggaggcggctgcctacgcgggcttgggtcatgcggctcgatgtgccggtgatgccagtgcctccaagaggttccacgaacgccaattggccatggcattggcagcgagggataaactgggcgagggaagagcatgctctaatctcggtattgtctaccagatgcttggatcccacgatgccgctttgaaactgcatcaggctcatctcgggattgcccgctccctgggcgatcgaacgggcatgggcaaagcatacgggaacatggccaggatggctcacatggctggatcctacgaggcagcggtgaagtaccacaagcaggaactagccatcaatcaggcgatgaacgatcgcagtgccgaggcggccactcatggtaatctggccgtagcctatcaggcactaggggcccatgatgcagccttgacccactatcgagcgcatctggccaccgcaagatccttgaaggatacggctggagaggcatgcgccttgcttaacctgggcaactgcctgagtggaaggcaggagtacgaagaggcggtgcctcattacgagagttacctgatgctcgcccaggaactgggtgacgtggctgccgagggtaaggcgtgtcatctactcggctacgcccacttctcgctgggcaactaccgggcggctgtgaggtactacgaccaggatctggccctggccaaagatgcccaacatcgaccgaacatgggcagggcatactgcaacctgggactggctcatctggccctgggacacactgctgcagcgttggaatgtcagcagctgtttctagcggttgcccatgccaccaatcaactgccagccaagtttagagcattgggcaatattggtgatatcctcatacgaacgggatcacatgaggtaaagaaaagattccccctattcccttctctgatcgttctcaaatccttttctcattctttctaggaggccattaagttgtatcaacgtcagttggctttagccagagcagctggagatcgttccatggaggcagctgcttgtggagctctgggattggcccaccgactgatgcgacgttgggacaaggcattgggtcatcacacccaggagttgacgctgcgccaggagctgggcgacttgtccggcgaatgtcgtgcccatgggcacttaggagccgtgcacatggctctgtgcagttggacgaatgcggtgaagtgctatcaggagcaattggaacgggctcaggagcaaagggatgctgcagtggaggcgcaggcgcatggaaatctgggcattgctcgactgaacatggcccactatgaggcggccattggctgcctggaggcgcaattgggaaccctagaacgcgtatccctgccctccactcaagcggatcgagcgcgagcgttgggtcatttgggtgattgctatgccgctctaggagattatgaagaggcgcttaagtgtcacgaccgtcagcttcagctggctttgggtttgaccagccatcgcgatcaggagcgcgcctatcgaggattgggtcaagccagaagagcactgggtcaattgcctgccgctctggtttgcctcgagaaacgtctggtggttgcccacgaacttcacagtccagagatcaaagcattagcctatggtgacttgggtcacgttcatgccgccctcgggaatcatgcccaggcgttgaactgcctggagcatcagcgtgagttggcgcagggtctgcaggatcgagctctggaatcggatgccatgtgtgccctcgggcaggtgcaacagcgaatggggcagcatgcgcaagcattggagctgcaccggcaagatctggagatttgcacggaactctctgcacccgccttgcaagccagagctttgagtaatcttggatccgtccacgaatccctgggccagcaggcagaagccctcaagtgctatgaacggcaattggagttgagtacggatcgcttggcaaaggcgatggcatgcctggcattgggaagggttcaccatcagctagagcaacacaatcaagcggtggactatctgcggcaaggattagcaagtgctcagaccacgggaaagtcagaggaggaagcgaagataagacatcaattaggtaagtgggaagtagcagtgatttatgaccatttttaacctttctctggatcctccccgtaggtcttgccctacgatcctctggcgatgccgaaggagcacacattcaactagagactgccgcccaactgctggagtccgtgcgccatgaacagcgaagtccggagacgcgccaggctctctacgatctgcagaccacttgctatcaactgctgcaagttctcctcgtggcattaaatcgcaatgaggatgccctggtggccgccgagcgatgcaaggcgcgcggcggagcagatgccgtgagtggagagggctccaaggttccgttggccgacagcgagtccattcaagagacagtagaccgtggtcgcacgaccgtactttactacagcttggctggtgatcaactcttcacctggctgctggaaccacatgttggcattgtacgtttccatgctgccaaaatcgatgcccacagtctgcagcttccgttgtccctcagcgaggaagaggaggaggaggaggatctggagatggagagggaacttaagttaaacagggatcagaatcaggatcagtctgaagaccaaggaacatccaataaggcaaatcgattactggaacgttatatgagcttggtaagagataatctgggtgtgaactcacagagtctccttcacgaaggcgacggcagtggatggcgtgccagcacggaacaactgttggaggatctgcctggagctggaggttccggcggaggaggctttcttcgcatggttagccgaaatcaactactcaactcctcgaactactcgttgagttcgcttttctcggtgggatcggtcggtggctcagtggccagcctgcaaggctctacgcgatccgttggcagtcgaagttcccgaagagcacccggcttgccggtttggcggggaccatcctgcctgcacattctgtacaatcttctgttagcgccattcgatgatctattgccagctggagaagccgataccaaccgacagggcagaagggagttggtcctggtactagatagttcgctatatctggttccatttgcaattctgagagcagctcaagaagatggagaatacttgtgtgagaggtgtgcaattcttacagccccctcactgcaatctatgcgcagtcgtccgaggatcagacgggatcgagctcgtccacctaaggctcttgtggttggaggaccacgtattccatccaatctcgcagaactctggggttgggctggagctgaatcgccagcagccttgcaagaggccgccatggtggctgatatgctgcaggccaccgcactggccggttctaatgccaccaaggagtcagtgctggcggagcttccgtccgccgagtgcgtccactttgcggcgaatatcagctggcagttgggagcagtggtcctgagtcctggcgatgtggttacggctgaacagcaggagcaaaaggagccgcacgaaccccagatgactgatttcacattggcagctggagaattgcgacagctgcgtctgagtgcccgccttgtggtcctgagttcgtatcactccgtggaacccatcaccggagacggagtagcacaattggccgggggttggcttttagccggagccggagtcgtgcttatatcgctctggccagttccggaaacagcggccaagattctactgcgcgcattctactctgccttgttgcagggtgcccgagcagcccggtaagtaatcatcgtattctcaatatcagaatcgcaatactaatgacttttatttgttgcagcgctcttgcggaagccatgcaaacagtgcagcacaccaaacactttgctcatccggccaactgggccggtttcctactggtgggcagcaatatccggctatcgaacaaggtggccatgggacatgccctatgcgaacttctccgaactccagaacgttgtcgagatgcgttgcgcgtgtgtctgcatctggtggagaagagtttgcagcgaattcaccgcggccagaagaacgccatgtacaccactcagcagagcatagagaataaggcaggaccggttgccggctggaaggatctgttgatggcagtgggcttccgtgtcgagccggccgccaatggtattccggccagcgttttcttcccccaagcggatcccgaggaacgactggcccagtgctcagccagtctccaggcccttcttgccctgactccggctacgctccaagctctgggcaaactggttcatgtaaatagtgccgaatatgcgggcgacatcatagcagtggtgcgcaatatcctagcccagtttcctggctccaatcccgccaccggttcaagttccaccaaatcggatgccatcgccgagacttgttttattgagatgccgctgagtgtaagactctggagggtagccgggtgccatgaactgctcgcctccgtgggttttgatcttacggaggtgggtgcggaccaagtgatcctgcgcaccggtaaacaggccaatcgccggcagtgccagtttgtattgcaggcacttctagccttgttcggtaagtaatgctgcattacctatggctatgataatgataataataatttactcactttagacacccgtgaggctcctaaaaacctgggattggatagagactccgatcacagcagcagctgtgagtctctggcagaaccggaaatggacgtggcttcaattccgcccgcggccagcagcactccctccgtaaatgggggtaacaaagcaccgttgcccttgcatccacgcagtgccttcatctcatatgtacgacgacgtggagaacctgatggtggacgcactgatgctattggcggggtgggaagtggcgcactggactccagtctggccaacaccaccgacagtgagcattccctgtcggatggctatgtcactcaacctggctttggattatccaatcctcgacttggctatgccagcatgcgtgctccggtgcgagtttctcgacctggcggaggtggcgaaagcgatgcagcctttactcccagtccaccagtgaccgatccgagcttatcactggcactggctcatcaaacgcgcattagaagtctctactcccagaccagttcagcggcaatagttccaccggtagcaacgaccctgaatagaagaccggatagttctagctcggccagcagcaccaccgattgggagggatctgggcatgcaactgtactgagacgtggcgttagtacagcaatcccccaacagcagccaccattaccaccaccacgcccaccaaccttccacaatttgagcgtgggtgcaggtggacgcagcaaacccaagatcaaattgggtagtgctcagagctctcttgctgcgcgggttaataaagagcatgctctcttcatggaccggctcagtgtgaggacggagttaagtgcacctggaagtggaaatgccatgaccagtggatctgctgcaagaaagccccttgctctgcccgaggaggaggatgtttcgaatgttgtctttaatccatccagcttgtacttttcgcaaacggactctgatctgctgaacgaacccaagcaggaggagactcctccgcccaccaagtcgagtacaaaaagcctccaagacagtatgatgcgccacatgaatcgcgaactgactccaagcatttcggaaatgtatcatgatcgaaatgtgggcttaggattggcaccaccgctgtccaagcttctgttgagtcccaactatgaggagcaggaggtagtatccataactgaggcctgtccacagtcgggtgctaatctcaagactctggtggacgctgtcagcgagttggagctaagtggcagctcatccggagccactatgcccacggtggtgggtggaggagccaatgaagtagagggcacttcgggtacgtccgcagaagccacgtgtcccatttgtggtgagcccgccgacgtcatctgccgctgcaaggcggtcaccattcagaagaagagcatacttaagccctggcttagcaatgtaccggatagcagtttggtgcaggccagcgaactgaccacagccgatatattggagcgtcgtctagagattcatacggccacgagttccgagcttcgctcaggagctccatactctgtagatctttctcgacgtgatgagggcgatggccgatctgtagccgattctcagtgcagcagcaactacaaacgagtgttggccagtgcatccggaggagcccttagcctggcggggatcggaaagggaagcgaagcggaagcgcagagtgcttcctcgggagcaacctgctcatctgctcgccttgtctaaacctattcgatccctcgtactaaatatatttatttctttgatagtcttcaataaactgattttaggcataacttatattcataaccaagccactgattaaaatttattcaactatgtaagtctacaataagatccccccaagttaataggatttatagaatatgacttagcaaaaataaactgttatactgaatatccgcaaatgaaaatgttgttttattttaaaagaattccgctcgaatcacttttcgatatcccacttagtaaccttttccattaaatttattaaacgaaaaaaagaaattaccgatgcgtgtgaaagcagagaaggttttctgggatttggtaactaatgtaactaattttattttgttttacttagtttttacaggttttaataatttatcttttcagtatgatctttttgttttataatttatttagtaatatagctgcaataatatagctgcatttgttttgtttttttttgtatatatatataaatatgtatggatctttactttacacttcttaaatgttaactacgccaaatcttgtattattttttttgttttttgtcgtttgtgtgccattgaatatgcttgcgagactcctacgataaactttcataattagtatatagctacaatatatttatatcaatgtgtatattcaaaatgtgaaataaaaaaccgtatttaaaaatatttttactttgtggattctcattttgtttagtataattcacacttttgtttaccattgaatccatccaccttagcggtttgttggccttacatactaaatcttttgaaatattgtgtgaattcaatgcattttttagcgtataataattgtataaattactaatataaattaagcactcaaaattgcagctgcttcaaatgctggcacgtcacaagcatcgaaagccgtgctgtgcttttgggtttgagagcagcatcaaatcattcacataatacccatataattatttcgt

SEQ ID NO: 15149 - DNA, 7335 bp, DROSOPHILA
atgcaactcaagcccactaatgagccggaatgcacgccggagttgcccgctgcaaaccgcgccctcttcctggagaaggtgcgtcaatcgaatgccgcctgccagagcggtgacttcgctacggccgtgctgctctacacagatgcactgcagctggatccgggcaaccacatcctgtacagcaatcgatcggctgcgttgctgaaacagggtcaatttacggccgctttgcaggatgcgacgcaggcgagggatttgtgtccgcaatggccaaaggcgtacttccgtcagggcgtggcgctgcagtgcctcggtcgttatggtgaggctctggctgccttcgcctccggattggcccaggaaccgagcaacaaacagctgatggcaggcctggtcgaagcgtctttgaagagtcctctgcgtgcggcactggagcccacgttgcagcaattgcgcaccatgcagttgcaggagtcgccatttgtggtcagctctgtggtgggtcaggagctcctgcaggcgacacagtattcggcggcggtgactgttctggaggctgctcttcgcattggcagttgctccctgaaactgaggggttctgtcttcagcgccttgagttcggcgcactgggccctgaatcatcaaggagcccacaaggaggcactcacagcgcatcgctatcaactcgtcctggcgatgaagtgcaaggatactcaggcggcagccgcagccttgacctcactgggacacgtgtacacggctagcggggattaccccaatgccctggcctcccataaacagtgtgtgcagctcttcaagcaactgggagatcgattgcaggaggctcgagagattggcaacgtgggagcggtgtacttggctctcggagaatgtgaagccgccttggactgccattcgcagcacttaagactggcacgtaagttgcacgaccaggtggaagaggccagggcgtactccaatctgggctctgctcatcaccagcggcgtcagttcacccaggcggctgcctgtcacgagcaggtgctccggattgcccaagctctgggagatcgatccatggaggcggctgcctacgcgggcttgggtcatgcggctcgatgtgccggtgatgccagtgcctccaagaggttccacgaacgccaattggccatggcattggcagcgagggataaactgggcgagggaagagcatgctctaatctcggtattgtctaccagatgcttggatcccacgatgccgctttgaaactgcatcaggctcatctcgggattgcccgctccctgggcgatcgaacgggcatgggcaaagcatacgggaacatggccaggatggctcacatggctggatcctacgaggcagcggtgaagtaccacaagcaggaactagccatcaatcaggcgatgaacgatcgcagtgccgaggcggccactcatggtaatctggccgtagcctatcaggcactaggggcccatgatgcagccttgacccactatcgagcgcatctggccaccgcaagatccttgaaggatacggctggagaggcatgcgccttgcttaacctgggcaactgcctgagtggaaggcaggagtacgaagaggcggtgcctcattacgagagttacctgatgctcgcccaggaactgggtgacgtggctgccgagggtaaggcgtgtcatctactcggctacgcccacttctcgctgggcaactaccgggcggctgtgaggtactacgaccaggatctggccctggccaaagatgcccaacatcgaccgaacatgggcagggcatactgcaacctgggactggctcatctggccctgggacacactgctgcagcgttggaatgtcagcagctgtttctagcggttgcccatgccaccaatcaactgccagccaagtttagagcattgggcaatattggtgatatcctcatacgaacgggatcacatgaggaggccattaagttgtatcaacgtcagttggctttagccagagcagctggagatcgttccatggaggcagctgcttgtggagctctgggattggcccaccgactgatgcgacgttgggacaaggcattgggtcatcacacccaggagttgacgctgcgccaggagctgggcgacttgtccggcgaatgtcgtgcccatgggcacttaggagccgtgcacatggctctgtgcagttggacgaatgcggtgaagtgctatcaggagcaattggaacgggctcaggagcaaagggatgctgcagtggaggcgcaggcgcatggaaatctgggcattgctcgactgaacatggcccactatgaggcggccattggctgcctggaggcgcaattgggaaccctagaacgcgtatccctgccctccactcaagcggatcgagcgcgagcgttgggtcatttgggtgattgctatgccgctctaggagattatgaagaggcgcttaagtgtcacgaccgtcagcttcagctggctttgggtttgaccagccatcgcgatcaggagcgcgcctatcgaggattgggtcaagccagaagagcactgggtcaattgcctgccgctctggtttgcctcgagaaacgtctggtggttgcccacgaacttcacagtccagagatcaaagcattagcctatggtgacttgggtcacgttcatgccgccctcgggaatcatgcccaggcgttgaactgcctggagcatcagcgtgagttggcgcagggtctgcaggatcgagctctggaatcggatgccatgtgtgccctcgggcaggtgcaacagcgaatggggcagcatgcgcaagcattggagctgcaccggcaagatctggagatttgcacggaactctctgcacccgccttgcaagccagagctttgagtaatcttggatccgtccacgaatccctgggccagcaggcagaagccctcaagtgctatgaacggcaattggagttgagtacggatcgcttggcaaaggcgatggcatgcctggcattgggaagggttcaccatcagctagagcaacacaatcaagcggtggactatctgcggcaaggattagcaagtgctcagaccacgggaaagtcagaggaggaagcgaagataagacatcaattaggtcttgccctacgatcctctggcgatgccgaaggagcacacattcaactagagactgccgcccaactgctggagtccgtgcgccatgaacagcgaagtccggagacgcgccaggctctctacgatctgcagaccacttgctatcaactgctgcaagttctcctcgtggcattaaatcgcaatgaggatgccctggtggccgccgagcgatgcaaggcgcgcggcggagcagatgccgtgagtggagagggctccaaggttccgttggccgacagcgagtccattcaagagacagtagaccgtggtcgcacgaccgtactttactacagcttggctggtgatcaactcttcacctggctgctggaaccacatgttggcattgtacgtttccatgctgccaaaatcgatgcccacagtctgcagcttccgttgtccctcagcgaggaagaggaggaggaggaggatctggagatggagagggaacttaagttaaacagggatcagaatcaggatcagtctgaagaccaaggaacatccaataaggcaaatcgattactggaacgttatatgagcttggtaagagataatctgggtgtgaactcacagagtctccttcacgaaggcgacggcagtggatggcgtgccagcacggaacaactgttggaggatctgcctggagctggaggttccggcggaggaggctttcttcgcatggttagccgaaatcaactactcaactcctcgaactactcgttgagttcgcttttctcggtgggatcggtcggtggctcagtggccagcctgcaaggctctacgcgatccgttggcagtcgaagttcccgaagagcacccggcttgccggtttggcggggaccatcctgcctgcacattctgtacaatcttctgttagcgccattcgatgatctattgccagctggagaagccgataccaaccgacagggcagaagggagttggtcctggtactagatagttcgctatatctggttccatttgcaattctgagagcagctcaagaagatggagaatacttgtgtgagaggtgtgcaattcttacagccccctcactgcaatctatgcgcagtcgtccgaggatcagacgggatcgagctcgtccacctaaggctcttgtggttggaggaccacgtattccatccaatctcgcagaactctggggttgggctggagctgaatcgccagcagccttgcaagaggccgccatggtggctgatatgctgcaggccaccgcactggccggttctaatgccaccaaggagtcagtgctggcggagcttccgtccgccgagtgcgtccactttgcggcgaatatcagctggcagttgggagcagtggtcctgagtcctggcgatgtggttacggctgaacagcaggagcaaaaggagccgcacgaaccccagatgactgatttcacattggcagctggagaattgcgacagctgcgtctgagtgcccgccttgtggtcctgagttcgtatcactccgtggaacccatcaccggagacggagtagcacaattggccgggggttggcttttagccggagccggagtcgtgcttatatcgctctggccagttccggaaacagcggccaagattctactgcgcgcattctactctgccttgttgcagggtgcccgagcagcccgcgctcttgcggaagccatgcaaacagtgcagcacaccaaacactttgctcatccggccaactgggccggtttcctactggtgggcagcaatatccggctatcgaacaaggtggccatgggacatgccctatgcgaacttctccgaactccagaacgttgtcgagatgcgttgcgcgtgtgtctgcatctggtggagaagagtttgcagcgaattcaccgcggccagaagaacgccatgtacaccactcagcagagcatagagaataaggcaggaccggttgccggctggaaggatctgttgatggcagtgggcttccgtgtcgagccggccgccaatggtattccggccagcgttttcttcccccaagcggatcccgaggaacgactggcccagtgctcagccagtctccaggcccttcttgccctgactccggctacgctccaagctctgggcaaactggttcatgtaaatagtgccgaatatgcgggcgacatcatagcagtggtgcgcaatatcctagcccagtttcctggctccaatcccgccaccggttcaagttccaccaaatcggatgccatcgccgagacttgttttattgagatgccgctgagtgtaagactctggagggtagccgggtgccatgaactgctcgcctccgtgggttttgatcttacggaggtgggtgcggaccaagtgatcctgcgcaccggtaaacaggccaatcgccggcagtgccagtttgtattgcaggcacttctagccttgttcgacacccgtgaggctcctaaaaacctgggattggatagagactccgatcacagcagcagctgtgagtctctggcagaaccggaaatggacgtggcttcaattccgcccgcggccagcagcactccctccgtaaatgggggtaacaaagcaccgttgcccttgcatccacgcagtgccttcatctcatatgtacgacgacgtggagaacctgatggtggacgcactgatgctattggcggggtgggaagtggcgcactggactccagtctggccaacaccaccgacagtgagcattccctgtcggatggctatgtcactcaacctggctttggattatccaatcctcgacttggctatgccagcatgcgtgctccggtgcgagtttctcgacctggcggaggtggcgaaagcgatgcagcctttactcccagtccaccagtgaccgatccgagcttatcactggcactggctcatcaaacgcgcattagaagtctctactcccagaccagttcagcggcaatagttccaccggtagcaacgaccctgaatagaagaccggatagttctagctcggccagcagcaccaccgattgggagggatctgggcatgcaactgtactgagacgtggcgttagtacagcaatcccccaacagcagccaccattaccaccaccacgcccaccaaccttccacaatttgagcgtgggtgcaggtggacgcagcaaacccaagatcaaattgggtagtgctcagagctctcttgctgcgcgggttaataaagagcatgctctcttcatggaccggctcagtgtgaggacggagttaagtgcacctggaagtggaaatgccatgaccagtggatctgctgcaagaaagccccttgctctgcccgaggaggaggatgtttcgaatgttgtctttaatccatccagcttgtacttttcgcaaacggactctgatctgctgaacgaacccaagcaggaggagactcctccgcccaccaagtcgagtacaaaaagcctccaagacagtatgatgcgccacatgaatcgcgaactgactccaagcatttcggaaatgtatcatgatcgaaatgtgggcttaggattggcaccaccgctgtccaagcttctgttgagtcccaactatgaggagcaggaggtagtatccataactgaggcctgtccacagtcgggtgctaatctcaagactctggtggacgctgtcagcgagttggagctaagtggcagctcatccggagccactatgcccacggtggtgggtggaggagccaatgaagtagagggcacttcgggtacgtccgcagaagccacgtgtcccatttgtggtgagcccgccgacgtcatctgccgctgcaaggcggtcaccattcagaagaagagcatacttaagccctggcttagcaatgtaccggatagcagtttggtgcaggccagcgaactgaccacagccgatatattggagcgtcgtctagagattcatacggccacgagttccgagcttcgctcaggagctccatactctgtagatctttctcgacgtgatgagggcgatggccgatctgtagccgattctcagtgcagcagcaactacaaacgagtgttggccagtgcatccggaggagcccttagcctggcggggatcggaaagggaagcgaagcggaagcgcagagtgcttcctcgggagcaacctgctcatctgctcgccttgtctaa

SEQ ID NO: 15150 - protein, 2444 aa, DROSOPHILA
MQLKPTNEPECTPELPAANRALFLEKVRQSNAACQSGDFATAVLLYTDALQLDPGNHILYSNRSAALLKQGQFTAALQDATQARDLCPQWPKAYFRQGVALQCLGRYGEALAAFASGLAQEPSNKQLMAGLVEASLKSPLRAALEPTLQQLRTMQLQESPFVVSSVVGQELLQATQYSAAVTVLEAALRIGSCSLKLRGSVFSALSSAHWALNHQGAHKEALTAHRYQLVLAMKCKDTQAAAAALTSLGHVYTASGDYPNALASHKQCVQLFKQLGDRLQEAREIGNVGAVYLALGECEAALDCHSQHLRLARKLHDQVEEARAYSNLGSAHHQRRQFTQAAACHEQVLRIAQALGDRSMEAAAYAGLGHAARCAGDASASKRFHERQLAMALAARDKLGEGRACSNLGIVYQMLGSHDAALKLHQAHLGIARSLGDRTGMGKAYGNMARMAHMAGSYEAAVKYHKQELAINQAMNDRSAEAATHGNLAVAYQALGAHDAALTHYRAHLATARSLKDTAGEACALLNLGNCLSGRQEYEEAVPHYESYLMLAQELGDVAAEGKACHLLGYAHFSLGNYRAAVRYYDQDLALAKDAQHRPNMGRAYCNLGLAHLALGHTAAALECQQLFLAVAHATNQLPAKFRALGNIGDILIRTGSHEEAIKLYQRQLALARAAGDRSMEAAACGALGLAHRLMRRWDKALGHHTQELTLRQELGDLSGECRAHGHLGAVHMALCSWTNAVKCYQEQLERAQEQRDAAVEAQAHGNLGIARLNMAHYEAAIGCLEAQLGTLERVSLPSTQADRARALGHLGDCYAALGDYEEALKCHDRQLQLALGLTSHRDQERAYRGLGQARRALGQLPAALVCLEKRLVVAHELHSPEIKALAYGDLGHVHAALGNHAQALNCLEHQRELAQGLQDRALESDAMCALGQVQQRMGQHAQALELHRQDLEICTELSAPALQARALSNLGSVHESLGQQAEALKCYERQLELSTDRLAKAMACLALGRVHHQLEQHNQAVDYLRQGLASAQTTGKSEEEAKIRHQLGLALRSSGDAEGAHIQLETAAQLLESVRHEQRSPETRQALYDLQTTCYQLLQVLLVALNRNEDALVAAERCKARGGADAVSGEGSKVPLADSESIQETVDRGRTTVLYYSLAGDQLFTWLLEPHVGIVRFHAAKIDAHSLQLPLSLSEEEEEEEDLEMERELKLNRDQNQDQSEDQGTSNKANRLLERYMSLVRDNLGVNSQSLLHEGDGSGWRASTEQLLEDLPGAGGSGGGGFLRMVSRNQLLNSSNYSLSSLFSVGSVGGSVASLQGSTRSVGSRSSRRAPGLPVWRGPSCLHILYNLLLAPFDDLLPAGEADTNRQGRRELVLVLDSSLYLVPFAILRAAQEDGEYLCERCAILTAPSLQSMRSRPRIRRDRARPPKALVVGGPRIPSNLAELWGWAGAESPAALQEAAMVADMLQATALAGSNATKESVLAELPSAECVHFAANISWQLGAVVLSPGDVVTAEQQEQKEPHEPQMTDFTLAAGELRQLRLSARLVVLSSYHSVEPITGDGVAQLAGGWLLAGAGVVLISLWPVPETAAKILLRAFYSALLQGARAARALAEAMQTVQHTKHFAHPANWAGFLLVGSNIRLSNKVAMGHALCELLRTPERCRDALRVCLHLVEKSLQRIHRGQKNAMYTTQQSIENKAGPVAGWKDLLMAVGFRVEPAANGIPASVFFPQADPEERLAQCSASLQALLALTPATLQALGKLVHVNSAEYAGDIIAVVRNILAQFPGSNPATGSSSTKSDAIAETCFIEMPLSVRLWRVAGCHELLASVGFDLTEVGADQVILRTGKQANRRQCQFVLQALLALFDTREAPKNLGLDRDSDHSSSCESLAEPEMDVASIPPAASSTPSVNGGNKAPLPLHPRSAFISYVRRRGEPDGGRTDAIGGVGSGALDSSLANTTDSEHSLSDGYVTQPGFGLSNPRLGYASMRAPVRVSRPGGGGESDAAFTPSPPVTDPSLSLALAHQTRIRSLYSQTSSAAIVPPVATTLNRRPDSSSSASSTTDWEGSGHATVLRRGVSTAIPQQQPPLPPPRPPTFHNLSVGAGGRSKPKIKLGSAQSSLAARVNKEHALFMDRLSVRTELSAPGSGNAMTSGSAARKPLALPEEEDVSNVVFNPSSLYFSQTDSDLLNEPKQEETPPPTKSSTKSLQDSMMRHMNRELTPSISEMYHDRNVGLGLAPPLSKLLLSPNYEEQEVVSITEACPQSGANLKTLVDAVSELELSGSSSGATMPTVVGGGANEVEGTSGTSAEATCPICGEPADVICRCKAVTIQKKSILKPWLSNVPDSSLVQASELTTADILERRLEIHTATSSELRSGAPYSVDLSRRDEGDGRSVADSQCSSNYKRVLASASGGALSLAGIGKGSEAEAQSASSGATCSSARLV

SEQ ID NO: 15151 - DNA, 3855 bp, DROSOPHILA
gaccgcaactatcttgagatgcggcaattgcggccccttttattccatcgatcggcttatcgccacccggccacctgaacaaccagtcaaccagtctcaattgagatctgggcacgccatgagattagttttccaatgcccggctttgaaatgggagtaactctagtgtgaacatcatccagttgataggcgtgtgcgaattaaaacgatagccgtatacaaattaggtttgttactttacgcttaaaatatttgactgggcttaatatagattttcgacatgcatcccaagcagttgccaatcccacttcaggtgagacttatattgcacaatcgcttcgagtcaacttgattaattactttacatgcatgcaattttttgtttgaatgtttatccagatgaatttgataatgcactttaaaacgaaaccatttaacaaatgagtaggctttttgattatagataaatataattaataagatttaaggtttgcaataaatatgtccatatttctctttttgaacatgtgtcctaagtttttgtgtttattttctgaataacaattagcaatattaaatcgaagtaccgaaacgtgtatcgaaataaaatggtgtaagatatcatagaacttgcacttgcgggtgcacgcttttgaatccgactatagttcgttggcattttgaggggcggtggtcttgcctgtacagatacagctttccgctacaattattattaaaattactattatattattattacaattactattaaaaaagatcaagaattgagcgtgcttgcgacaaaatagaatcaaataaagaaattcagaaaaggatagttctagagaaaagtgggagatgagtgaaaatttattgctagcaaaagactggtgtaattgtgttctagaaatgctgtacctatgagcactttgatacttgtgttcatccttgtgtagaaacatcagctcagtttactatttaaatttttagatatttatttcccgttctgttttcgtacgtaattagtaataacaaggtttataagaactactaataagtacatagtgaattgaacagttttttcagtgtaaggtattaggtatatatttgtgtaagttttggaaaaagggaaaatcattaagttcggtctaagcaaataggtatatacagatagatatatagcaagctttccaagcatgtcgtcgaactgctccgaactgtcgctatgtggagcattggagcgatagaagtgaacacccctgagtcttccacgccaggaaggtatggtttcatcagaagcagtattagaataatattctaatgtctttggtactaccagtactaactccaattcttagtatttcaaaaaattccttgccaaaaagtatgcagtacttttttaaaacttttttgtttttcaggttatttgggtatatatatatggggatatacatggagcatacacattatattatattacaggtataaatgttgtcttatatataaagtaaaagcattcagaaagctaaacatcactcgtatataagtacgcttagaattccaagactccgggtaaatatttgtcgattaaggtctggtaatatggccacaaggcttcaatatccggaaccacctcgctcttggtgtacaaatcatagcgactgcaagaaggattgcttatgtaactgggaatatatgtatgagtgcttaaaataaacttacttgaagatcagcacccactttttggtctccgcatcctggggagcctcaaggtgcttatagtcgccgccattgtgccacggataaaacgaatggaaccgaatgatgttgcacgccacatggggcagcttggtcttgttatgcttcagcacggaatacatgtactcatcgtggccccaggacatcagcaggttgtccactccgcaattgggctgatagatgcccagttcggtgttgtaggcgggattatccccatctggatttccctcgaagctctcgtcccggtacacaatgctatccccccaacggcagcccacggcgaaggtgtcgccaaccaccgcccactgcggctcgccgtagaaggccatgatcttacccagatcgtgaatgagcgccgtaagatgcagccagtcgtgctccggaaattcggcgcgtgcccgctcagcagcctggaaggcgtggatgatgttaggcagatccaggtcgggatccgattcgtcgaccaaatcgttcagcttctccaaagcttcgcgcacagtcatcttaatcgtgttaaacttcagccagtgctcacgacgacctagttagattgattttttaataaaataacatttattaaatagctttcattgtttagaaccaatttagacccttgactaatctgatcatttttaaaatataccttctcttttgtattttgtatattttcaaacttatttactaatttaaaaaattcagtcaacgaataatatagaatcaatctttcttgaaacgatctttacaatagactatatagtttacactgtttctcactcacccttgacgaaatccacagtctggttcagatgcatctgacgataagtctggcgcacacgttcctttagaggatcggtggtgtccatactgtagtcccggaatttggagggattcttgtccgcgaatgtgggctcaggacgcatcagctccgaaggatccaagagttggacctggttctatggattaaattcacaaatgtgtaagccactgcaagacacttatcgatcccgaatatcgttacctccgcaaggattctcatttttaagatttaattgaaaagaacttgaaaaatattttcgggtagtaaccgcgcacttgagcgaagcaaacacttatgaatcgctggacgcagagatctccgacttttatagtcggccgaccatcggaaattcacaatcgcattccatatagtacactctcttctattctaagtgtactcgaaaatgatttatagtatgtttcatatttttcaaaacacgagaatcgcttgcgccgcttcccgtgcggcctctcccaatcgcaatcaatattacgtcggaaaccaggctcaaatgatctaacttccatataacactttggtttattaccccttatcaggagcctgggacgcctacacgacagcgaaccaacttatctggagatgcattacatttcttgctccatcaattcatgaaactggaagctgcacttgactgataactgataaatcgagtggctatgaaaaagtaccacaatgaatctgctccacatcctacatctggatcaagtgcaaggccacggcattgagttacgagtctgattgtaaaggtcgttgcacgaggacccatgaaatgtattgtggcaaatgataagaatattagcggggaataaataataaataataataataaatattaaatgaggtttccatccataaatgaaagtgagactttagaatgccttattggttcaagggatgcaagggatgctaattagctagatagcttgactcatatcagtctttttattgaagggtaaagtacaaatacttttataaattctcgagaaaatttgtagggaatagaattcgtattaactacaattttagaatttttccttccccctttttggcacaactgttttacgcatttgaatatgacttttgcggatgcttgaagttcgagcaatctcgtttgtcccctggatcaaatgtcacggggcttaaaaccctcaaaaaatattcctcccatagaatgtggtctctaaccttgaacaaccgtcaggaaggcggactaatccatagccaaaagccaacgctccagatccagcgatcgttcgaac

SEQ ID NO: 15152 - DNA, 1459 bp, DROSOPHILA
ctcaagtgcgcggttactacccgaaaatatttttcaagttcttttcaattaaatcttaaaaatgagaatccttgcggagatgcgtcctgagcccacattcgcggacaagaatccctccaaattccgggactacagtatggacaccaccgatcctctaaaggaacgtgtgcgccagacttatcgtcagatgcatctgaaccagactgtggatttcgtcaagggtcgtcgtgagcactggctgaagtttaacacgattaagatgactgtgcgcgaagctttggagaagctgaacgatttggtcgacgaatcggatcccgacctggatctgcctaacatcatccacgccttccaggctgctgagcgggcacgcgccgaatttccggagcacgactggctgcatcttacggcgctcattcacgatctgggtaagatcatggccttctacggcgagccgcagtgggcggtggttggcgacaccttcgccgtgggctgccgttggggggatagcattgtgtaccgggacgagagcttcgagggaaatccagatggggataatcccgcctacaacaccgaactgggcatctatcagcccaattgcggagtggacaacctgctgatgtcctggggccacgatgagtacatgtattccgtgctgaagcataacaagaccaagctgccccatgtggcgtgcaacatcattcggttccattcgttttatccgtggcacaatggcggcgactataagcaccttgaggctccccaggatgcggagaccaaaaagtgggtgctgatcttcaatcgctatgatttgtacaccaagagcgaggtggttccggatattgaagccttgtggccatattaccagaccttaatcgacaaatatttacccggagtcttggaattctaagcgtacttatatacgagtgatgtttagctttctgaatgcttttactttatatataagacaacatttatacctgtaatataatataatgtgtatgctccatgtatatccccatatatatatacccaaataacctgaaaaacaaaaaagttttaaaaaagtactgcatactttttggcaaggaattttttgaaatactaagaattggagttagtactggtagtaccaaagacattagaatattattctaatactgcttctgatgaaaccataccttcctggcgtggaagactcaggggtgttcacttctatcgctccaatgctccacatagcgacagttcggagcagttcgacgacatgcttggaaagcttgctatatatctatctgtatatacctatttgcttagaccgaacttaatgattttccctttttccaaaacttacacaaatatatacctaataccttacactgaaaaaactgttcaattcactatgtacttattagtagttcttataaaccttgttattactaattacgtacgaaaacagaacggg

SEQ ID NO: 15153 - protein, 275 aa, DROSOPHILA
MRPEPTFADKNPSKFRDYSMDTTDPLKERVRQTYRQMHLNQTVDFVKGRREHWLKFNTIKMTVREALEKLNDLVDESDPDLDLPNIIHAFQAAERARAEFPEHDWLHLTALIHDLGKIMAFYGEPQWAVVGDTFAVGCRWGDSIVYRDESFEGNPDGDNPAYNTELGIYQPNCGVDNLLMSWGHDEYMYSVLKHNKTKLPHVACNIIRFHSFYPWHNGGDYKHLEAPQDAETKKWVLIFNRYDLYTKSEVVPDIEALWPYYQTLIDKYLPGVLEF

SEQ ID NO: 15154 - DNA, 3582 bp, DROSOPHILA
aatttgaaagctcgttagttgaaatattcaccacaaaaccatttgacttggaaggtaattattgttggacatgcacttgctattgctggcaaatgacccaaacggcaggcattgatattgtactggctataaataaattgaagatactacttatcgccagtctacaccaaaaaaagttctccaattagattgtgaaaaccaaacagattgtgaaaattatcaaattctatggtcataacatggggaatgagtcgtccccgggggaagacctaccagttagctccacatctatgctgatcctgagcatcaacgtggcatagttttctcccggtgccatggctggcttcacctggaagcccactatcttggagaactgatccacatgggcggcaagtaattcctcaaattgcgtttgattcaaccattctggccccaaattggacttctcaattggacacggcagttgtggtggtggcgtgtcagccgtagtggttgaccccttaattttcgcgttagatgagccagaaatgtttattgatgcctttttctgattcaggtcgccggcggaagctacctcatagctttttttcgacttggaattacgcagtcccattgtgaggcgagagtagtttgactagaactagaacgaatgccgtacgtccgtttggatgcggtaatgtctgtgaactgatgtttggcagacagagttcccccctagctatgccgttcagatcgtcgttgatatggtttaattatttcatcagcgtcgacaattttaagctcaaccgtatgcgagtgtttgagctattcattgagtgagtgcttttcactcgaatatagtagaatatactcagtgataagagctgcggagctgataaactcatagcgcacacctcaaacaaaacaagcgataaaggtttatgaactgataatgaaattatatttatctaccgcttttattgaattacttacaaacataatatcaacagtttacacacatttatttggttatttcaaaggcaccccttctatgggcccagggcagaatctctttttggtgcttaatgacgcggtgattcttgaacatgttgttccggatcttgtcaccagctccctcgccatccatcaaactatccatattggcatcatcaccgccatcgattaggacaaggggcagcagaatggacacaattggcagtactggtttttcaaatgaatgcaaattagtatcttatagataactgattattcagtggttgacttactccagtcgccgtagatgaagatcgattgatgtagacttctaagcgaaggcaatggtttcggatacttgagtagtttaaggctctcgatgagcttttcgtgatagaacttgatcaagtaatcaaacttggctatcttaatgtccagttcagtggaggagagtatcaggtagagtaggtcttgtgctggcgaagagaaccgactcatttgtaaatccacaaaatttacctcagccagctttcccgcctcatcgtattggtacataatattattgcaccaggcatccccatgatttagaactcggaattctccctcgatcttgggtgcaaatgattggaacatatcatccgcttggctgccataggcctgctgcaaattcatattcatattcatcgtgactgcagttaagtgtgttttgtttatattatccttaccacatcatttgtcaagtgagaggcatcgtaaaggggaaacgcatctatgtaggccttcaattggttttcgcgaagctcctttaagctgtccactacgctgcacaggttctgattgtattcttcaggataagatcctttcagctcaaatcgcacagcggatgcggcatggaactgggccagtttctccaaagtggcctccgtatgctgaatgtccaagccgttttggcgatccacattcctgaatccccgtttgcccagatcctctagtacgatcagctcatcgtccaattcaatctgtgattcataataacgtggtccaaaggaaatcttctttccggcatccttgtacatctgctcaaactcgggaatgtattgtccgtaggtgttgcgctccttatagaacactttccagctggcgacattttcccggtttccggaattgggcaagattttagccatgtaggaaatgctctgctcggaaccatctaatgaaacaaataatatattgaattaaaaatataaaatctaagaatattattctagattataattatgcttttatgttttaactttttctcatcacttaccattcaattccaattcaaaattggctctcaacagcagcgttgtgtagttttcaccctttcccgctgtgggttctagccggaatgacttaattttcttgagatccggaaaatcacgttccagaattggctcgaatttttgctgatccagccatgctggaatgggctcgatggcaatgtcctctgtttcccgaaccatatcgttcacctgttggcgttgctgtttgctcagtttcgcgtgggggctgctttttattggtttcatcacagggagcttttcagtttgaagctttggctccatttcgctagatggctaaagtccgtcacatgcgaacgcttttctgaggggacctgtttattcggatcggcgattggtcgtgatgcaaaagccacattcatgaccgaacgacttaaaaaaaagcgtcgtatcagtcgttctaaacaaacgtctagatcatgctgcttgaaacctaatgatgatcagcactgagcttttttttgcagtttcattgttacaatggctttttcagcaatgacttgcagccttggttcaacaattatctgccttactatagtagctcttaaaaaatatgtatcggtgagcctccaaaagcttttgataatgtttatattgttcaaatacacccatcgttcatcttatctaagtttgtaacggcgtatttatttattgtacactcatcttagtcgcaactaattatagcctagtcttcttcgaagtatccacgattctccatccatggcagcagctctctgatttgctccccaaacactggattcctaaagagctcttcaatgtcgttgtttccaaagtccgagagaacgataggcagtatttccgtggcagtttcaaatgctgttaaaaatatacctagtttttaagcaaacagataatatgtttccaacctaccccaatggccgtatttcagtaaatctaattgtaaatccgtgaggctgggcttctttcccagaaactttaagaggttcagattttcgatcaactgatcgtgatagaactttacataaccatcaaatcggctagatttttcagctggggccgtgagaagtgaactgaatagatcgtatacagctggaccatattgggcagtgtgaaaaccactgaagagcgtatccttaacattcccgaaagcatctacttggaggagcaagttattaggccaacaagatccatttagaatgacattgaaagaagttttcgagtctagaatctccgtaccggatttcacatacttttgaaaagatttctaaagaaaaaacttgaa

SEQ ID NO: 15155 - DNA, 1350 bp, DROSOPHILA
atggagccaaagcttcaaactgaaaagctccctgtgatgaaaccaataaaaagcagcccccacgcgaaactgagcaaacagcaacgccaacaggtgaacgatatggttcgggaaacagaggacattgccatcgagcccattccagcatggctggatcagcaaaaattcgagccaattctggaacgtgattttccggatctcaagaaaattaagtcattccggctagaacccacagcgggaaagggtgaaaactacacaacgctgctgttgagagccaattttgaattggaattgaatgatggttccgagcagagcatttcctacatggctaaaatcttgcccaattccggaaaccgggaaaatgtcgccagctggaaagtgttctataaggagcgcaacacctacggacaatacattcccgagtttgagcagatgtacaaggatgccggaaagaagatttcctttggaccacgttattatgaatcacagattgaattggacgatgagctgatcgtactagaggatctgggcaaacggggattcaggaatgtggatcgccaaaacggcttggacattcagcatacggaggccactttggagaaactggcccagttccatgccgcatccgctgtgcgatttgagctgaaaggatcttatcctgaagaatacaatcagaacctgtgcagcgtagtggacagcttaaaggagcttcgcgaaaaccaattgaaggcctacatagatgcgtttcccctttacgatgcctctcacttgacaaatgatgtgcaggcctatggcagccaagcggatgatatgttccaatcatttgcacccaagatcgagggagaattccgagttctaaatcatggggatgcctggtgcaataatattatgtaccaatacgatgaggcgggaaagctggctgaggtaaattttgtggatttacaaatgagtcggttctcttcgccagcacaagacctactctacctgatactctcctccactgaactggacattaagatagccaagtttgattacttgatcaagttctatcacgaaaagctcatcgagagccttaaactactcaagtatccgaaaccattgccttcgcttagaagtctacatcaatcgatcttcatctacggcgactggatactgccaattgtgtccattctgctgccccttgtcctaatcgatggcggtgatgatgccaatatggatagtttgatggatggcgagggagctggtgacaagatccggaacaacatgttcaagaatcaccgcgtcattaagcaccaaaaagagattctgccctgggcccatagaaggggtgcctttgaaataaccaaataa

SEQ ID NO: 15156 - protein, 449 aa, DROSOPHILA
MEPKLQTEKLPVMKPIKSSPHAKLSKQQRQQVNDMVRETEDIAIEPIPAWLDQQKFEPILERDFPDLKKIKSFRLEPTAGKGENYTTLLLRANFELELNDGSEQSISYMAKILPNSGNRENVASWKVFYKERNTYGQYIPEFEQMYKDAGKKISFGPRYYESQIELDDELIVLEDLGKRGFRNVDRQNGLDIQHTEATLEKLAQFHAASAVRFELKGSYPEEYNQNLCSVVDSLKELRENQLKAYIDAFPLYDASHLTNDVQAYGSQADDMFQSFAPKIEGEFRVLNHGDAWCNNIMYQYDEAGKLAEVNFVDLQMSRFSSPAQDLLYLILSSTELDIKIAKFDYLIKFYHEKLIESLKLLKYPKPLPSLRSLHQSIFIYGDWILPIVSILLPLVLIDGGDDANMDSLMDGEGAGDKIRNNMFKNHRVIKHQKEILPWAHRRGAFEITK

SEQ ID NO: 15157 - DNA, 2703 bp, DROSOPHILA
caaaacattggaaacaagggacgcagtcaacccccaggtagcagcccactttccgacttccgatcccaatgtccatgcaatatccgttccgaattaatttgctgcccggaaaaaagggcgctaatctgttcgcgatgggcgttgaacgcaaaaattccttggtatttagcccggttgcggggaatccctcaagtgttacacttgttcctgggttgtccttggttaggggttgctacaattgactttgaactgccgtcctcccttttggcatctcccctccgagtgcatcaatttattaataataatttcacgctttgtttgccttgtcaaattttgtataatagttttctttccattcgtgatttgtatgcaatgtgacttcattgggaccaccgaatggacctgggcatgtgttgcctttccagctgcacaaattcgcacgcaaatcacgacatggttcgctttggttttggctgggtttttttttttaaaacaagtgcgggttctacttagggggattatcaggtgtacttcggtggtacttttggctttaaagtcaccacccagtttagacaatcactttgtttaccatttcgaaaactaaattggattatccactgattttgtttaattgtcctctccttttccttttctatcacaaataataataataataactgcaatacaaaaaatatctttttacagtatccatttaagtgcaaaaattcaatgttctggctaatttaattgctcccatgaatataaattcttgatgttcatgtgaccagtcataattcactttttaaagaaattacatttgaaacaataaatttctttctttttaatattttttaatatttctattgctttttaaacaatatataaagttttaagaaaacattatttatctattcctataattacaatattttaacaaaactgatctgacgagaagcagttttagcatttatttgaatattggatttcctgagaaatgtcactaggacaaactatgattatagggcgaagcgaaatcgcgttgatatgccgccgccggatgcagatgatgtggatgaattgccggtggtggcgcctgatggtgaccattcatactcccatagacgtcggaccgcgatttgtgggagttcgagggcgtgccgctcagcagctcagccatgaatccgatgtaggtgatggccaagcgaagggtttcgatgcgggacagtcgtttctcgtaggcgaaggtgggcaccttgcggcgcaacttgtcgaaggcctcgtttaggttaaacatgcgacggcgttcgcggatatttgcagctctccgttgggccattgatgccacacggcgacgcgttttcttcgaggagctggaggagccgttggccctcccatttgtcgacggacgctggggcaccaaaggagttacttgcgagcgctgccacagagctttagaatagaaaaacatcttaagcacttccattccaaattccaaattccgtttgaggtacttacacaagtcggtgcagggaaaaccggcgatgagctcttggtatggaacaatgggcggcggtggagcctcctgaccccaaagcggctggaatggaacatccggcatgtaggtgggctggtcaatgggatgtggatgctgcatgactgtctattgtattggatgatactgcaattggaagaccttgggtctgttctgcttggaagactgtgttgcaataaattctgattgtcctcacgggctgcgaagtcagctcggtgctgttccgaattttgcttattggattttcctccccggcggatggcagcatctgcttagaggccattttggattggcaacagtttggtgcgatccgattggtcgtccttgctggggggttgttgaggtgaaatctgatgttctgactttcaaatctgattagatcaggcatatcgtactgaataaaaaaattatttttttttaaccaatttgcagattttttgataataatctattgttacctatagctaaccaaatgaattgaactggattaagactaatacttagcacgctcaaataaccggtttacgtatattttggtataggaatacaaatttttaatttattttttaccataataacatattgtataaattcaaaaatagctgtgcagttcttgactgtggcaaagagaacaagcattccagaatattagaatattattagaatcctaatattagcatattagaatattattaacttatgtcaaagagaattcttagttactactccaaccctcgaaacggttatgtgctgctggtggatgtcttgaatattatacacagtgctttcgagacagccgtgacacgaaccgttttcggaaaataaccggttagcaactcggtttttaaacctgtcacaaagttcttttaaattttaagttttttagttttgttaattagaaattctctaaggttatatatatttaaaaaatgttctgcttagttgtattcaatgtcaaatcatttattatttaagttattcaaccgaaatagcatttatgccgttagtctcctccaatctgttgcatgcatttgtttttgtttataagtgactctctgggagtcctgctgcgtattccgctctcctgctgaatagggttcagtgcacctgcgcggataattacgccggctttttgctcccaatcggaatct

SEQ ID NO: 15158 - DNA, 637 bp, DROSOPHILA
cagacccaaggtcttccaattgcagtatcatccaatacaatagacagtcatgcagcatccacatcccattgaccagcccacctacatgccggatgttccattccagccgctttggggtcaggaggctccaccgccgcccattgttccataccaagagctcatcgccggttttccctgcaccgacttgtctctgtggcagcgctcgcaagtaactcctttggtgccccagcgtccgtcgacaaatgggagggccaacggctcctccagctcctcgaagaaaacgcgtcgccgtgtggcatcaatggcccaacggagagctgcaaatatccgcgaacgccgtcgcatgtttaacctaaacgaggccttcgacaagttgcgccgcaaggtgcccaccttcgcctacgagaaacgactgtcccgcatcgaaacccttcgcttggccatcacctacatcggattcatggctgagctgctgagcggcacgccctcgaactcccacaaatcgcggtccgacgtctatgggagtatgaatggtcaccatcaggcgccaccaccggcaattcatccacatcatctgcatccggcggcggcatatcaacgcgatttcgcttcgccctataatcatagtttgtcctag

SEQ ID NO: 15159 - protein, 195 aa, DROSOPHILA
MQHPHPIDQPTYMPDVPFQPLWGQEAPPPPIVPYQELIAGFPCTDLSLWQRSQVTPLVPQRPSTNGRANGSSSSSKKTRRRVASMAQRRAANIRERRRMFNLNEAFDKLRRKVPTFAYEKRLSRIETLRLAITYIGFMAELLSGTPSNSHKSRSDVYGSMNGHHQAPPPAIHPHHLHPAAAYQRDFASPYNHSLS

SEQ ID NO: 15160 - DNA, 3871 bp, DROSOPHILA
ttcccgctcttaatcactgctcttgggtcctcggttagaaaggcgtctggtgcatctgacggctccacaacaggtccaaaagcactgaagggtacataggaaaacacaaggaagcttcggacagcagagactatatcgctagccggcttagacttcaagcagtccttgagttctgcggagacatttgtgtgtccacaaccgacaatacgacccagttcaaatgcacgtcgtcgtccaccctgctgtatgacccaaggatccaatgcattgccgctcaccgaaatcgctcctttggccaaatgtttgaaatcctcgtgcaacagctgcaaatgagccgaagcaccgcctgcagagtgaccaatgagcacaatattatctggcattccaccaaagtgagcaatgttcttcttgatccattgtagggccagacgttgatcctttagaccatagtttcccggcaagtgtctatcgccggtacttgcaaaacccaatggtccaagaccaaaacttatttttaccacaagcaaagttccctcacgcataatggagtcgtgtccatatatggatccactaccgaacatgaaagcacctccatgcaggagtactacgacaggaaagctgctccgattgggtttctttggcttatagatgcttaccgttaagcaatcctcatcacccatcagcttattgttttcgtttataaactgattccactgcatgcactcaactggagactgcgtggcattgaaaacatcagtccaatgatgactatacggctgaggtgcttcaaaacggagggcaccagttggatgctcggcattgggaatcgattcgtagctgtagtacaacccattatctttgccacggatttttccatttgttatctcaacaatcaagggatcagcttcagattctaaagctgctatccacagcaaagtcaggcacaacagccgtttgaatatactcatgatctggaactccacaaagtactaatcaaactgcgggtaaacaaacgtttattattctttataaagaaacaacaaaaaccaaaatataaagcgacaaacacgttttgtacaaatgatatttaaagccagttgagaataattaaataattaaaaattacacagaacgaaaaatttttgattttattcatgtaacttacggaaattccacatgctgcctattctggcagccatcaatataaatagctaataattggaatttctcactacctacattatctttgaaatcgcattcaccatattttagagagccattatcactcgaagcaaaatctgccagcatattgataaaatttctcgaaattatctgctcatccggacgcatttccacatctcgtacgaaattttcgaatatcaaaaagtagtcgtcaccgtgtacagttcctataaaagtaatgatttaactaagtccatttaaaagtacgatttccttaccaaaatcataatcggttcgattggccaggacctgtgcgattcctttttcggctggattgtcatagacataagcgtaggcaggactctttccatatttgcgatgaagatccaatgactcctgcgtgctattcttgaagagaatatccgtgaatagccgctgcaattctgaatagctttcgatgtcaaatctctgattgcctatatactcctgcttaattttccgcgagtagtcgtccatatcctttttggtcttcgtgtcccggtagaatagtaaatatggtgccaactcaagccaacgctcgtttagatcatcgataactattccagatttccgttccttcaaaagcaaggcggcattgtagccaccatcctctgtgacataggaaacagcccacggaacctgtccgaactttccgctcttaatgacatccctgggatcctgggtgataatggcgtctggagcatccgatggctccaatacaggactaaatggagcaaagggcacataggaaaatataaggaatttacggacggcggtgactaattcactggctggctttgactttaggcatttcttcaggctggtcgagtcttcagccgattcacatcccacgttgcgtcccagttcaaaggctcgtcctcttgctcccttctgtataacccatggatctagagcatttccactaaacgagaatgccgccctggccagctggccgaaatcttcacgaagcatctgcagatggaccgaagctcctccagcggagtgaccaaccaacagtacgttctgcggttctccaccaaaactggctatattctgcttaatccatttgagagccagccgttgatctttcagtccatagtttccgggaagatccctatcgccggtgctcacgaaacccaatggccccaggcgatagcttatcttcaccagaatgaatttgccctcacgcatcacgttctcgtgtccattttgccatgctgcaccgaacataaaggcacctccgtgaatgtgggccaccaccggaaagctattcctcttgctattcttcggcttgtagacgctgacggttaggcaatcctcctctcctaccaatttgttggccccaggcgtgaactgatcccactgcaggcacgccaccggggttttggtggcatcgaatatatccgaccacttttgtttgtacggctctggagcctcgaatcgtagatcgccagtgggcggttcggcgtagggaatcgattcgtagctgtagtagcttccattatcgcgaccacgtagcttgccctggggcagctgcaccaacagagggtcatctgtatcactcgcgttcgaaccgagccaaaggcagctcagcacaatgataagtcccagtcccacgtagttcatgttgctcctcactccggcgaattcagaccgcaactatcttgagatgcggcaattgcggccccttttattccatcgatcggcttatcgccacccggccacctgaacaaccagtcaaccagtctcaattgagatctgggcacgccatgagattagttttccaatgcccggctttgaaatgggagtaactctagtgtgaacatcatccagttgataggcgtgtgcgaattaaaacgatagccgtatacaaattaggtttgttactttacgcttaaaatatttgactgggcttaatatagattttcgacatgcatcccaagcagttgccaatcccacttcaggtgagacttatattgcacaatcgcttcgagtcaacttgattaattactttacatgcatgcaattttttgtttgaatgtttatccagatgaatttgataatgcactttaaaacgaaaccatttaacaaatgagtaggctttttgattatagataaatataattaataagatttaaggtttgcaataaatatgtccatatttctctttttgaacatgtgtcctaagtttttgtgtttattttctgaataacaattagcaatattaaatcgaagtaccgaaacgtgtatcgaaataaaatggtgtaagatatcatagaacttgcacttgcgggtgcacgcttttgaatccgactatagttcgttggcattttgaggggcggtggtcttgcctgtacagatacagctttccgctacaattattattaaaattactattatattattattacaattactattaaaaaagatcaagaattgagcgtgcttgcgacaaaatagaatcaaataaagaaattcagaaaaggatagttctagagaaaagtgggagatgagtgaaaatttattgctagcaaaagactggtgtaattgtgttctagaaatgctgtacctatgagcactttgatacttgtgttcatccttgtgtagaaacatcagctcagtttactatttaaatttttagatatttatt

SEQ ID NO: 15161 - DNA, 1820 bp, DROSOPHILA
gaattcgccggagtgaggagcaacatgaactacgtgggactgggacttatcattgtgctgagctgcctttggctcggttcgaacgcgagtgatacagatgaccctctgttggtgcagctgccccagggcaagctacgtggtcgcgataatggaagctactacagctacgaatcgattccctacgccgaaccgcccactggcgatctacgattcgaggctccagagccgtacaaacaaaagtggtcggatatattcgatgccaccaaaaccccggtggcgtgcctgcagtgggatcagttcacgcctggggccaacaaattggtaggagaggaggattgcctaaccgtcagcgtctacaagccgaagaatagcaagaggaatagctttccggtggtggcccacattcacggaggtgcctttatgttcggtgcagcatggcaaaatggacacgagaacgtgatgcgtgagggcaaattcattctggtgaagataagctatcgcctggggccattgggtttcgtgagcaccggcgatagggatcttcccggaaactatggactgaaagatcaacggctggctctcaaatggattaagcagaatatagccagttttggtggagaaccgcagaacgtactgttggttggtcactccgctggaggagcttcggtccatctgcagatgcttcgtgaagatttcggccagctggccagggcggcattctcgtttagtggaaatgctctagatccatgggttatacagaagggagcaagaggacgagcctttgaactgggacgcaacgtgggatgtgaatcggctgaagactcgaccagcctgaagaaatgcctaaagtcaaagccagccagtgaattagtcaccgccgtccgtaaattccttatattttcctatgtgccctttgctccatttagtcctgtattggagccatcggatgctccagacgccattatcacccaggatcccagggatgtcattaagagcggaaagttcggacaggttccgtgggctgtttcctatgtcacagaggatggtggctacaatgccgccttgcttttgaaggaacggaaatctggaatagttatcgatgatctaaacgagcgttggcttgagttggcaccatatttactattctaccgggacacgaagaccaaaaaggatatggacgactactcgcggaaaattaagcaggagtatataggcaatcagagatttgacatcgaaagctattcagaattgcagcggctattcacggatattctcttcaagaatagcacgcaggagtcattggatcttcatcgcaaatatggaaagagtcctgcctacgcttatgtctatgacaatccagccgaaaaaggaatcgcacaggtcctggccaatcgaaccgattatgattttggaactgtacacggtgacgactactttttgatattcgaaaatttcgtacgagatgtggaaatgcgtccggatgagcagataatttcgagaaattttatcaatatgctggcagattttgcttcgagtgataatggctctctaaaatatggtgaatgcgatttcaaagataatgtaggtagtgagaaattccaattattagctatttatattgatggctgccagaataggcagcatgtggaatttccgtaagttacatgaataaaatcaaaaatttttcgttctgtgtaatttttaattatttaattattctcaactggctttaaatatcatttgtacaaaacgtgtttgtcgctttatattttggtttttgttgtttctttataaagaataataaacgtttgtttacccgc

SEQ ID NO: 15162 - protein, 544 aa, DROSOPHILA
MNYVGLGLIIVLSCLWLGSNASDTDDPLLVQLPQGKLRGRDNGSYYSYESIPYAEPPTGDLRFEAPEPYKQKWSDIFDATKTPVACLQWDQFTPGANKLVGEEDCLTVSVYKPKNSKRNSFPVVAHIHGGAFMFGAAWQNGHENVMREGKFILVKISYRLGPLGFVSTGDRDLPGNYGLKDQRLALKWIKQNIASFGGEPQNVLLVGHSAGGASVHLQMLREDFGQLARAAFSFSGNALDPWVIQKGARGRAFELGRNVGCESAEDSTSLKKCLKSKPASELVTAVRKFLIFSYVPFAPFSPVLEPSDAPDAIITQDPRDVIKSGKFGQVPWAVSYVTEDGGYNAALLLKERKSGIVIDDLNERWLELAPYLLFYRDTKTKKDMDDYSRKIKQEYIGNQRFDIESYSELQRLFTDILFKNSTQESLDLHRKYGKSPAYAYVYDNPAEKGIAQVLANRTDYDFGTVHGDDYFLIFENFVRDVEMRPDEQIISRNFINMLADFASSDNGSLKYGECDFKDNVGSEKFQLLAIYIDGCQNRQHVEFP

SEQ ID NO: 15163 - DNA, 2799 bp, DROSOPHILA
tcacagtgatgcgcgcacaaagccaccgaaattgtttaagatattaaaactgaatgtaattattaaattatcacgcaatgtagtacttcggaactttttatttgttaaaaggacctttttatttagaattcgttttgttaaaattacctttttgaatgactaaacttacaccgcctactcttcttcttattttttgttttgccattcaccacgaacttaataacaacttaacacgcggagatctccacataaacaatggaaattaaagtacgtaaacaaattatttgcgacctaaaacttatttcattttgatccccgtagaagtccaagaaatcaaagaacgacaagaagtccaaggcgcccaaggagtcgtccgtttcgctcaaactgaacgctttgcatcgcaagcaaaaggaagtcgcccgcgtgctcactttaaaacaagaaatattactgaaatcgggtgtatcctatctggaatattatgagattctggcagaaatcgaacgactcaacggcctaaaggagtcatttatgcgccgcgctgataagctgaagcaacaggacaaatagttgataagttggtttggtttagaaactatataagagtaaagaaatctgtagcagttatatttcggaatgttttgtacatacatacatgtaatcttttttgtaattaacttttatttacttaaaagctttcaataacatgatgaataaagtagaaagttatatatatagtcaaagctgatcataactaaatgcacgttgaaaattagtcaactcaatcgaagtgataaagatttcatacggattatactgttaggtatacattttgattacttttgttttgcttaattaatttggcactcctttgtgtgtgaagatcaagctgccttaaaaagttttagtttaattgaaggcacttagaaaataagaactataattatttggcatactgaggaactgtttggtagtcatacattaaatcaattgatttctacttgagctggatttggctcccctcggtcttcgcaaaagcccgccacattcgttggaattccgcctgaaacgtggctgtgagtttgtcgtcagctgtgataatgcagttctcccaattgcctcccagtccaagagccgtccagtttacggagccgctgatcacgatgctatagcacggacgcataaacttgagcttcctcagcagacgaatctcctcgacgcgctcgaagccgtcgattatgcagaatttgttgtgcatcaagttcgtggtaatggggacgcgaactggaactcccaattgtgccagcatactgatctgagaacctttggagtagaccatctccccgtcgctgatgatccggataatcacgccgcgctgcagggcccgctttattgaatccgccaaaaaaagcgaggtgaaggtgtatatggccaggtcaatggagtatacagcccgatcgatctgctctacgatcttggccacattccgcagcgaacaatgcgtgttgcagcagggcgacacttgtggtttctgggatcccatgctgctgttgcgcatatgcaccgccgcacagatctcgcccagttcattgaagatgatcacttcgtgcacgcggcttgccttctctcgcttgctgcgcgagcactgcaccagcttccaaatcacctctgaggccaggacagtgctgacggcaatgcttattgtggacacaatgggatagtctcgaatttgtttcataattatttgggtaatcaacatttttgaatttagctcgtttctctagcgcgctttaaataataatcttggggtgaccattataaaatataagtaaaatatattatcgttagtagctaccggtcacactgttgctcagtagcgttgccgtatcgcagccatgcgcttgcccattcgaatcaaacaatcaatttcgggtcaatttaagcattttaccacctaaatggatgatccatccgccacgctcttgcccgaacactcggaagatttgcggctggctcgcgatgcggagctgaagaaggtgctcaagctgaagctagtgctggacgagctaagacgcctggatgtgggcccaaatccgagtgatgaaatcaaaagagccctcaaattggtttccattggaagttatgcgcgactcggcgagatggagggagctggtcaggagcaggtgcttggtaggcgcgttacaagtttattccaaaagcagtgaataaccattggaaatctaacaggtctaccgagcggcagcagttttccgcccttgaattacacggatcgcaagacggtgcgtaccaaattgtccgctcaattacgcacaactctgcaacccattgccgaattgtgcgacaggatacgcgaggagttcccggacgcctttggccaggaggcggacttaagctgcgaccaaaaggagattctgcgcctggaggaggagcatcgcagcggtctggagaaattggttgcgcttctcactcgtaagtgcacgcttctcaaggagaccgccgaattgaaattggggccgcagttggcaaacgaactaaaattgcaacaggcgcaggcgcaacttgttcaaacaaaagcagaactactgcgcggatttttcgtccacgaggccgcctctcgcaccgaacatagcgtcaaggcacataaggaggtggaggcgcacctggacgagctgctcgccgccaagaagtagatttaagcaaactagtattatgtaaattagatttttaaatacattataattgtgatttaaacagggttgttcgtttaggtctttt

SEQ ID NO: 15164 - DNA, 799 bp, DROSOPHILA
atttaaagcgcgctagagaaacgagctaaattcaaaaatgttgattacccaaataattatgaaacaaattcgagactatcccattgtgtccacaataagcattgccgtcagcactgtcctggcctcagaggtgatttggaagctggtgcagtgctcgcgcagcaagcgagagaaggcaagccgcgtgcacgaagtgatcatcttcaatgaactgggcgagatctgtgcggcggtgcatatgcgcaacagcagcatgggatcccagaaaccacaagtgtcgccctgctgcaacacgcattgttcgctgcggaatgtggccaagatcgtagagcagatcgatcgggctgtatactccattgacctggccatatacaccttcacctcgctttttttggcggattcaataaagcgggccctgcagcgcggcgtgattatccggatcatcagcgacggggagatggtctactccaaaggttctcagatcagtatgctggcacaattgggagttccagttcgcgtccccattaccacgaacttgatgcacaacaaattctgcataatcgacggcttcgagcgcgtcgaggagattcgtctgctgaggaagctcaagtttatgcgtccgtgctatagcatcgtgatcagcggctccgtaaactggacggctcttggactgggaggcaattgggagaactgcattatcacagctgacgacaaactcacagccacgtttcaggcggaattccaacgaatgtggcgggcttttgcgaagaccgaggggagccaaatccagctcaagtag

SEQ ID NO: 15165 - protein, 253 aa, DROSOPHILA
MLITQIIMKQIRDYPIVSTISIAVSTVLASEVIWKLVQCSRSKREKASRVHEVIIFNELGEICAAVHMRNSSMGSQKPQVSPCCNTHCSLRNVAKIVEQIDRAVYSIDLAIYTFTSLFLADSIKRALQRGVIIRIISDGEMVYSKGSQISMLAQLGVPVRVPITTNLMHNKFCIIDGFERVEEIRLLRKLKFMRPCYSIVISGSVNWTALGLGGNWENCIITADDKLTATFQAEFQRMWRAFAKTEGSQIQLK

SEQ ID NO: 15166 - DNA, 7365 bp, DROSOPHILA
atactcgtacaaatgtacatccccgattattgtggccaaggcgatgatgtcgcgatccggatgaaagcagatatctgttataaagtcttccagcttaatctctggaggggaactgcgtggcttctttatggctgctatcatggcacgtacagtctcgtctgtttcgtcgtcctcgtccaagtcgaaggtggcttctggttgcttgttgctgcccgatggattatcgtcatccttgcgtttctttgcactcgttgctcctccggcggtgacaccacccgcctcgtcgagcattgaatcatctgaatcggagtccgctgcatttggatcgaaactgtcatcgctgctgctactatcgttgccttcgtaactaatgtcgccatcgttatccggcactggagcacccatgtctaccaggtcatattcgtcgttgtcgctgtccgactcgttcagcacctcctgttcgatttccgctattactcccaccaccatgtcctcgtccagatcatctagttcgtcttcgtcggagggggttttaaagttgttatgtctgcgaaacgtatgttcggaacatgtttaggattccaatccattgacccaatgcggtgcgtaataaactactcacgtgtgcataatattgcaagtccaagctccgaaaatatccgcttttatttaccacgtttggatattgtttggataccacgagaacaagaagaagcagaaagcatgtagccactcagctgttcgatatggttggccaaataactagttcttagctaaattcgcttttaaatgttttcctctgatacacaacaatatatcaatttacactttatattttcaatacaagtcatgcgatgcgctttcatcgctttacaattttttttcttttaatgatcttttaaaatattatcggattaaatatggtatatttgagtaggttactctgatgtttcagctatatgtgaagggtggaccgacggtcacactaattcctattcgcattgtttccattggcatattgcgcgggtttttagtccgaaagtgtataaaattgtattgcttacttatttgttaactagttgtatgcaaattaaagcgctgacatctgtttaaatcgctggtcgtgatgtccaagaagcctgtcgcgcaaagaaaacagctcacacttagcagcttcattggcctggatggcaattcccagagtcaacctaagagcagaggtatttggagcattttgaccaaattagggatgttaatagttgcatttcagccgcaagtgtcagaagcaagccccccgcagtctacaatcccatctttctggacgcgtcctcatccgacgatgaaactacggagatatccagtcaatccaacaatggcactattgctacgaagaagtccagcagagatcctagaaccgcaaagctcaaaaaacacacatacctcgatctgtcagtgtccccactagctaaactttctgccaagaaatatgccagagattcgcccaaaaagcccacatccctcgatctgtcagtgtccccactagctgaacttcttgccaaaaaatctgacagagattcgcccaaaaagccagtacagaatgagaatagttacacctatcggggattgtcggaatctcctgttgaaaataaatcaattggcgatacactaaggaaaccacctcaaaaagagaggaaaacatcaatagtttggctttcggattctccggaaaagaaagtgacgcaaaatgagaggaagatcctagactctccactccaaaggttctccttcgaggactttccaaacaaagaaaatggaaatagacatcacctactcacactgcctgattcgccgccccctccgcagcctgtcaagaaaccggagaaaactatgtggcaaaatgaaacaaaaacgattcaggataaggactcccctgcaaacccattagttagcaacaatctggcctccatttcgactctgcttgactcatcgcgggctcctaatacatataaaggcagtagtcgtaatctttttgaggattctccagagaaaagtggcagcggggagcaaggctataaactgggttcagcgaaagaaaatgaaatcccgacaaagcctgcgaccgcttctctggaaagaaatagcgtcacctcctctccatcaccagcggcaccattgaagcccagatacagtgtggcttttgacaattctctggctgattacttaaaggacttggcccaaaacgacaacttcagcatcgatcccaataaacagaatactgagacactgaagagcacgcttggattctttcgcaacacttatgtggagctaatggaaaaatattgctctctgattgaccagattcccgccatgcacttcaatgaaatagcaggctttcagccgaatacgtttctcaagctcaaagtaatgcgacaaaaatttaaagcgcggacacagcttgtccaaaacagtttagataagaaagaaagtcagctaaaagcggaacaggaagcccttgagaaggaggaaatagaaatgcaggcggaacaggctcagcagactgttttatcatcatcttcaccagagaaaagtcgcccgataatgcccctgccaaaagttcaagaaatcaaggatgaaaaaatacccaatcggaatcagcttatacacgacctttgcggagagccagacaatttctctccacccagctcgccgcgcgatacgcaacttattccgaaacgccagcagctcatcaacgacctttgcggggagccggatgacttctcaccaccgagcaaacaaaatgatccgcacctgctgcgaaagtgcgaagaacttgtccatgacctttgcgaggaaccggacgactacttagcacagagcatgatgctagacggcgacttggaggaggaacaactgaacggacccacgcaggggacgacaaccagcggaatggatgatgacgaagatgacttggagggattgctggcggaaatcgaggacgagcatcagaagatgcagggccgcaggtcagagttcaatggttacagctataaggagttggaagctgtcaaagtaaaggagaagcacaaggagaccccgataaatatttccttggatgatgatggatttcccgagtacgatgaggctatgtttgaacaaatgcattcccaggctgctgccaataaaagcagagtgagcagtgccggcccaagcaccagtaagagcgttgtgcctaccaagcaaaccagtgccctgcactcccaaaagctgtcagggaatttccatgcgaacgtgcacaatgacggcatcaccggggagttcgatggtcaaaagtttgagcactccacccgcctcatgcacggactgagctacagctttggtctaaaaagtttccgtcccaatcagctgcaggtgatcaacgccacgcttctgggcaatgactgcttcgtcctgatgccaactggtggaggaaagtcgttgtgctatcagctgcctgccattctgaccgagggagtgaccattgttatcagtccgctgaagtcgctgatctttgatcaaatcaataaactggcttccctagatgtgagtttgagaaccactatatcaaataactatgatttattgtccttaattactttttaacagatctgtgcaaagagtctgagcggagaacaaaaaatggccgatgtcatggccatctacagggatttggagtctcagccacctatggtcaaattgctctacgtgacacctgagaaaattagcagttctgctcgcttccaggacactctggacacgcttaattccaacaactatataagtagattcgttatagacgaggcccattgcgtttcccagtggggtcatgactttagaccggactacaaaaagcttggagtactaaagaagcgttttccaaatgtgcctactattgcgttaacagctacagccacgccccgcgtccgcttggatattctggcccaactaaatctgaagaactgcaagtggttcctctccagttttaatcgcagcaacctacggtacagggtactgcccaaaaagggcgtctcgacgttggacgacattagcaggtacatccgcagcaaaccgcagcacttcagtggcataatctactgcctgtcgcgcaaggagtgcgatgagacgtcaaagaaaatgtgcaaggatggcgtccgggcggtatcctatcatgctggtctcacggacactgaccgtgagagtcggcaaaaggattggctgaccggaaagatgagggtaatctgtgccaccgtcgccttcggcatgggcatcgacaagccagatgtccgatttgttttgcactactcactgcccaagtccattgagggttattaccaagaggcaggtcgcgcgggccgagacggtgacgtggctgattgcatcttgtactacaactattcggacatgctcagaatcaagaaaatgctggactgtaagtggtcaagatattcattttgtttgttaatttaattgcattcccatttcagccgacaaagctcttcagtacaatgtgaagaagatacatgtagacaatttatatcgcattgttgggtactgtgaaaatctcacagattgccgacgtgcccagcagttggactattttggggagcactttaccagcgaacaatgtctggagaatagagagacagcttgcgataattgcattaacaaacgagcctataaggcggtagatgcattggagcatgctcgtaaggctgcacgagcagtcaaggatctgtgcagcggtagatcccgtttcacactattgcatattgccgacgtactgaaaggttcgaagatcaagaaaatcattgactttaaccatcacaaaacgccacaccatggcgtcctgaaagactgggacaagaacgatgtacacaggctgctgcgcaaaatggtcatcgatggtttccttagggaagaccttatatttacgaacgattttccacaggcctatttgtatctgggcaacaacatcagtaaactaatggagggcacgcccaacttcgagtttgcagtgaccaaaaatgccaaggaagccaaggcggcagttggcagcgtttccgatggtgcaacgagcagtaccgctgatggacagtcgggaatgcgggagattcacgagcgttgctatacagatctattggatctatgtcgaaccattgccagccagcgaaacgttaccatggctagtatcatgaacattcaggccctgaagagcatggccgaaacactaccaatcaccgagaaggacatgtgcagcattccgcacgtgaccaaggcgaactttgataaatacggcgccaagctgctcgaaatcactagcaactatgcatcggagaagctgctgatgcaagccgtcctggacgaagaggaggaacaggcggccgccaagcagaggcccagtacatccggctggaataacgaaagcgtggactgggacatggcggttgcctcacagggcaatgcaaacacgagcggtgccagcggtttcaactcgtttagagcgggcaaaagaaaaaagatatacaagtcaggggccagcaagaggtacaaaacgagtactacatcgccagcggccaggaagacaacatcagccaggggtcgcggtggtagggctggcgccaaacgagcggagagttcagcttcgtcagcgtcgggctggaagtccaagaaaacagggaatagctttggcttcgatttaatgccactgccaggatcaaaataatttaatatgctttgacgttttgcctaagaaactacagtttttggatgttatagcgtatgaatgtaacataagctaaaagatttttgaaataagttgttaaaaaatttcaaatttctgtatgagcaatgtgctcagtttattaatgtttgtccgcttatgttccttattgtaaattaacaccttaaatttcagttaatagaattaagtacttatcactaaaaatttttacataaactttcatttcgttaaacaataatagcactatagatgcaacccccgcaaaaaaacaaaaacaatcagatgcagctgtggtcaacactgtacactggtgtaatctaagcctttcattagtactcagaaccatccattatcatctatgtcttggcggcttgtcgcaccttatcctcaaattcgtaggcacccatagaccagatcaggttggcgtccgtctccacctggacgaactcggtcgcataggtgtttgaggtgcttaccataccaccaaactccagctgtgcatgatctagaaatgaaagcattactgacagattcgtgaaatcagtattattttggtgtacgaacataggttccatttgagtcccgtggtagtgacattgtgggccgacgatcccacgggcatcagagagcaccatcgctggctggtgaccaggtcgacgggcacctgtatcgtgtgctttcccggccgcaataaccacgtcaccgaatccccgctcaacaggaagacattgcagttatccttttgcgatttgtacagcgtgtttaggttggccatgacctggtccaagcgaccggaagtgtcatgaaacaccaccacatcctggattttacgctgcgtcattacgggttgcagtacggccatggccttcgtgaaatctgttgcatcctggtcgggtgtgtggactttcggcgtggtcttgaagaaatcgaccgtttcctcagtgatcgagtcaaagtcacccgttatcacatcgagcggttcaagtggtgtcgtgggcgcggagccattggccttctttgacattgcctgagccacgacaaagtcacgccagtggttggagcctccatcgacagcacaccgaacggcggctaaaagagaccgcaagatgttagctggctaagattggttttataacagatccagacctaccgtttttccatagcagtttcaccacgtgcgccggcacttgaatctgccgattgagcaccacgcaaacgtgtccatggtcgcccagcttaaagttctcgttgatcaggttgcccggcgtccatttgtactctttgggcggtattgtgtggtccatttgctgccgaaatccgattgttgtttttgtgcaaaggaagcggtgggtggcggaatgggtggtgcgttggtgcgccggcctgccaactcgcgtgattcggatcaaaccgaatccgtggcgagagcggcgcatccaatttaaggcggaccctggagcgcctgccgccgtcattgtgcagccgcccgtcccatataatttaaccaaaatcatatattattgaaagaatacgcccggacagtccgctagtacgaagctctcactttgaatatttttaaaaattgttcg

SEQ ID NO: 15167 - DNA, 5197 bp, DROSOPHILA
attgtttccattggcatattgcgcgggtttttagtccgaaagtgtataaaattgtattgcttacttatttgttaactagttgtatgcaaattaaagcgctgacatctgtttaaatcgctggtcgtgatgtccaagaagcctgtcgcgcaaagaaaacagctcacacttagcagcttcattggcctggatggcaattcccagagtcaacctaagagcagagccgcaagtgtcagaagcaagccccccgcagtctacaatcccatctttctggacgcgtcctcatccgacgatgaaactacggagatatccagtcaatccaacaatggcactattgctacgaagaagtccagcagagatcctagaaccgcaaagctcaaaaaacacacatacctcgatctgtcagtgtccccactagctaaactttctgccaagaaatatgccagagattcgcccaaaaagcccacatccctcgatctgtcagtgtccccactagctgaacttcttgccaaaaaatctgacagagattcgcccaaaaagccagtacagaatgagaatagttacacctatcggggattgtcggaatctcctgttgaaaataaatcaattggcgatacactaaggaaaccacctcaaaaagagaggaaaacatcaatagtttggctttcggattctccggaaaagaaagtgacgcaaaatgagaggaagatcctagactctccactccaaaggttctccttcgaggactttccaaacaaagaaaatggaaatagacatcacctactcacactgcctgattcgccgccccctccgcagcctgtcaagaaaccggagaaaactatgtggcaaaatgaaacaaaaacgattcaggataaggactcccctgcaaacccattagttagcaacaatctggcctccatttcgactctgcttgactcatcgcgggctcctaatacatataaaggcagtagtcgtaatctttttgaggattctccagagaaaagtggcagcggggagcaaggctataaactgggttcagcgaaagaaaatgaaatcccgacaaagcctgcgaccgcttctctggaaagaaatagcgtcacctcctctccatcaccagcggcaccattgaagcccagatacagtgtggcttttgacaattctctggctgattacttaaaggacttggcccaaaacgacaacttcagcatcgatcccaataaacagaatactgagacactgaagagcacgcttggattctttcgcaacacttatgtggagctaatggaaaaatattgctctctgattgaccagattcccgccatgcacttcaatgaaatagcaggctttcagccgaatacgtttctcaagctcaaagtaatgcgacaaaaatttaaagcgcggacacagcttgtccaaaacagtttagataagaaagaaagtcagctaaaagcggaacaggaagcccttgagaaggaggaaatagaaatgcaggcggaacaggctcagcagactgttttatcatcatcttcaccagagaaaagtcgcccgataatgcccctgccaaaagttcaagaaatcaaggatgaaaaaatacccaatcggaatcagcttatacacgacctttgcggagagccagacaatttctctccacccagctcgccgcgcgatacgcaacttattccgaaacgccagcagctcatcaacgacctttgcggggagccggatgacttctcaccaccgagcaaacaaaatgatccgcacctgctgcgaaagtgcgaagaacttgtccatgacctttgcgaggaaccggacgactacttagcacagagcatgatgctagacggcgacttggaggaggaacaactgaacggacccacgcaggggacgacaaccagcggaatggatgatgacgaagatgacttggagggattgctggcggaaatcgaggacgagcatcagaagatgcagggccgcaggtcagagttcaatggttacagctataaggagttggaagctgtcaaagtaaaggagaagcacaaggagaccccgataaatatttccttggatgatgatggatttcccgagtacgatgaggctatgtttgaacaaatgcattcccaggctgctgccaataaaagcagagtgagcagtgccggcccaagcaccagtaagagcgttgtgcctaccaagcaaaccagtgccctgcactcccaaaagctgtcagggaatttccatgcgaacgtgcacaatgacggcatcaccggggagttcgatggtcaaaagtttgagcactccacccgcctcatgcacggactgagctacagctttggtctaaaaagtttccgtcccaatcagctgcaggtgatcaacgccacgcttctgggcaatgactgcttcgtcctgatgccaactggtggaggaaagtcgttgtgctatcagctgcctgccattctgaccgagggagtgaccattgttatcagtccgctgaagtcgctgatctttgatcaaatcaataaactggcttccctagatatctgtgcaaagagtctgagcggagaacaaaaaatggccgatgtcatggccatctacagggatttggagtctcagccacctatggtcaaattgctctacgtgacacctgagaaaattagcagttctgctcgcttccaggacactctggacacgcttaattccaacaactatataagtagattcgttatagacgaggcccattgcgtttcccagtggggtcatgactttagaccggactacaaaaagcttggagtactaaagaagcgttttccaaatgtgcctactattgcgttaacagctacagccacgccccgcgtccgcttggatattctggcccaactaaatctgaagaactgcaagtggttcctctccagttttaatcgcagcaacctacggtacagggtactgcccaaaaagggcgtctcgacgttggacgacattagcaggtacatccgcagcaaaccgcagcacttcagtggcataatctactgcctgtcgcgcaaggagtgcgatgagacgtcaaagaaaatgtgcaaggatggcgtccgggcggtatcctatcatgctggtctcacggacactgaccgtgagagtcggcaaaaggattggctgaccggaaagatgagggtaatctgtgccaccgtcgccttcggcatgggcatcgacaagccagatgtccgatttgttttgcactactcactgcccaagtccattgagggttattaccaagaggcaggtcgcgcgggccgagacggtgacgtggctgattgcatcttgtactacaactattcggacatgctcagaatcaagaaaatgctggactccgacaaagctcttcagtacaatgtgaagaagatacatgtagacaatttatatcgcattgttgggtactgtgaaaatctcacagattgccgacgtgcccagcagttggactattttggggagcactttaccagcgaacaatgtctggagaatagagagacagcttgcgataattgcattaacaaacgagcctataaggcggtagatgcattggagcatgctcgtaaggctgcacgagcagtcaaggatctgtgcagcggtagatcccgtttcacactattgcatattgccgacgtactgaaaggttcgaagatcaagaaaatcattgactttaaccatcacaaaacgccacaccatggcgtcctgaaagactgggacaagaacgatgtacacaggctgctgcgcaaaatggtcatcgatggtttccttagggaagaccttatatttacgaacgattttccacaggcctatttgtatctgggcaacaacatcagtaaactaatggagggcacgcccaacttcgagtttgcagtgaccaaaaatgccaaggaagccaaggcggcagttggcagcgtttccgatggtgcaacgagcagtaccgctgatggacagtcgggaatgcgggagattcacgagcgttgctatacagatctattggatctatgtcgaaccattgccagccagcgaaacgttaccatggctagtatcatgaacattcaggccctgaagagcatggccgaaacactaccaatcaccgagaaggacatgtgcagcattccgcacgtgaccaaggcgaactttgataaatacggcgccaagctgctcgaaatcactagcaactatgcatcggagaagctgctgatgcaagccgtcctggacgaagaggaggaacaggcggccgccaagcagaggcccagtacatccggctggaataacgaaagcgtggactgggacatggcggttgcctcacagggcaatgcaaacacgagcggtgccagcggtttcaactcgtttagagcgggcaaaagaaaaaagatatacaagtcaggggccagcaagaggtacaaaacgagtactacatcgccagcggccaggaagacaacatcagccaggggtcgcggtggtagggctggcgccaaacgagcggagagttcagcttcgtcagcgtcgggctggaagtccaagaaaacagggaatagctttggcttcgatttaatgccactgccaggatcaaaataatttaatatgctttgacgttttgcctaagaaactacagtttttggatgttatagcgtatgaatgtaacataagctaaaagatttttgaaataagttgttaaaaaatttcaaatttctgtatgagcaatgtgctcagtttattaatgtttgtccgcttatgttccttattgtaaattaacaccttaaatttcagttaatagaattaagtacttatcactaaaaatttttacataaactttcatttcgttaaacaataatagcactatagatgcaacccccgcaaaaaaacaaaaacaatcagatgcagctgtggtcaacactgtacactggtgtaatctaagcctttcattagtactcagaaccatccattatcatctatgtcttggcggcttgtcgcaccttatcctcaaattcgtaggcacccatagaccagatcaggttggcgtccgtctccacctggacgaactcggtcgcataggtgtttgaggtgcttaccataccaccaaactccagctgtgcatgatctagaaatgaaagcattactgacagattcgtgaaatcagtattattttggtgtacgaacataggttccatttgagtcccgtggt

SEQ ID NO: 15168 - protein, 1487 aa, DROSOPHILA
MSKKPVAQRKQLTLSSFIGLDGNSQSQPKSRAASVRSKPPAVYNPIFLDASSSDDETTEISSQSNNGTIATKKSSRDPRTAKLKKHTYLDLSVSPLAKLSAKKYARDSPKKPTSLDLSVSPLAELLAKKSDRDSPKKPVQNENSYTYRGLSESPVENKSIGDTLRKPPQKERKTSIVWLSDSPEKKVTQNERKILDSPLQRFSFEDFPNKENGNRHHLLTLPDSPPPPQPVKKPEKTMWQNETKTIQDKDSPANPLVSNNLASISTLLDSSRAPNTYKGSSRNLFEDSPEKSGSGEQGYKLGSAKENEIPTKPATASLERNSVTSSPSPAAPLKPRYSVAFDNSLADYLKDLAQNDNFSIDPNKQNTETLKSTLGFFRNTYVELMEKYCSLIDQIPAMHFNEIAGFQPNTFLKLKVMRQKFKARTQLVQNSLDKKESQLKAEQEALEKEEIEMQAEQAQQTVLSSSSPEKSRPIMPLPKVQEIKDEKIPNRNQLIHDLCGEPDNFSPPSSPRDTQLIPKRQQLINDLCGEPDDFSPPSKQNDPHLLRKCEELVHDLCEEPDDYLAQSMMLDGDLEEEQLNGPTQGTTTSGMDDDEDDLEGLLAEIEDEHQKMQGRRSEFNGYSYKELEAVKVKEKHKETPINISLDDDGFPEYDEAMFEQMHSQAAANKSRVSSAGPSTSKSVVPTKQTSALHSQKLSGNFHANVHNDGITGEFDGQKFEHSTRLMHGLSYSFGLKSFRPNQLQVINATLLGNDCFVLMPTGGGKSLCYQLPAILTEGVTIVISPLKSLIFDQINKLASLDICAKSLSGEQKMADVMAIYRDLESQPPMVKLLYVTPEKISSSARFQDTLDTLNSNNYISRFVIDEAHCVSQWGHDFRPDYKKLGVLKKRFPNVPTIALTATATPRVRLDILAQLNLKNCKWFLSSFNRSNLRYRVLPKKGVSTLDDISRYIRSKPQHFSGIIYCLSRKECDETSKKMCKDGVRAVSYHAGLTDTDRESRQKDWLTGKMRVICATVAFGMGIDKPDVRFVLHYSLPKSIEGYYQEAGRAGRDGDVADCILYYNYSDMLRIKKMLDSDKALQYNVKKIHVDNLYRIVGYCENLTDCRRAQQLDYFGEHFTSEQCLENRETACDNCINKRAYKAVDALEHARKAARAVKDLCSGRSRFTLLHIADVLKGSKIKKIIDFNHHKTPHHGVLKDWDKNDVHRLLRKMVIDGFLREDLIFTNDFPQAYLYLGNNISKLMEGTPNFEFAVTKNAKEAKAAVGSVSDGATSSTADGQSGMREIHERCYTDLLDLCRTIASQRNVTMASIMNIQALKSMAETLPITEKDMCSIPHVTKANFDKYGAKLLEITSNYASEKLLMQAVLDEEEEQAAAKQRPSTSGWNNESVDWDMAVASQGNANTSGASGFNSFRAGKRKKIYKSGASKRYKTSTTSPAARKTTSARGRGGRAGAKRAESSASSASGWKSKKTGNSFGFDLMPLPGSK

SEQ ID NO: 15169 - DNA, 3696 bp, DROSOPHILA
gtttttctttttcgtttattattatttagttcgttttttttctatctttttccttttccttcctactataagtttgtgaacacgatccaaacgatgtgtggttgtatttgaaactaactttttggagtttggtttgcgtttggatttcggtgatcgctatatggcatattatgatggcaaaaacaaaaaaaaaactatataaatgatatagaaatttgatttatacgatattttcgtggtacacacacacacgcgcgttgtttatgtttgccttgcacttgcacatacaagcaaaaatgcggcgctgttgttgttgctgcttcgaagttctgcttcttttttttgcttaattcctttgccctttttttggcgtagttacacgtgaaaaaaaaaacaaaccagcgcgttcgaatgcgttttttttttgtattttacaattcacgacgaagtttttgtccgtcgtcttttttcccttttttttggggcccgatgttattgttgcgctgtatgcgtgagccgtgtgtgtgtatgtgtggggaaaaaacgaatacgataagaatacgcggtatagttgtgctgctctaacccacaggttggcttggccggtgctccttggcctggcctatcgatatttctatcgatttccgtaatcgaaaacgaggcgggtaatggaatcgttgttgaaaacaagttttttaatttattatttatttaatatttaattgcaagtccgaaagatttattttatcataggttattttatttaaataattgatggtgttttttaggcagccatagaatcatgaactttattttacaacagaataaatataaaatcattttacagaacaaagtgaaacaaacataatacaaaactttcacaataattaaacaaactatgctaaacgatgggtacaaataataaacactttaaattggatacttttcacaatattaaatctactgtgtaatctaataataaaatgaaatggacctttttttaaatacagtagacaaatgtccagaaaaacagattaaagacgagaaaggagagcggaaaaacgaatctggctcgactatcaatccacatggctatttcctggggcgttagcgtggtccagccactcagatcgatctcctcctggtgccccgcgctctccgttcggttattgttggtcaaagtttggctgctgctggcagcactgatcgctccagtggactgggcagagcccatggatccaaaggcactctccacaaagttaacatccatcttctggacgacgcggctggtcctctgctgatccagaacttggccctccttaatcgtggtgatgggcaaattgacggttaggtaattgttgaaaccggcaccgcccagcgagccggtatccgctgtcttatgcagagccgtgcccgaaaaggatctggatctggcgtgactgcgtcgtctgagcagattcggcgatagagttgacttcaggatgtgtttgctgttcagtttcttgacgggcacactcttcttacgacgccaaatcgtgttaacaaaggcgaactccaccatgctgccaaatatgaagatggtgcagcccaggaaccacacctctgacaccttgatgtagctaacctttggcagagtctttccctgtgccgaggccagggtaatgaatgtcagcagggtgctggtgcccagcgtgatgcgcggcggcgcctgatctgcttgcagccagaacgatacccaggatatggccacaatcagcatggagggtagaaagtagtccatcaggtaaaagccaaccactcgcgtcaggtgaacggtgaagctgagggagctgtagttgccggcaaaggctccatgacgcaggtcactcaaatcggcattgattaccgtctcgtttgaccaggaacgctgcagcacaaactcggtgagatgcagtgccccatcgtaggttatcggacgcttctgctcccagtggaggaccagttccgacgtattgtacatccaactctccagcaccgtcgagcagtgctgctcatcgaatgggaacttcttaaggttgagccagcaatagagtgtcgccttgatgcgattcgaaacgatcactgtgccatcgggcgatatcgaggtgaggatgtccttctccgtgagacctaccaattagttgcaatcaagcacgagtctactccagactctaccgtactcacccaaaatactggagtcgcgctcattggctagaaatatgtggggcatccagagcgagtttctcaggtgctcctcgcccaaaatcggctgcctgcgcttgggacttacgttgcgaaagttgagacgcggatcgaggtatcgcatttggaggagcgcatagatcttgaactgtagatcgtgtgcttccaggttctgcatgaagtagatgtaggcgcgcatatagacgtccaccggtagccgctggccagtttccgaataagttatgggtcgttccaaacgatcgtagcggcagccatgggttaagcgatccagcagctgtgtttgcgacaaactgtccccatcgtccaaggtggggcaatcctcgtcgagcgcggaggcgctggcgtagaggcagttgagcagaatcgatatgatgagcgaccactccattatattaaactaagctataaacttaaaaataaagccacgccaataaaatcctaacggttatttcaatatggcggaacagtgctgtcactgttagtactgctaacttagcagacatgttacactacacttcaaatatagacgtacactttagtcattaaaaaaatgcatgcaatttaaacctaccaataaaatatcaaattaaataatacattgatagataatttcttaagtatattgattattgcactttttcaaaatcattgcagtgtatcgtgcgcccaacagcacaatgttaagttggacagcaccaaacgctatgttacgccgaacagctgctggcgaacattatgttagtgggcgcgccaaattcgaaattcgtttccagtcaaacacgaaactccttaacgtctttactcatttaagtttttattgattttattttactgctgcacttgtcataaatatacaatcgggtatatttcaacatttacaaagttacgcaagtttggtttgttctttttttcgtagttttctcttgtagtttaaacatttatttaaatttatgaattcgaattcattgataatatgtatgcatagtttaattctccactcatccattttatgcttattacaattacaaaaaaaaaaaacaattacctagatgtagtttcatatatatatttaaatatatatagttttatgtgtagcatatttatttcgtattaagtacatattttgtaattgttctaagcttgatttacgtataaaatgtgtcttgattaggtatgggtaatgcggattatgtagttgcgttctggagctccctgcttgcacacataaaaaggggaatttctctatttagaaaatgtaatttcgaatggatcgaaaagtgaagtaaagaatcagttgcgaattatagcatatttctttaaattgaaatgcagttgtatgaactattaaaacattaactcttggcgatgatccacccagaagtttgtgtacaaattttaaaattggcgaacaacttaagtgaatacattaggtaaatgtaaattggcaatatcact

SEQ ID NO: 15170 - DNA, 1642 bp, DROSOPHILA
attgaaataaccgttaggattttattggcgtggctttatttttaagtttatagcttagtttaatataatggagtggtcgctcatcatatcgattctgctcaactgcctctacgccagcgcctccgcgctcgacgaggattgccccaccttggacgatggggacagtttgtcgcaaacacagctgctggatcgcttaacccatggctgccgctacgatcgtttggaacgacccataacttattcggaaactggccagcggctaccggtggacgtctatatgcgcgcctacatctacttcatgcagaacctggaagcacacgatctacagttcaagatctatgcgctcctccaaatgcgatacctcgatccgcgtctcaactttcgcaacgtaagtcccaagcgcaggcagccgattttgggcgaggagcacctgagaaactcgctctggatgccccacatatttctagccaatgagcgcgactccagtattttgggtctcacggagaaggacatcctcacctcgatatcgcccgatggcacagtgatcgtttcgaatcgcatcaaggcgacactctattgctggctcaaccttaagaagttcccattcgatgagcagcactgctcgacggtgctggagagttggatgtacaatacgtcggaactggtcctccactgggagcagaagcgtccgataacctacgatggggcactgcatctcaccgagtttgtgctgcagcgttcctggtcaaacgagacggtaatcaatgccgatttgagtgacctgcgtcatggagcctttgccggcaactacagctccctcagcttcaccgttcacctgacgcgagtggttggcttttacctgatggactactttctaccctccatgctgattgtggccatatcctgggtatcgttctggctgcaagcagatcaggcgccgccgcgcatcacgctgggcaccagcaccctgctgacattcattaccctggcctcggcacagggaaagactctgccaaaggttagctacatcaaggtgtcagaggtgtggttcctgggctgcaccatcttcatatttggcagcatggtggagttcgcctttgttaacacgatttggcgtcgtaagaagagtgtgcccgtcaagaaactgaacagcaaacacatcctgaagtcaactctatcgccgaatctgctcagacgacgcagtcacgccagatccagatccttttcgggcacggctctgcataagacagcggataccggctcgctgggcggtgccggtttcaacaattacctaaccgtcaatttgcccatcaccacgattaaggagggccaagttctggatcagcagaggaccagccgcgtcgtccagaagatggatgttaactttgtggagagtgcctttggatccatgggctctgcccagtccactggagcgatcagtgctgccagcagcagccaaactttgaccaacaataaccgaacggagagcgcggggcaccaggaggagatcgatctgagtggctggaccacgctaacgccccaggaaatagccatgtggattgatagtcgagccagattcgtttttccgctctcctttctcgtctttaatctgtttttctggacatttgtctactgtatttaa

SEQ ID NO: 15171 - protein, 524 aa, DROSOPHILA
MEWSLIISILLNCLYASASALDEDCPTLDDGDSLSQTQLLDRLTHGCRYDRLERPITYSETGQRLPVDVYMRAYIYFMQNLEAHDLQFKIYALLQMRYLDPRLNFRNVSPKRRQPILGEEHLRNSLWMPHIFLANERDSSILGLTEKDILTSISPDGTVIVSNRIKATLYCWLNLKKFPFDEQHCSTVLESWMYNTSELVLHWEQKRPITYDGALHLTEFVLQRSWSNETVINADLSDLRHGAFAGNYSSLSFTVHLTRVVGFYLMDYFLPSMLIVAISWVSFWLQADQAPPRITLGTSTLLTFITLASAQGKTLPKVSYIKVSEVWFLGCTIFIFGSMVEFAFVNTIWRRKKSVPVKKLNSKHILKSTLSPNLLRRRSHARSRSFSGTALHKTADTGSLGGAGFNNYLTVNLPITTIKEGQVLDQQRTSRVVQKMDVNFVESAFGSMGSAQSTGAISAASSSQTLTNNNRTESAGHQEEIDLSGWTTLTPQEIAMWIDSRARFVFPLSFLVFNLFFWTFVYCI

SEQ ID NO: 15172 - DNA, 9249 bp, DROSOPHILA
caaaataaatgtatataatttcaaaattgacatttgctaatgataagcctctgcctcatgcccatgcttatgctgaaatatggacaaaattcgggcacagagcaagagatgcgcagagcagctgccatccggaatggaatgagttggaatttgggcagcagatggcgctgtcgcaaaaggaaggaagctaaatttcactgggccccaaccaaacggaaatttccacccacggctcagaaattgaagctgtttatggtaaattaaaccaattgagtgggattacgttttgcgcactacaacaacgccaccaacctccgcatcaactccgcaatctccgacaccccgaagtgtttccaactgggtttcaatttcactgtctggacgagcctgcggctaacgaaatttatatacccatacaatgccatcaaagccacaaggtgtttatgggcttaactccggccctgattccgcctacttggctgcctcgcctcacagatttggatttgcatgtgccacgatttggggcatgcggctgagaaggcggctgagcaggcggatagaagacaaatagccagcacgttgcggttcatttggctgtcacaacaaatgccgaattgatgcaaatgtaaatggattcgatatccaggaacgcgtcgtcggaatcccaagcagcagtcaagtgatgaatacacggcttaaaagatactgtattaacttacagtagcttaccttcaaagcaaaaattgtagatttcattctctagtaacgagttcatatccatacctctttaatattggatactatttattacccagtttattacttagtttttatttcagaatcaaaaacaaatataagcaagcttaccccatttaagtacttggcaattgcaaatgtgcacataccactttcttttccatccacaaactggctttcaaactgctgttggccaactcataaatatggcagacaataaatctagattctttttcaattgcagggtttggcaaacgattggcaataataggagtcatcaaaacgagagcaaatgtcatacagcatgtcgtccttattccgtggcgttagtgcgacatttggagttggaaactaggagcccacttagactaacaacgcccgtgaccattaccatgacgctactgcagaggcttcaggccatgtcggccaccacgaccaggacaatactggagggcagcatcagcagttttggtggcgggacaaatgagcctctggcgagcaaaatacccgttctggaggagtcagcctcacatgccagatatttgaaattcattgccgacgggctcatcgacgagggactgggcagtgcggtgggcagtgggagcagcatcgccgtatccgttgaagacgtggtcgccggacaggcgcaggacatccaggcgagcgaaggatccaccgacgacgccgacggcagtagccatttggcattagtcttcgtcaagtgtttcattattggtttcatcatactggccgccatcctgggcaacatgctggtgattgtgtcggtcatgcggcaccggaaattgcggtgagtccttgccattgtgcgttctagccatatccgttggtcaggacatgtgtgtcctcaaatgtctgggtttcattaatttgtcgccatgaatcaggtggcttttttccctttttgcgccatggtttcaatttcattgtgtgcatttggcaggaagcttccaactataagttacttagataataatttaacaaagcatgaacttcaacatcaaaacattagtgagcaaatattaaaagagcccttactttcgcttttgtttaaggtaaattgcccgagctgtaacctgccacattgtccacgaatcgtgggtgttttagctgtcaaggacatgacttgtacaccccaccccccccgcccctttttccttttatttctttgtttgctcctttttgccgaacgattttgtgcgatttgaccgcgttcggcttaacgagtagctacctcctttttttgcggccattaatttgtcatcatttatcatattttccatcatttttgcgtgtcaagcgcacagaactcatctcgttcgcccaccgaacacttcagaggggggcgtggttggttgactaagttaaatgctagatacgtgcgtaattacattagaaatgttaataaggggcgagcataaaaatattgttgcctacttacgggggcgccattggcatttactttatgtgcggccatataatttgtcaaatttatgaattgggcgccaccttcacatgagatatggccacgtgggcgtttgagggatttccaggtatccaggtagcaaagtacgtacgtgtttcagtcgcaaattcaaaagcccaacaccgctggcatttaaagaacccaacataaaacacttggagagaggcgacaatggtgtaacctaaccccgggacattcaatgtcaaggcgcagactattaaagcagccccgggaaaacgtcttccactgtcattgccgtattcctttcgccttggaaccaaccaacgcacacctgacatttgtggctgccaccgagaatgaggatgggcatggtgatgagcatgggggatgaggctcatttagcctgccagggacaggcaatttgggacctgaccctgactactacgtgtatgccatgttgccgtttttatctcaactgccttgcgccagcatctctttcattattgttgggctcattgtcatgtgcgttttccgcaccattttcaccttttccgcctcgctaggcagtttaaatcatcacggcaaattagacttaattacgaaacaacatgcattcccacttaggtcccatgctacctaaaaaccttgtgaccaagcggagtagcaggtatctatttcaatgttctggataagccatctgggcgacagttgtgcgactttttcacgactggccactcaacttacattattcatgtcacacgcatcgataaagtgggtgacaaattaaagtcagactgcagatcaagtacgaggaagagccgggaaagtgtttcctcacttttcctattaattagagctttccacgttggctgcctgccgaaagtgtcgactcataattgtaatcaaacttgacacccaacaagtttcctcctttcattcccgagcacccactatataatcggcttttgggtaacgcctcaataacattttcgtgttgcctctgatgcgggtgttttgcctttgtactttttgggcgctttaagcttgctccaaaaatgtagacctttcggggcgtcagtttgtggccgtaattaggtttgcgggagatggtttaatgtcccagtgaaatatggcaaaatggcgagcgattgttaacgagtttaatagataaaggtcggatacacataaaaagaatatccatgattgatgcagtttaagaagttcccatccaaagttccttcattcaaaagtttatctggcacattaatccgtttagacggaaagcaaaactttcatttgcgatgttgtggtacgaagagtcaagttcccgcagatgttatggttttaaacatgaattccaaccgcccattcggttgcggttatatccgtggaatggcgttatgtacgcctgattgtttggaaatcagtgcggacggccgataaacgcatttgctgctccacatagcgtatacgccgcgtgcacctaattgacttaacgttttgcggtgccacgcaacgttgatgatcgctggtggaagttgcggtggcgttaagctaattattaattaacccattaaacaatgaaatccactcagagaagcgccttttcgtacatgaaacggcggtcacacgcggcgtatgcgcaatgtgcgcaccaaagtttccaactcaagttggacagcaatccgaagtaacgattagcgctgcgagctctgagtgacttgaaagcttaatgcacaaatttaatttgagaacttggcactctcaataccactggcactcaggctttaggttcattctgccatttttggttgactgtgtggcttccgccttggttcctgctaagttttaacctagcatttactcctcctccttgcagcatcattaccaactactttgtggtctctctggccgtcgccgacatgctggtggccctctgtgcgatgacatttaatgcttccgtcatgatctcgggcaagtggatgtttggttccgtgatgtgcgacatgtggaacagcttcgacgtctacttctccaccgccagcatcatgcacctctgttgcatatcggtcgacaggtgagtcccgggtttactttgtcattgtggaataattgaagttccgagtgctactgggatgtcttttataccttcctttaaatgcccatcaaattgaatagttgcttgacagtttctagtgacaatcttttttcccctttacccgtagatactacgccattgtgcagccactggactatccactaatcatgacacagcgacgcgtgttcatcatgctattgatggtgtggctatcgccggcgctcctctcgttcctgcccatctgctcgggatggtacacaacgaccgagaactacaagtatctcaaatcgaatccgcatgtgagtagcttacttgaagcccttaattgggacaattaaatatttgtacaatagtgtataactctattatggagcccacagatttgatgagtaggtcgatccggtgtatgcacctacattatttattcaattttcttgcacatcaaactaatagaaaattctaatttagttgaaacggtatcgactttgcatgcattttgcatgccttcgatgccacgtgggcgtccatgtggcagtggcaacctttgacttttcccccgacccgcctcaacggaaattgatttatgtttgtgtggctgaagcagttttacgcctttcaggctgccagccgacaggtagcatatttattactccattttattggtttcctccgcaaatacttggcaaactccttggcagcacctcctccatctacaaatatatacatttatatatatatatatatatatatgttctctgcccgtcagcagctgctggtactgattccccccgccactgcggttatcattgcgcaataaaatgctgatgtagaaataaatgtaggtaattccattccggttttctgcgctcccattcaggctgacttcagcataggctgtgcataattttcggctctacacctggaaggacgcctgaaacgcctgacaggcctttgcatacattagcatccgcggtgggctttaattagttttacttgtttatgctaataactgtcagcgcgaagccggcagaatgtcctggccgtaaatctgattagatgtcttctggtggccttttgtcatggcagcgctgtaatgcacagcgtaattgagtttttattgtcgcacttggcattgcagtaatcgcattgccattgcaattgccgtcgcaatagccgttgctcatacgcaacgttggccgccgccagccgcagttggcaattgccgagcattacgctccattacggttcgccactggcatccgactgcactgctccaacgttcattttgatttattgatagtcgctaattgagttgcccatcaaatcgcaacgatttcgattccgatttcgatgctcccctcactccatatttcagatatgcgagttcaaagtgaacaaggcatacgccatagtcagctcgtcgatgagcttctggattcccggcatcgtaatgctgtcgatgtactaccgcatttaccaggaggccgaccgacaggagcgtctggtgtacaggtaatagctattcgagtggcccctccatttgcccgcttccaattaactctaattacttactgtgtgcgcccagatccaaggtggccgctctgctgctggagaagcatctgcaaattagccaaattcccaagccccggccgagcattcaggtggagcagtcgaccatctcgacgatgcggcgtgagcggaaggccgcccgcaccctgggcatcatcatgagcgccttcctcatctgctggctgccgttcttcctctggtgcgtatacttgatggctcaaattgggcaattatcgctagcactctaaggatcaagtgccgagaagtttttaattaactcgggctcatatcaaataatttgcactttccatgctacaggtgggcggaaagtgtgtataaacaattaacaatacaagtatgtttccttgggattgaaatataagaaaggcaatgtagacttaagcagtagttattatgcactattcaagtatctattccacctacttaaaagtaaagaatctaacactttccctttctccaattaaaccgcaggtacatcgtatcctcgctgtgcgatagttgcatcactccgcgcctgctcgttggcatcctgttttggatcggctacttcaactcggccctgaaccccattatttatgcatacttcaaccgcgacttcagggccgccttcaagaagaccctcaaggtgagttgcgggctggccatcgagtaatttgcatataccttccacttcgacatcttgatgggacttttattctattcaatttcgctttgttcgggcatccaaaactgaattctctgcaccaccttagacttagtacagggcttcggcaactgctgcaatcgcaaaggacagggccaacgccacccattgcacagaagcggcggcggccaccatttcgacaacagtatcgactggcaacgcggaggcgccaccaccagcgccccaccgacgaggctcacgtttagcaattattttggtagctattgcatagcatcacgggtgcactgagaaaaaacatgaacaatttatcaaatatattaagtaacttggagtaacttagttccagttacacgactaacaaataagaaaaaagatatggaaaaaagaacattgtctcctcattttttctcagtgcagctcagtgttccgcggagagcgtagatagcgtagcgttcatattagttgattgaaatgcttcttcatccacatctactggttgctaagcaaacaaaatagcttttcctctgcctgaagaactgaaaactctgcacgttctttgctctacagctctacagctctgcctgcgcctgcctctgtctctctatcagtttcattctcgagggtatctttcgggcatggtgaatgggacagtgaatgggggttgcaatgcttgggctttctaatcgcttgaacactctgcttgccacttaccatcgtatactaccatttgccatatatagtgccatataccatatatcatttctctttgcacgcatagctggcgcttactgtgctgattcgttgcctatggcccaacaaaagctaagcccgccaaagtatgcaacagcaaaacagaaagcataaaacgtaatatttaaattaaaacggaacctcttctttgtatgtatgcccagctacaaccagctacacctacaccttctccacattcatacaagcgtaaatgctgatgatgaaatgttattctttctctaaaaattctcccttttatgctgcacacttcgacacaccagcaacaccaacaccaacacacacacacacactgaggcacatggacgggtccttgttcgtcccttttttttatatgaatgcgcggcctttcatttcgtttagcattttttgtgtgagtctgttgtttgttttttgtttctttccctttagcctttgttttctgtgtgaaaccaaattgtcacagacatgtgccgccagcacccgaaaaaaaaaaacaccatacccctgtcgattgtgtcgcccgtcccacgcggcgtatgcttaacctttgagtgctgtacagtagcgagctaactctattaaattacatagcgtactctaacggtagcatgcgagtttatctcatctactcatagttgggtgtcctcttcattccacagagtctgtttccctacgctttctacttctgtcgacgtggcagggggcgagacgatgaccgggatctggagttcggcggtcccagccgacggggaaccaatggagcccaacggaccggatccggatccgccgagatggccaactgcgtcaactccacggcctcgtcggagatacacatgagcgtgatgcgtgcccgccagtatgccgtcaatgtcacacccaccacggacgcccagatgcagcagctgcatcccctgtacaccaactaaacgaaaaacacatatggcgtatacttgatttcaactccagtgcttcacaatgtctgttcatgagatgagtgcgcagtgcacagcaagtgttctccagaaaaccagattgccagcttacaaatacaaatcactcgataaaaacattcctcaaaatggctgctaagagggctaaacaagaatttaaccacaaataatagctaaagcaacagccacagcaacaatacgacaatcccacagattaaataaagccttcaagagcagcaaattgacgtgcaaaataaattgaaatcttatagaagtatgtatttcgacatacaatacatatttaggtgtcatggagtcaggaatttcataacgagatgtttataaatgcgcatgcaaatagatatatgaatttgaatgtttgatatacgtatataaaaagatagatgttaacccacaaaaaaaaaaataataaaatatgaaatatgcattgattggtaatctaaaacgaatcgcaaattaaagctacactgtgcaacagtggtatgtagtgagaaaaaaagtgtaggttcaaggtctggttgaaagaaaaaaatttttaatctgttcaattatttgaaatattaactttaaatacgatcaaacttatctggtcctttcacattttattcgattagcgaataaagactgacaattttattttatcagtgacttaaaaatgatttaattaaaacattatccacatattcaaagtacttaaccaggccttaaattcactttaactctccaataaacaaagataactaatgttagttgtagcagagtgttcgtattgtttgtaaaactcatactctcagttctgttagatgtaatgacaaagctttgatttgattcgttaaatacattaaaataatctagttcattgaaaaacaatcaaattatatatgtcataatacttacatacataggtattcatattcataaagaatacatatagggcctaaagcgcacgactaac

SEQ ID NO: 15173 - DNA, 1675 bp, DROSOPHILA
ggtttggcaaacgattggcaataataggagtcatcaaaacgagagcaaatgtcatacagcatgtcgtccttattccgtggcgttagtgcgacatttggagttggaaactaggagcccacttagactaacaacgcccgtgaccattaccatgacgctactgcagaggcttcaggccatgtcggccaccacgaccaggacaatactggagggcagcatcagcagttttggtggcgggacaaatgagcctctggcgagcaaaatacccgttctggaggagtcagcctcacatgccagatatttgaaattcattgccgacgggctcatcgacgagggactgggcagtgcggtgggcagtgggagcagcatcgccgtatccgttgaagacgtggtcgccggacaggcgcaggacatccaggcgagcgaaggatccaccgacgacgccgacggcagtagccatttggcattagtcttcgtcaagtgtttcattattggtttcatcatactggccgccatcctgggcaacatgctggtgattgtgtcggtcatgcggcaccggaaattgcgcatcattaccaactactttgtggtctctctggccgtcgccgacatgctggtggccctctgtgcgatgacatttaatgcttccgtcatgatctcgggcaagtggatgtttggttccgtgatgtgcgacatgtggaacagcttcgacgtctacttctccaccgccagcatcatgcacctctgttgcatatcggtcgacagatactacgccattgtgcagccactggactatccactaatcatgacacagcgacgcgtgttcatcatgctattgatggtgtggctatcgccggcgctcctctcgttcctgcccatctgctcgggatggtacacaacgaccgagaactacaagtatctcaaatcgaatccgcatatatgcgagttcaaagtgaacaaggcatacgccatagtcagctcgtcgatgagcttctggattcccggcatcgtaatgctgtcgatgtactaccgcatttaccaggaggccgaccgacaggagcgtctggtgtacagatccaaggtggccgctctgctgctggagaagcatctgcaaattagccaaattcccaagccccggccgagcattcaggtggagcagtcgaccatctcgacgatgcggcgtgagcggaaggccgcccgcaccctgggcatcatcatgagcgccttcctcatctgctggctgccgttcttcctctggtacatcgtatcctcgctgtgcgatagttgcatcactccgcgcctgctcgttggcatcctgttttggatcggctacttcaactcggccctgaaccccattatttatgcatacttcaaccgcgacttcagggccgccttcaagaagaccctcaagagtctgtttccctacgctttctacttctgtcgacgtggcagggggcgagacgatgaccgggatctggagttcggcggtcccagccgacggggaaccaatggagcccaacggaccggatccggatccgccgagatggccaactgcgtcaactccacggcctcgtcggagatacacatgagcgtgatgcgtgcccgccagtatgccgtcaatgtcacacccaccacggacgcccagatgcagcagctgcatcccctgtacaccaactaa

SEQ ID NO: 15174 - protein, 508 aa, DROSOPHILA
MTLLQRLQAMSATTTRTILEGSISSFGGGTNEPLASKIPVLEESASHARYLKFIADGLIDEGLGSAVGSGSSIAVSVEDVVAGQAQDIQASEGSTDDADGSSHLALVFVKCFIIGFIILAAILGNMLVIVSVMRHRKLRIITNYFVVSLAVADMLVALCAMTFNASVMISGKWMFGSVMCDMWNSFDVYFSTASIMHLCCISVDRYYAIVQPLDYPLIMTQRRVFIMLLMVWLSPALLSFLPICSGWYTTTENYKYLKSNPHICEFKVNKAYAIVSSSMSFWIPGIVMLSMYYRIYQEADRQERLVYRSKVAALLLEKHLQISQIPKPRPSIQVEQSTISTMRRERKAARTLGIIMSAFLICWLPFFLWYIVSSLCDSCITPRLLVGILFWIGYFNSALNPIIYAYFNRDFRAAFKKTLKSLFPYAFYFCRRGRGRDDDRDLEFGGPSRRGTNGAQRTGSGSAEMANCVNSTASSEIHMSVMRARQYAVNVTPTTDAQMQQLHPLYTN

SEQ ID NO: 15175 - DNA, 6720 bp, DROSOPHILA
caagagcagctccccaaccactccgtcgctggagcagcagcccgtggaggatgccccaccgattccgggcacggagaccgctccgcaggagaagatgccagcccaggaggaggagaactctgccaacaacaataataacaacaataacaatagcagcagcgtgaccagtagcacaaaaacaggcagccaggattcgccgttgcaggtgttccacaaccctcggtacaaaggactgctcaacgatattcaacagctgctgcgtaacgagagcttcgtcgctgggaccaagaataacctgtgccgcgtctgcctgacctcgttgggatcgccgctgtggtacgacgaacacttcggcgaggatctgatcaagtttctcacactgctgatggccagtgtgcggaactgcaactccgtgtgcctgatcacgatgcccatgcacctgattgccaagtacgatgccagcctagtgcccaagatccgccaactggtggactatgccatcgaactggagtcgtttgccggttcggagcgtgaaacgcacccagccttcaaggagtacagtggcctgctccatttgcacaagatgtcggccatcaatacgctggccgtgcacatgccggaaaccccggacttggccttcaagttgcgccgcaagaagttcatcatcgaaaagttccatctgcccccggagctgcaggagtcatctgccaagccggacaattgcatctctggtctactgagcaattccaatgccacagcctcgctggatttctagctgtcagcggaattagaaactaagtgcgcgtatgtaaccacgaaacaactaaattgcataataataagccaagtaaatgcattaatatatcagccctgattttgtaccattttgaaaacaaaccgctcttctcgtcttatcgtttatcgattgccctgcattgcgctcagctgttcggtttggtcatcggtttgtgtttggcaacgggacgcctaaaatgtaaacatgtcggatttccatcgtatttttggggatttaagggtgtactacgagccgaatgtgcagtgggtggatgtggaggagtggctgtacggcgaggaggccgagggcagtgtgctgcagcagcgggcggagaagttctggactatggccatgtgcctgcaggatggtggccaccaggagacgcagctgcagttgctccgggacttatccgccatcatacgagccatgagagacgagaaccaggccagctatagcaacacccacgacaattggtccaacttaattggattttctccagcgcttggctacctgacgtatatatactcgcttgtgagcctggtggttttgcccgagcatgtgcagcaggctgctccgcagcagctgaatgagaacatcaatatgcagctagccctcaatgcggctacaacctacctgctcactttgaccattcctggtgccaaaatctttggcgtcttcgacgaggatgtgatcgaacaggttctcaaggtcttccgtcttctggagatgaacaataacaaaagcttacgcgctagcatgatctggatgttcttcctgacgatctgcgatgacctgaagatcgtctttcgctacgtgcacttcaaggagcacctgaaaacgcgcgacaggatcattcgttgtctgctggaggtgctctacatgaactttaaaatgggatatcaaaatacatgtaagtgtaacccattatgttatacttatttagtaactttaaatttaagaacaaacgaaggcgaaatttcgagattattgctaacaagtttttggcgccaaaactatttgtttgacaagtagttacctattgcataatcaaccgtggtagtgtcttgttcaaataatattttaacaatgtttagccagtttgtttatagtttagcttatttgcaagaattgtattttttgagaaattccgctgccgatgacaaacttctttgcctatcgattgtctgtgattacttgcgaacagctgatttagctaggtgtgtacacactgccgcacacttaacgaactgaagattatacaaacaagtgctaaaataaatgaaatcctaaggcaaagttaacgttaattggatcaaataaagatctaacgatgatgcgcagcctttgtgccctccgtggacaatgccagcaactgttcaggagctccatccgccctcaaaactcagtccataagtcacaacaattttggcgcatgaaatcgacggattctccggaggatgccgcccgtaaattgcgtgcgaaatccacactctactacataaccgccggcggtgtgctgattgtgggcctgagctatgctgctgtgccgctgtacagcatcttctgccaggcctacagttacggagggaccaccacgcaggggcacgatgccgaaaaggtggagcacatgaaaaagatcgaggatcgggtgctgaagatccgtttcaacgccgacattggatcctcgatgcgctggaacttcaagccgcagcagtacgagatcaaagtagctcctggcgagactgctctggccttttacacggcgcgaaatcccacggataagccggtaattggcatcagcacgtacaatgtgattcccttcgaggcgggcgcgtatttcaacaaaatccaatgcttttgcttcgaggaacagcaactgaatccacacgaggaggtggacatgcccgtcttcttctacatcgatcccgaaataacggcagatccggcgctggagacctgtgacaccatcaccctttcgtacaccttcttcgaggccaaggagggtctgaaactgaacttccccagctatgcaaaacctcatgcggcaagtgcgtgaagggaaagtgcttaggtctttgttttaaaacaataaatatttgttatgccaagtagaaaatattccagtcattctgtatgctagttcttcttcattaagctgtatgaaatgttctgccttgaaagtttgtaaagaaatgtttttaaacttattaatcaaatgaaaggatctttaagaaactatggagctaaactatggatttccgactgaaattcatttaaatccattaaaatcgataacaaacgataacagcacagtttgagaggcgccgcagctgatgcagtttgagcggcactccatctggagctggaaaagaaggaggcagtttattaatagataacgccgaatctgattctccggcgcatttcaaacgaaccggacgcttccgctccgccagattgtgtactgtgacccctttgaacccggcgttgcgtttaatcgatgacgtggagatgaacaaacaagttatattcggcctgctcctcgcttgcattttggtgtgcatttcaggacaggatgaggaggattaccaggagtcgccaacggtactgattgccctgctggtgcggaacaaagcccacatactgcccatgttcctcagctacctggagcagcaggactatccaaaggaaagaatagcaatttggttagtaaagtgaactcatttagatatggaattgaaaattgcaaatcttacctctggtttggaaatatctcaggttgcgctgtgatcacagcaacgatgacagcatagagctattgcggcagtggctggacaactcgggggatctttatcacagcgtaagctacgaatttaagccggaggagcagagctttgtcaacgggacttcaccgtacgagtggcccgcatcgcgtttcaagcacctaatcgccctgaaagaggaggcctttcagtatggtcgcgatatttgggctgactacgtgtttttcctggacgccgatgtcttgctaacttcaaaagattcgctaaaagtcctcacccgactccaattaccaattgtggctcccatgctgatctcggagagcttatactcgaatttctggtgtggcatgacggaggactactactacagacgcaccgatgagtacaaggaaatctatcatgtgaaaaagcaaggcagcttcccagtgccaatggtccacacagccgttttggtgaacatgaaccatcgagcggttaggaatctcaccttcgataggaacaagctggtggaattgcagaaatcccgacagcaagagccactgtacgatggaccagccgatgacatcattgtgttcgccatatcggccaacagttcaggcattcccttgcacatttgcaacgacataacctttggttatatactgcagccattggaaccaggcgataccttggaccacgacgtacaacagctggtgaacctcaagagcattatggtcaatgaactcggcgcagtgccgccactgctggactactacaagcatttggagaagaaaccggagaagagcaaactctccttggaccgcatatttatgattaatctaaaaagacgacccgagcggcgagagaaaatggaaaggctgttcgacgagatcggaatagaggcggagcacttcccggccgttgatggcaaagaactgagcacggaaaggctgctggagatgggcgtacgatttctgcccggctacgaggatccctatcatcatcgggcgatgacaatgggcgagattggctgctttctgagccactacaacatctgggtgatgatggtgcgcaagcaactgaaggaggtgctcattctggaggacgatatacgtttcgagccgtatttccgacagaacgcagtcagaattctcaaccaggccaggaatgccgcacagtacgacctgatttactttggccgcaaacgtttgaaggaggaaagcgagccggctgtggagaatgcggataatctggtgcacgctggctactcgtactggacactgggctacgttatatccctgcagggtgcactgaaactgctggccgccaagccgctggacaagctcataccggtcgatgagtttctgccgctgatgttcgatcgtcatccgaacaaaacgtggacggaagcctttcccaagcgtaatcttgttgccttcagcgcctcgccgcttctgctgtatcccatttactatactggtgaatctggttatatatccgacaccgaggactcgcaacaaatcagcgtggagacgagcgaggagggcgaggccaggctaaagagcgatcgagagcaggttttcgaccatgagcaggaattcaagctcaatccggaactcaagctgggcgagagcttgtccaagagccaccaggaactgtagatttctaccgaacaaaaaccatgccaaatttttgactagactaagttagtactagcctaacaactgccaaatgtgcctttaatccaaatccaccaaaaatatgaaacaacgattgctagtttaagttaatgttttgattagccgacctaatattttgtgcaattctttcgaacttttaaactcgccaaaaatgttcctaaatgaaaaaagtttgttatctaaaagataacacaagtagtagtaatctatgttataaagtaatatactttgtaacttcaatttaaacaaccagttttggtacgaaaagcaatatatcttttggaatacacgtacgcacctcaaaactgtagatcagtggaatcagtagttgcacaagttattggccaaaagcaaacgatagactaatatttcagcaacatgccattgtcgtagccattaagtaggttctaaacgttatataaactctctgactttattccgctcacaagtgatgtgcaaacagtaaacacttaaaatttaatttccatttccccatttattgtccctgttctactgacccatcgctccgcgcatgaacagattcttgacgggcggcaagttctgggtcagctgcagacccaagctgcgcagcaagaccaccggactgaactgcgtggcgtagagcgtgtgcagtccatgcacgcccagcataatgggcacgttcttcgccagacacttgcgctcgtatttgatgagatgctgcttgtcgccgagcttgaaaccggcgtatgcaccggcggccagcgattccaccagataccgcacatcgctgaagcccagattgacgccctggccggcgagcggatgcactcgatgggcggcatcaccgaccagagctgctccattgcacacgtacgacgaggcgtgcaggaaacccaatggaaacgtggcacgcgacttgtccagcacgccgcacacccgtggcggatattgcacctggtgctggctgccgttgtgtccaaacaaggagttcagcgcctggacagccttgtctgcgagctcaacgcgcggatactgccggcagaaggcttcgttgagggcgtctacgaattctgtgggtggtagggcttgcagcattttcgcttgctcgttggtggtgctccagaccagggagctcagcctgtccgttagtggtagcagtgccactggtccattgggcagaaacctctgccacgccacggaattatcacaggcatcttcgccgagttccagcgtagccaccaggcccatgcggtcgtagttcagggaaaatacatccacgttcatctcctttctgaccacggaattggcgccatccgctccgatcagcaaatcgcaggaaaagttgcgtccatcctctagctgcagctcggagtgattggagttggagtccctgggcaggcgaacgcactggattctggccttgttgaggatctccacattgggtgattccttggccagcgcatagaccgcatccaggatcaaa

SEQ ID NO: 15176 - DNA, 3891 bp, DROSOPHILA
atgtcggatttccatcgtatttttggggatttaagggtgtactacgagccgaatgtgcagtgggtggatgtggaggagtggctgtacggcgaggaggccgagggcagtgtgctgcagcagcgggcggagaagttctggactatggccatgtgcctgcaggatggtggccaccaggagacgcagctgcagttgctccgggacttatccgccatcatacgagccatgagagacgagaaccaggccagctatagcaacacccacgacaattggtccaacttaattggattttctccagcgcttggctacctgacgtatatatactcgcttgtgagcctggtggttttgcccgagcatgtgcagcaggctgctccgcagcagctgaatgagaacatcaatatgcagctagccctcaatgcggctacaacctacctgctcactttgaccattcctggtgccaaaatctttggcgtcttcgacgaggatgtgatcgaacaggttctcaaggtcttccgtcttctggagatgaacaataacaaaagcttacgcgctagcatgatctggatgttcttcctgacgatctgcgatgacctgaagatcgtctttcgctacgtgcacttcaaggagcacctgaaaacgcgcgacaggatcattcgttgtctgctggaggtgctctacatgaactttaaaatgggatatcaaaatacatatctaacgatgatgcgcagcctttgtgccctccgtggacaatgccagcaactgttcaggagctccatccgccctcaaaactcagtccataagtcacaacaattttggcgcatgaaatcgacggattctccggaggatgccgcccgtaaattgcgtgcgaaatccacactctactacataaccgccggcggtgtgctgattgtgggcctgagctatgctgctgtgccgctgtacagcatcttctgccaggcctacagttacggagggaccaccacgcaggggcacgatgccgaaaaggtggagcacatgaaaaagatcgaggatcgggtgctgaagatccgtttcaacgccgacattggatcctcgatgcgctggaacttcaagccgcagcagtacgagatcaaagtagctcctggcgagactgctctggccttttacacggcgcgaaatcccacggataagccggtaattggcatcagcacgtacaatgtgattcccttcgaggcgggcgcgtatttcaacaaaatccaatgcttttgcttcgaggaacagcaactgaatccacacgaggaggtggacatgcccgtcttcttctacatcgatcccgaaataacggcagatccggcgctggagacctgtgacaccatcaccctttcgtacaccttcttcgaggccaaggagggtctgaaactgaacttccccagctatgcaaaacctcatgcggcaaataacgccgaatctgattctccggcgcatttcaaacgaaccggacgcttccgctccgccagattgtgtactgtgacccctttgaacccggcgttgcgtttaatcgatgacgtggagatgaacaaacaagttatattcggcctgctcctcgcttgcattttggtgtgcatttcaggacaggatgaggaggattaccaggagtcgccaacggtactgattgccctgctggtgcggaacaaagcccacatactgcccatgttcctcagctacctggagcagcaggactatccaaaggaaagaatagcaatttggttgcgctgtgatcacagcaacgatgacagcatagagctattgcggcagtggctggacaactcgggggatctttatcacagcgtaagctacgaatttaagccggaggagcagagctttgtcaacgggacttcaccgtacgagtggcccgcatcgcgtttcaagcacctaatcgccctgaaagaggaggcctttcagtatggtcgcgatatttgggctgactacgtgtttttcctggacgccgatgtcttgctaacttcaaaagattcgctaaaagtcctcacccgactccaattaccaattgtggctcccatgctgatctcggagagcttatactcgaatttctggtgtggcatgacggaggactactactacagacgcaccgatgagtacaaggaaatctatcatgtgaaaaagcaaggcagcttcccagtgccaatggtccacacagccgttttggtgaacatgaaccatcgagcggttaggaatctcaccttcgataggaacaagctggtggaattgcagaaatcccgacagcaagagccactgtacgatggaccagccgatgacatcattgtgttcgccatatcggccaacagttcaggcattcccttgcacatttgcaacgacataacctttggttatatactgcagccattggaaccaggcgataccttggaccacgacgtacaacagctggtgaacctcaagagcattatggtcaatgaactcggcgcagtgccgccactgctggactactacaagcatttggagaagaaaccggagaagagcaaactctccttggaccgcatatttatgattaatctaaaaagacgacccgagcggcgagagaaaatggaaaggctgttcgacgagatcggaatagaggcggagcacttcccggccgttgatggcaaagaactgagcacggaaaggctgctggagatgggcgtacgatttctgcccggctacgaggatccctatcatcatcgggcgatgacaatgggcgagattggctgctttctgagccactacaacatctgggtgatgatggtgcgcaagcaactgaaggaggtgctcattctggaggacgatatacgtttcgagccgtatttccgacagaacgcagtcagaattctcaaccaggccaggaatgccgcacagtacgacctgatttactttggccgcaaacgtttgaaggaggaaagcgagccggctgtggagaatgcggataatctggtgcacgctggctactcgtactggacactgggctacgttatatccctgcagggtgcactgaaactgctggccgccaagccgctggacaagctcataccggtcgatgagtttctgccgctgatgttcgatcgtcatccgaacaaaacgtggacggaagcctttcccaagcgtaatcttgttgccttcagcgcctcgccgcttctgctgtatcccatttactatactggtgaatctggttatatatccgacaccgaggactcgcaacaaatcagcgtggagacgagcgaggagggcgaggccaggctaaagagcgatcgagagcaggttttcgaccatgagcaggaattcaagctcaatccggaactcaagctgggcgagagcttgtccaagagccaccaggaactgtagatttctaccgaacaaaaaccatgccaaatttttgactagactaagttagtactagcctaacaactgccaaatgtgcctttaatccaaatccaccaaaaatatgaaacaacgattgctagtttaagttaatgttttgattagccgacctaatattttgtgcaattctttcgaacttttaaactcgccaaaaatgttcctaaatgaaaaaagtttgttatctaaaagataacacaagtagtagtaatctatgttataaagtaatatactttgtaacttcaatttaaacaaccagttttggtacgaaaagcaatatatcttttggaatacacgtacgcacctcaaaactgtagatcagtggaatcagtagttgcacaagttattggccaaaagcaaacgatagactaatatttcagcaacatgccattgtcgtagccattaagtaggttctaaacgttatataaactctctgactttattccgctcacaagtgatgtgcaaacagta

SEQ ID NO: 15177 - protein, 1128 aa, DROSOPHILA
MSDFHRIFGDLRVYYEPNVQWVDVEEWLYGEEAEGSVLQQRAEKFWTMAMCLQDGGHQETQLQLLRDLSAIIRAMRDENQASYSNTHDNWSNLIGFSPALGYLTYIYSLVSLVVLPEHVQQAAPQQLNENINMQLALNAATTYLLTLTIPGAKIFGVFDEDVIEQVLKVFRLLEMNNNKSLRASMIWMFFLTICDDLKIVFRYVHFKEHLKTRDRIIRCLLEVLYMNFKMGYQNTYLTMMRSLCALRGQCQQLFRSSIRPQNSVHKSQQFWRMKSTDSPEDAARKLRAKSTLYYITAGGVLIVGLSYAAVPLYSIFCQAYSYGGTTTQGHDAEKVEHMKKIEDRVLKIRFNADIGSSMRWNFKPQQYEIKVAPGETALAFYTARNPTDKPVIGISTYNVIPFEAGAYFNKIQCFCFEEQQLNPHEEVDMPVFFYIDPEITADPALETCDTITLSYTFFEAKEGLKLNFPSYAKPHAANNAESDSPAHFKRTGRFRSARLCTVTPLNPALRLIDDVEMNKQVIFGLLLACILVCISGQDEEDYQESPTVLIALLVRNKAHILPMFLSYLEQQDYPKERIAIWLRCDHSNDDSIELLRQWLDNSGDLYHSVSYEFKPEEQSFVNGTSPYEWPASRFKHLIALKEEAFQYGRDIWADYVFFLDADVLLTSKDSLKVLTRLQLPIVAPMLISESLYSNFWCGMTEDYYYRRTDEYKEIYHVKKQGSFPVPMVHTAVLVNMNHRAVRNLTFDRNKLVELQKSRQQEPLYDGPADDIIVFAISANSSGIPLHICNDITFGYILQPLEPGDTLDHDVQQLVNLKSIMVNELGAVPPLLDYYKHLEKKPEKSKLSLDRIFMINLKRRPERREKMERLFDEIGIEAEHFPAVDGKELSTERLLEMGVRFLPGYEDPYHHRAMTMGEIGCFLSHYNIWVMMVRKQLKEVLILEDDIRFEPYFRQNAVRILNQARNAAQYDLIYFGRKRLKEESEPAVENADNLVHAGYSYWTLGYVISLQGALKLLAAKPLDKLIPVDEFLPLMFDRHPNKTWTEAFPKRNLVAFSASPLLLYPIYYTGESGYISDTEDSQQISVETSEEGEARLKSDREQVFDHEQEFKLNPELKLGESLSKSHQEL

SEQ ID NO: 15178 - DNA, 2864 bp, DROSOPHILA
acattaacaagttgcacccgataaactgctctagtcacaataaattatatggctttgctagcgaatttaaatcagatcaagtcattggattaattgatcaactgccagaaatccgttggggatttcttgctgagcccagttaaatcagaaaagtattttgggccataagatgatatcaatttgtgataaatctgccatcgaaaggaatgttctgccaacgaaacgagtgcgtcacgaacatcgatttgaacgcaaaatagaactgacacaatttgaactgaaatgaaaatctccaatctcgaaactggtaactggtagtaatagaatcgtccatctatcacggaactaaataccagacgtcatcgtgtgaatgtggagctccccatccaactggagtggcttcgagttcttgacgttcggatcgagtcgagtcgagtgtaaagtcaatagcgaaatattatgtaaagtaagtggttttcggaagatggcccataagcaattatggggttcgtaaattatgtaaagatctctggaggaccgcgtgtacgaaaaccccaagctaacaatgtgaatagaaaacgaaacagttaaaccgctcagaaattatcacttttatcgatcgagatctgagatccctacgaaatgcgggaattccaattccacaaaaatcagcatgactaaacagacagaaaagccgaatcaggtttcagttttttgtggctactatatgtgtgatttttgttttttgtttttattttttcatattcaatttctttagattttgcaacatttgttgctttctttttgtttgcgagtccgctatcacgcttacaactaaaataaatatagatgtttttaaatagttaacgctataaacaatgtgcagatttcaatgagagctacgatatcacaagattggagaattcctttaaaaaacataaagctataaagtttcagtcagtggtttgttgggatgattccatccgcaaaatgaggcatcctaaatgagattgttatcactgtactgatggtggtgatgttgctgctgtggtcgcaggtactgctgatgtacttggccatggctaccaatcttgctctcgatccagtccagatagtgtgtgacgcgggtgaagcctccgggaatattggtctcacaaccatcggctggcccgaaactggttatgcccaccactatttgagtgtccttgagaacgagtggaccgccagagtcaccagtgcacactgtctcatccttcaggcccttggcacagatcactcccgacgtgaccacatcgtactcctgggcgcactccgcatttgagatcaccttcagctcggtgtactgcatcgagtccgagttggtcatctccaccatggcgccccatccgctggccaccacgctcatgcccgcgaactggtcatgtcgatatctgcttggcagcgaggcgggctgaattcgcggtgtgaatgccacatcctgcggcagcttgaccagcgcaatatcattggccgccgtctccggattgaaacgttcgtgcacgatgaacttgttggagcggagcaccagaccgccggacacctccgtatcctccacgctcttggtgcccagatacacatcgtagtgggtcacgcccatggtgcagtgtccagctgttaggatccaacgtttgtccagcagtgtgccgccgcacagaatccgtttgcgccatagctgcttgccgatgagcatcacctggtaggggaacttctcgatcctgccgtacttcgattgtcccacggcgtagctatccgtgggtgtgggcttccacatcattaacatgatcactgccagtcccagcaggtgggctatgctcttgtggatcattttattttctgtactgcacttgtcactgaatcagtctcgttttgcgaatcttgaagttaagtcttttcgctttttttttataacttttttttgcgtttctctgagttctgcgcgctttgaatgttcgcttcaatctaaatcgattctgatggagccgtgatattttatacctcgtcgctcgcgctcagcaaaaatctacatatttcgccggctatctccgccgctccgaactggacagatcggcaaaggcttctccagtagccggttgttatgacagccagctggtcgtaaaatctcgtttataacgctggacggagacggagtctccccgaatcttagattttcatttggcgcgtctaaccaaaggcaaagttcaaattttaaatgggaaacggaagtggaattgtgctaatttgatagcgcctattcccgaaatataagattatgtccatcgggtatgaattatttcggcagcccgaagagatttcctcgaatttcatatgatttttggcaaagagaaaatcaagttaaaagccaagtttgcagagaatagaacaggtgacaaatacgtatttaattatgtataaactctaatcgaattctcgttagaagaagactcgtttttcgttttccgttcggcatagttgaaaatgttttcattcaactgaaaagatggaatttttttggcgtttatgaaagttgcttttgcgcatctccatctccattggcattttcgtgatccgtaaacaacgggggactccgaaatatttattttctgattcagttcggttcgttggcgccatagagttcgtctctcgaataagttattcatctacgcctcaaagtccaaaaaaatgtttctaattccaagcgaaactttttggccaaatttcgggagaacggcgatgaatcaagtttgttgattctatattataaacaaaattaatatgtagattacgctccacatcgaaatcacaacaaagctgactcaatcgatgtt

SEQ ID NO: 15179 - DNA, 864 bp, DROSOPHILA
atgatccacaagagcatagcccacctgctgggactggcagtgatcatgttaatgatgtggaagcccacacccacggatagctacgccgtgggacaatcgaagtacggcaggatcgagaagttcccctaccaggtgatgctcatcggcaagcagctatggcgcaaacggattctgtgcggcggcacactgctggacaaacgttggatcctaacagctggacactgcaccatgggcgtgacccactacgatgtgtatctgggcaccaagagcgtggaggatacggaggtgtccggcggtctggtgctccgctccaacaagttcatcgtgcacgaacgtttcaatccggagacggcggccaatgatattgcgctggtcaagctgccgcaggatgtggcattcacaccgcgaattcagcccgcctcgctgccaagcagatatcgacatgaccagttcgcgggcatgagcgtggtggccagcggatggggcgccatggtggagatgaccaactcggactcgatgcagtacaccgagctgaaggtgatctcaaatgcggagtgcgcccaggagtacgatgtggtcacgtcgggagtgatctgtgccaagggcctgaaggatgagacagtgtgcactggtgactctggcggtccactcgttctcaaggacactcaaatagtggtgggcataaccagtttcgggccagccgatggttgtgagaccaatattcccggaggcttcacccgcgtcacacactatctggactggatcgagagcaagattggtagccatggccaagtacatcagcagtacctgcgaccacagcagcaacatcaccaccatcagtacagtgataacaatctcatttag

SEQ ID NO: 15180 - protein, 287 aa, DROSOPHILA
MIHKSIAHLLGLAVIMLMMWKPTPTDSYAVGQSKYGRIEKFPYQVMLIGKQLWRKRILCGGTLLDKRWILTAGHCTMGVTHYDVYLGTKSVEDTEVSGGLVLRSNKFIVHERFNPETAANDIALVKLPQDVAFTPRIQPASLPSRYRHDQFAGMSVVASGWGAMVEMTNSDSMQYTELKVISNAECAQEYDVVTSGVICAKGLKDETVCTGDSGGPLVLKDTQIVVGITSFGPADGCETNIPGGFTRVTHYLDWIESKIGSHGQVHQQYLRPQQQHHHHQYSDNNLI

SEQ ID NO: 15181 - DNA, 4396 bp, DROSOPHILA
caacatttgaaattatggcaaagccgtgttcgagtgctgggtaaacccaattcccagttctcagtccacagttccgagtgccaagtatccaaatatcgagtgttctgatactgctgacaaggcagcacctcttaaagggtacaaaaatttgcaaaagcgaaaatcaattatgcatacaatacacataattttaatgcgtgcgcggcagaatgtggttgctggctgcttctgcgtttatttttaatttatttaaggcggaagacctgctcagctcacagaatctgtgctccactgccgtcgtatgggatactgaagtaatggctatagatgtggcctttggttaaccgaaagtgtggcaccagaaggtgctggggttacccaaaaaagggaagctgccatccaaaaggggcgtagccagaagggggatcaacgtcagcagctgcgaaggcagccagcggaacactcgcctgactttcaattggcgtcacatttttggtcgactgcgatcatgatcatgatgatgatgatgatgatgtagttgatgcggcagccagctcacttttcctgtctccagtgtcagtctatatgattgccaagtgtcttgcatacgaatgggtctgggaatggcaatacctatatctatatagctatatggctatatggctatatgtctatatggctatatggctaagggaaggcgaagtcaattgcgaacggcttaaccctgacagagacctagtctcagtcgctgtcgatcggcggtagtcaaaacatatcaatcatacgccgagtgtgtccaattagcgactgtggcaggtgtttgctctgttcttcggccaggccaggccagactctccaaatcaaattacacgccatgtgatcatccatgaagagtgctactgcaatcagaagggaacaaaactccagtcatcccagaatcattatagagcaggccgtgcctttaaaattcaaagtacaagcacataaattcgatcaagtttgacaactagttttataccgttccgatttgtgacattcccaactggacatcttctagcataccagctaattatacaaaccaatctatatacattttaccacacatatatatatatatatataaattcgagaatcttcgcccgaacgagttccggttggagttggctaggtcagtggttaatgaggagaacacctcgaaatgttacataagaaacgagttctggctgccgtgtaattgaatatattcgatgggtcattttcaatcaaactctttttccgtgtgcaatttaaataacaatgtgaggcaagaacacgagccccagtggctagaacataaactccgagtgccgtgccgattttatctgaacagtaaagctgaaaaagacaatcgcagatgttcagggagatgccaagatgaatgccaaagatagtattaactttagtgccaaggcgagaaattcaaatgaagccttgagtccggatttttttcaggtttctactgtcactgacttgcggtcttggcttcggccaagaatcttagatctttaagacattctcgttcgattctattgaatcgagagattcacatatgtctagttatatcgttgagctgcaccacccttatctttgctgtcgtcattcatcattcgattggggataacttaataagcgatttcttcgcgcctttcattaataaatctttggcgtgcctcggcacaaattccaatgcaaatcacgatcctcggcgagccgagcagaaacaaacgtgctgagcctctccaagcgatcgcgatttagaatacctattttcattcaatatttcggcaacgcggcgtacggacgtcgggctctgaattctcgatttttgggcgaaaatttctaaagctcgtaagcctctttctttcagttgccaattgacaattgccagttgcagaaacagtaacagtaacgaaaacagaaacagaaagccaatatgacgaactacataaagattgtcgaggagcgaatctccggcctctcaaaaggagtgggtaagttgaatcgaaataggtatgcatatatatcaaatgaaactaatgattcgaataccatttagatgagacggtggacagctggttcctaatgagctcacctatgcccgtggtggccgtggttctcgtctatctggcgtttgttctgaaaatcggacccgagtacatgaagaatcgcaagcccatggacctcaagcgcatcatggtgttctataatgcctttcaggtcttgtactccatttggatgtgccgcacggtgagtccataaaacggagcgtcataattattcagcttgtttcgcgatctcgatttatgtattattcatttttaataagaaaagcagcgtcaagtgcttgtcgaacatacaaagttgcgacctacgttatattgtcattaaatatattaagctaaaccaatttaaaccaattgtgcagagaattcgtttatttgaagactctatttgtgaatttttatttcacatactattatacaattcaattgcaaatcgatgtcgcgctttaatgaatgaacaaattaactgcacttgaataagaaatttaaataaaatagcgtttttaagcagcaaattaaaaataataaaatatatgaggattaatttccccttttcttttttttttttttgcagtccatccaagagagcaatgtgatggcgtcgatcttctcgaagaagtgcgagattaaccgcaccagggagcagaatctgaccctctattccggtgcctggttctactttttctcgaagatcatcgatctgctggacacgacgttctttgtgctgcgcaagaaggacaaccaggtgtccttcctacacgtgtaccatcacaccatcacggtgctcttctcctggggctacctgaagtacgctcccggcgagcagggcgtgatcattggcattctcaactcgggcgtgcacattatcatgtacttctactacatggtggccgcaatgggaccccagtaccagaagtacctgtggtggaagaagtacatgaccagcatccagctgatccagttcgtcctcatcctgggctacatgctgaccgtgggcgccaagggctgcaacatgcccaagacactgaccttcttcttcgtgggcaacacggtcatcttcctttacctgttcggcaatttctatcgcaagacctacaagaaggccaagtccgtggatggaggcagtcgcaccaccggcagtagtttggctcaatccgctctgcgtgccgccggcggtatgggttgcatgccgcagaccatgaacgccggtaagcatctgctccagaatggccaggtcggaaaggcgtacatcgatctgaacaacaacagcgtgaagcccatgaagctggaatgatcggcgatgccgaaaatggtgtcgttgggatttcagttagcaattatgttttttagagcggggcttagttcgtaactcttacctttacctttaccattaccaactatcagtagtctgtagtctgcggagaataacttgtataatgtttatatgccgggcaggcggatgatgattcaaatccaaaaagtagctaggaccctaagtgcgtgaatgtggccatgtttgtgtgactgagtatgtgttaatgtttttctagctgagcgtgtatgagagctagtgtgatagagcttattaatgaaatgcagccgtaaatcgtttcgcaaaacaagaaaaattcaataaaactttaattttgtatatttaataaaaccaaaaaagtctgtgtctgttctttgccggtgaaattcgggttcaggttttgggttttgggggtttttggacttctatttctgcgcgaagctcttgggttaggtaatcaaaccggatcccattggatcctattatttatgacaacggcatggccacgcgctccatccacacgcaaagaaaaattatgcagatctgcaaaccattaaacgtgattaatatctgtcgattgagtgaagatatactacctctttttgtgccaactgtctaatcagagaacagattagaaatatcataaaacaaaagcacaaatttttgcatccctaaaaaacgattctttaaataaaccatatttttatgagtgtagaacctagtacgcgtgctgcgatgattatccaacattgtgtgtgccccgtccattttgttggccaggcttagacaccctggcgacgattggagaatgtctttgccaaattagaatttctaatcaattttttcttaactcgccttgactcacacacatgcctccagcatcacatgaagcacctttatttatgcagatttcgagtataaaactcttgttgttttgtacacattcgagtcaaagttcaagggcctggaaaagagtttgatt

SEQ ID NO: 15182 - DNA, 1203 bp, DROSOPHILA
tgacaactagttttataccgttccgatttgtgacattcccaactggacatcttctagcataccagctaattatacaaaccaatctatatacattttaccacacatatatatatatatatataaattcgagaatcttcgcccgaacgagttccggttggagttggctagttgccaattgacaattgccagttgcagaaacagtaacagtaacgaaaacagaaacagaaagccaatatgacgaactacataaagattgtcgaggagcgaatctccggcctctcaaaaggagtggatgagacggtggacagctggttcctaatgagctcacctatgcccgtggtggccgtggttctcgtctatctggcgtttgttctgaaaatcggacccgagtacatgaagaatcgcaagcccatggacctcaagcgcatcatggtgttctataatgcctttcaggtcttgtactccatttggatgtgccgcacgtccatccaagagagcaatgtgatggcgtcgatcttctcgaagaagtgcgagattaaccgcaccagggagcagaatctgaccctctattccggtgcctggttctactttttctcgaagatcatcgatctgctggacacgacgttctttgtgctgcgcaagaaggacaaccaggtgtccttcctacacgtgtaccatcacaccatcacggtgctcttctcctggggctacctgaagtacgctcccggcgagcagggcgtgatcattggcattctcaactcgggcgtgcacattatcatgtacttctactacatggtggccgcaatgggaccccagtaccagaagtacctgtggtggaagaagtacatgaccagcatccagctgatccagttcgtcctcatcctgggctacatgctgaccgtgggcgccaagggctgcaacatgcccaagacactgaccttcttcttcgtgggcaacacggtcatcttcctttacctgttcggcaatttctatcgcaagacctacaagaaggccaagtccgtggatggaggcagtcgcaccaccggcagtagtttggctcaatccgctctgcgtgccgccggcggtatgggttgcatgccgcagaccatgaacgccggtaagcatctgctccagaatggccaggtcggaaaggcgtacatcgatctgaacaacaacagcgtgaagcccatgaagctggaatga

SEQ ID NO: 15183 - protein, 322 aa, DROSOPHILA
MTNYIKIVEERISGLSKGVDETVDSWFLMSSPMPVVAVVLVYLAFVLKIGPEYMKNRKPMDLKRIMVFYNAFQVLYSIWMCRTSIQESNVMASIFSKKCEINRTREQNLTLYSGAWFYFFSKIIDLLDTTFFVLRKKDNQVSFLHVYHHTITVLFSWGYLKYAPGEQGVIIGILNSGVHIIMYFYYMVAAMGPQYQKYLWWKKYMTSIQLIQFVLILGYMLTVGAKGCNMPKTLTFFFVGNTVIFLYLFGNFYRKTYKKAKSVDGGSRTTGSSLAQSALRAAGGMGCMPQTMNAGKHLLQNGQVGKAYIDLNNNSVKPMKLE

SEQ ID NO: 15184 - DNA, 6505 bp, DROSOPHILA
gtgtatgccccggcacaaaaacacgaatgtcttattcttgattggccagcattgtgggcttattcccatgtttacatgaaaagaaaatgaaggaaactatgtttgtgatagcaaaactagaaaatgtaatacagtttaattaagattaacattaaaaaccagataattatgattcgcaactttccaactaagagtttctttgtatgtatatattaagcttccctaaacagtggtaagtagtggtagtatagtttctaacggtatatttagtgccaaaatatttgaattatcagtgtggccatactgcgcaactttagtctacgaaagagctagctagcttctatgcgatagtatcgccatcatcgccgaactgcaagtttttgcaccgtcgaagaaaaagttgtctaaatatttcagttcggtgttgttactgctataaaatccagtaacacatacaaaatgattaaatcgtgagaacatatatatcgcaaatttgcatgtgcataatgtaaatttgttccggacagcagctgcgaatgagaatagtcccccgcccccgcgaaaagaattgcatttaaactcccttgtgttccccaatagcagctgttggcctgccaacccccaccacccactctctttgttttgcccaatcggaaatccccacccggttattcgcgtaatcccggctttaggaattaagaaaattaccaaaatcgcaatatttctgtgttacacatataatagaggtaagaattattttggggacatttgttatcattgaacagctgttcatagtttgcccacagccgaacagctgatttggcgttttccccaaattgaagtcaatagtatcgaaacattcaatatacttaaagctgaatgttattcgtaaattttaatttaagttaatacaaaataaacgcatcagcttaatatcagcttagacatatcgatatgctgacatatcgatacaacgctcatccctattgcgttggctaaaataaagaactgctgaacttaattagtaataagttgtcataagttatttagagcttccgtggaaacccccatcatcccagtgcatggaatccgataaaaagttttcacttttcactgcggcgcttgtgttttccccacgtagctttggaatttcctgctaacggcgatgaaaaacttgacggaaaagtggtgctgacaaaagagtgtgtatttgacaagcaaagaaaaaatttccgtcttcaaactttattttgagctttaaatcgtttttactcgctcgagaactgtgcaaataatagccccgaatttccatttggagtacctagagtacatagctggcaatagctttggaacccaaatacttaacccactgcttgtttttgtttctgtttccggacaaaaaaagcaaactggtctctgttagacagttgtacctcctcatacccgtaaattaaacattttttcgtacatatacacaattttagcgcattttggcctgcatgcgctgcaacgcacctttgccgttctggtaacgttgcccactagacgactgaaatggatagcttggagaacgaccaggaggagctgcaccaccagccgagggtcaccttggcgtacggcagtgtggccaccagttcgggtggacaggaaaaccgtaagctggccatcatctggaaccagatagtgctaatcctcttgtgcttttgcagattcccagtatgcgatgtactataatcagcagagggattcggagggctacatgctaatgacgcccttcctgtccagttcgcagagccacagccacacccgttcgccgcccacgtacaccgccatggtggagccacgtcgcgaagagagttctggatttgagggcttggccaggcggtgtgacaagtgcagttcgctggacggactctgccgctgcgaatcgatggtggccagtagcagtcgctatgcggactccacacagaaccagtcgcattcggaggctcagttcttggagcagccctcatcctccacagcggcgatcgccaatccgcccgctgttcattccattccacgacccaagcgaaagaagactgaacccctgacaatggagccagagagtgacaatgacggcgacgcggtggttgcgtccgtcagcggcacatggcctgccggtgctatagaagagcatgctatggactctacggcggtcgtttacgaggtcccctctagttcgctgcagctcagcaacagctccttcgaaaccgccccaagtgccgtaaatgcttacgatgatgtgacatcgagtgcctcggacacggagcacggccagtttgctcatacgcgtaccaccaacaccacgacgactacgtctgccgttcaggctcacaagaagaaggccagccgctccaataatgcctccaacacctcttccagagcagtagatacggatgccacgccaagcacgagtgcccaatcgagaaagcgacagatgagtcaattttcttatcgcaaatcaagggttttggagccggaaaacgagagcagcgatgatggctgggatttgcgtgtgcataatcccgttccaccaattgagcccacagtaacgattatccgtggtagcagggggtccgacgaggccgagataggtcatacggatcacaactactataatagtcggtgcgctgtggcgggagctccaccggatagtacctacattaggtcagcctcctgctccacggccacccatactacacgtagcgtggattatggatctcgcattggtcgaaggtcggctgcaacaggatcaccgtccacaagctcggatcaagaacaggagcagcaacagcgccaacaacaggaggagattattcacgaagaacggcgtcatcagcagtcaccaggccaacccatgcacagtatgtacggtgttcccggcgagtctagaatgtcatggagtcgtgcgcggccctctgacgactcagtgccgcctaggaaacatgcgcgcatggaactgcccggaagatcgcgttccaaactgtcctcaacgaattttaattcgttctatcctggaaggagaggacaccgaacctttgcggagcaagggaacagttctgggcaacatcatgtgcggtttccaccatcctcgacgccgaattcgaacgggccctgtgtgattacgtacgtcggccggccaagagatagtcagcccgccgcggatctcaatcttccgtccacatccacgggaagacgtggcagccatgagacccgcgccgattccgtagtcttgacggcaccagacttgcagctggatgattggtcatcggacgatgatgatgatgacgtagtatttgtgcactccactcgtgagcccatactctcaatcgatttgacatccgacgacgatggcttggccaatgatacgcaactgcagagggatagggataggggccgtgaaagagaacgggagcgagcaagggatcgggaaccatatcgtaatgacactcaacccaacccggaggatccaaatgaggataggaggaccatgtatgactgtgcttacacattcccctatgctcgcaggacagatcgtcgtacagaagcgaataatgagggcacctctgcattcgcattttatagtggcgctctagctgatcgggctgccatttcggaccacaattacagctacgagctagaccagctgatggatcccggccccggtaatttttacccgccccgctgctccaacatggatccacagcgctacttccttccgataaacgaatcctcgatgtggatgccaggccatcccgctcccccgccacctccgcccccgatgcccccaattttgctgcctgacaactcttccactgaggcatacttacgtcatcagcaaagaaatcttacatccactccaagcagctcgtccagcgagcagacatcaacgcagcaatcccgccacaggcgaagtagcccggcgaacgtgtatcatcgttaccatccgtactattatgcgataacaacgctgccaactgtggtggagtcggactacccgccgagtctccagcctcaccctcaccctcatcctcattttcagcccagtcaaggcggaagcagtcgcagttctttgagtggagctttgaatgcggctgcagtggcagccacagcggcggcggtacaggcacaaacttttagtgatttgctatcacaggcccataatgagggacgtgctgcggccctggaaggcaaccggacacctccacatacaatggtgcatgcgcaacaccagcagcggcaatccattaatccgccagcgccaggagtggcatcaaatgcaaacctggcggcagctgtttctccaccaccgccgcttgaaatgtattccggacggagcaccattccgcactgcggatctccgccgttcagtgttcgacgctccgaagctgcgtatagcaatagacagcactatcagccgcagccgcatcaaggtcaccaggcaccgcagaaccagatgcacgcccacattcatccccctcaccgggccagcgccatagtggccacctcgctgacgccggctccaccgtatccggtccatcaaaatctgtggtaccgccagcaaagcatgcaggagatgcaccgtcgccacatgacgcccacacctatcgatctttcttcgaatgctccgctattaacgagcacgctgcgaaacgggtacctgcatagcatctgcagttgtgttcatgctcggaacggtcccgtatcaagcctggatcccgcttactatccgccgtacgacgctgcaccggcagctgctgctcctccaccatctcctcaacaacagtcgcctgctacatccggttctggcaatagtagcgtggcagcacaagcgagtatgcgacatctgcagcttcagccccaacagcagccgcaggctcagcaatcgccaccagtaatgcagcatatgcagcgccagcgggccatacaccaccacatgttccatcaccactactcaccactgcatctggagattgggctggcccccctatctctgggctcccgtatccttatcgcaccatcacgtccaaaccggggagctactttggtaaggccgtatagaaatcaaagtcatacctatttatattaattagtttttacgtttatttcaggaaactattgagcggaataccttgcctcacaaatatcgacgcgtccgaagacccagtgagaccgatgaggatgccgagaagtgcgccatttgcttaaacctctttgagatagagaacgaagttcggtaagttcaatgtggacgttaccttataaagttctctaattatattaaataacaattgcagccgcctgccgtgcatgcatctatttcacacggattgcgtggatcagtggctagtcaccaacaagcactgccccatttgtcgcgtcgacatcgaaacacacatgcccaacgacgctcttccccccagctccagcggagtcccagatgccgccaattccgccgcattatgacattgtgtgcacggcatctttatgtaaatccctcagactgagtttgttctcggcatgcatcgatacaagaacaaagaatgaaatattcgtaaaaacccctatatacataccttaaaatgtttaacccaccgcaacgtatgtaaaaggcagttgccacagcttgctgccgtgttgcgctgaaagatatcaaaaagctaaatttgtttggctcaatttctatgtctaagtatattaagtgattcggcaaataatttcctatacatatgtacaaattgtctacgttttgtgaaacaaaattcttgtgataagaatttcataaatatgcgtatattgttatagtatagaattcccacgacgggcgtatatgataactttgaccccagcttgttgttatatttttaatgatcacacaaaataatataacatcggaccctaaacttaaccgattagaaatcgatttggcaatttgcatttttcttgagtaattatttgaaggacttaaaatctggacgatttcctctcattatttaacaaattttgttatgttttgattagtcacaaaaatgtagagaataatcttttattctattaccaaagaccctagaataattctattctattctagtgtctttgctattaccaaattatatatagtacatctatttaatttaatagattacggattattgctcaatatctcataacgtgccatatataagtgaattgattcgatgcaattttttaaatcttgagctaacatattttaaaaaggttggttttatattatagaaagtttcctaaaacttttaaaaattggctgtctaagacggcagaaatcaataaataatccaataaacgtctgttgatttttattccaccgataaaaatacgatacacctttatttctgtttggggtttacatattttattttaaatcagttctattatcaataacatttcattgtgaaactttgtgtaaaatcttcgtccaacatattag

SEQ ID NO: 15185 - DNA, 4041 bp, DROSOPHILA
ataaagaactgctgaacttaattagtaataagttgtcataagttatttagagcttccgtggaaacccccatcatcccagtgcatggaatccgataaaaagttttcacttttcactgcggcgcttgtgttttccccacgtagctttggaatttcctgctaacggcgatgaaaaacttgacggaaaagtggtgctgacaaaacgcattttggcctgcatgcgctgcaacgcacctttgccgttctggtaacgttgcccactagacgactgaaatggatagcttggagaacgaccaggaggagctgcaccaccagccgagggtcaccttggcgtacggcagtgtggccaccagttcgggtggacaggaaaaccattcccagtatgcgatgtactataatcagcagagggattcggagggctacatgctaatgacgcccttcctgtccagttcgcagagccacagccacacccgttcgccgcccacgtacaccgccatggtggagccacgtcgcgaagagagttctggatttgagggcttggccaggcggtgtgacaagtgcagttcgctggacggactctgccgctgcgaatcgatggtggccagtagcagtcgctatgcggactccacacagaaccagtcgcattcggaggctcagttcttggagcagccctcatcctccacagcggcgatcgccaatccgcccgctgttcattccattccacgacccaagcgaaagaagactgaacccctgacaatggagccagagagtgacaatgacggcgacgcggtggttgcgtccgtcagcggcacatggcctgccggtgctatagaagagcatgctatggactctacggcggtcgtttacgaggtcccctctagttcgctgcagctcagcaacagctccttcgaaaccgccccaagtgccgtaaatgcttacgatgatgtgacatcgagtgcctcggacacggagcacggccagtttgctcatacgcgtaccaccaacaccacgacgactacgtctgccgttcaggctcacaagaagaaggccagccgctccaataatgcctccaacacctcttccagagcagtagatacggatgccacgccaagcacgagtgcccaatcgagaaagcgacagatgagtcaattttcttatcgcaaatcaagggttttggagccggaaaacgagagcagcgatgatggctgggatttgcgtgtgcataatcccgttccaccaattgagcccacagtaacgattatccgtggtagcagggggtccgacgaggccgagataggtcatacggatcacaactactataatagtcggtgcgctgtggcgggagctccaccggatagtacctacattaggtcagcctcctgctccacggccacccatactacacgtagcgtggattatggatctcgcattggtcgaaggtcggctgcaacaggatcaccgtccacaagctcggatcaagaacaggagcagcaacagcgccaacaacaggaggagattattcacgaagaacggcgtcatcagcagtcaccaggccaacccatgcacagtatgtacggtgttcccggcgagtctagaatgtcatggagtcgtgcgcggccctctgacgactcagtgccgcctaggaaacatgcgcgcatggaactgcccggaagatcgcgttccaaactgtcctcaacgaattttaattcgttctatcctggaaggagaggacaccgaacctttgcggagcaagggaacagttctgggcaacatcatgtgcggtttccaccatcctcgacgccgaattcgaacgggccctgtgtgattacgtacgtcggccggccaagagatagtcagcccgccgcggatctcaatcttccgtccacatccacgggaagacgtggcagccatgagacccgcgccgattccgtagtcttgacggcaccagacttgcagctggatgattggtcatcggacgatgatgatgatgacgtagtatttgtgcactccactcgtgagcccatactctcaatcgatttgacatccgacgacgatggcttggccaatgatacgcaactgcagagggatagggataggggccgtgaaagagaacgggagcgagcaagggatcgggaaccatatcgtaatgacactcaacccaacccggaggatccaaatgaggataggaggaccatgtatgactgtgcttacacattcccctatgctcgcaggacagatcgtcgtacagaagcgaataatgagggcacctctgcattcgcattttatagtggcgctctagctgatcgggctgccatttcggaccacaattacagctacgagctagaccagctgatggatcccggccccggtaatttttacccgccccgctgctccaacatggatccacagcgctacttccttccgataaacgaatcctcgatgtggatgccaggccatcccgctcccccgccacctccgcccccgatgcccccaattttgctgcctgacaactcttccactgaggcatacttacgtcatcagcaaagaaatcttacatccactccaagcagctcgtccagcgagcagacatcaacgcagcaatcccgccacaggcgaagtagcccggcgaacgtgtatcatcgttaccatccgtactattatgcgataacaacgctgccaactgtggtggagtcggactacccgccgagtctccagcctcaccctcaccctcatcctcattttcagcccagtcaaggcggaagcagtcgcagttctttgagtggagctttgaatgcggctgcagtggcagccacagcggcggcggtacaggcacaaacttttagtgatttgctatcacaggcccataatgagggacgtgctgcggccctggaaggcaaccggacacctccacatacaatggtgcatgcgcaacaccagcagcggcaatccattaatccgccagcgccaggagtggcatcaaatgcaaacctggcggcagctgtttctccaccaccgccgcttgaaatgtattccggacggagcaccattccgcactgcggatctccgccgttcagtgttcgacgctccgaagctgcgtatagcaatagacagcactatcagccgcagccgcatcaaggtcaccaggcaccgcagaaccagatgcacgcccacattcatccccctcaccgggccagcgccatagtggccacctcgctgacgccggctccaccgtatccggtccatcaaaatctgtggtaccgccagcaaagcatgcaggagatgcaccgtcgccacatgacgcccacacctatcgatctttcttcgaatgctccgctattaacgagcacgctgcgaaacgggtacctgcatagcatctgcagttgtgttcatgctcggaacggtcccgtatcaagcctggatcccgcttactatccgccgtacgacgctgcaccggcagctgctgctcctccaccatctcctcaacaacagtcgcctgctacatccggttctggcaatagtagcgtggcagcacaagcgagtatgcgacatctgcagcttcagccccaacagcagccgcaggctcagcaatcgccaccagtaatgcagcatatgcagcgccagcgggccatacaccaccacatgttccatcaccactactcaccactgcatctggagattgggctggcccccctatctctgggctcccgtatccttatcgcaccatcacgtccaaaccggggagctactttggaaactattgagcggaataccttgcctcacaaatatcgacgcgtccgaagacccagtgagaccgatgaggatgccgagaagtgcgccatttgcttaaacctctttgagatagagaacgaagttcgccgcctgccgtgcatgcatctatttcacacggattgcgtggatcagtggctagtcaccaacaagcactgccccatttgtcgcgtcgacatcgaaacacacatgcccaacgacgctcttccccccagctccagcggagtcccagatgccgccaattccgccgcattatga

SEQ ID NO: 15186 - protein, 1256 aa, DROSOPHILA
MDSLENDQEELHHQPRVTLAYGSVATSSGGQENHSQYAMYYNQQRDSEGYMLMTPFLSSSQSHSHTRSPPTYTAMVEPRREESSGFEGLARRCDKCSSLDGLCRCESMVASSSRYADSTQNQSHSEAQFLEQPSSSTAAIANPPAVHSIPRPKRKKTEPLTMEPESDNDGDAVVASVSGTWPAGAIEEHAMDSTAVVYEVPSSSLQLSNSSFETAPSAVNAYDDVTSSASDTEHGQFAHTRTTNTTTTTSAVQAHKKKASRSNNASNTSSRAVDTDATPSTSAQSRKRQMSQFSYRKSRVLEPENESSDDGWDLRVHNPVPPIEPTVTIIRGSRGSDEAEIGHTDHNYYNSRCAVAGAPPDSTYIRSASCSTATHTTRSVDYGSRIGRRSAATGSPSTSSDQEQEQQQRQQQEEIIHEERRHQQSPGQPMHSMYGVPGESRMSWSRARPSDDSVPPRKHARMELPGRSRSKLSSTNFNSFYPGRRGHRTFAEQGNSSGQHHVRFPPSSTPNSNGPCVITYVGRPRDSQPAADLNLPSTSTGRRGSHETRADSVVLTAPDLQLDDWSSDDDDDDVVFVHSTREPILSIDLTSDDDGLANDTQLQRDRDRGRERERERARDREPYRNDTQPNPEDPNEDRRTMYDCAYTFPYARRTDRRTEANNEGTSAFAFYSGALADRAAISDHNYSYELDQLMDPGPGNFYPPRCSNMDPQRYFLPINESSMWMPGHPAPPPPPPPMPPILLPDNSSTEAYLRHQQRNLTSTPSSSSSEQTSTQQSRHRRSSPANVYHRYHPYYYAITTLPTVVESDYPPSLQPHPHPHPHFQPSQGGSSRSSLSGALNAAAVAATAAAVQAQTFSDLLSQAHNEGRAAALEGNRTPPHTMVHAQHQQRQSINPPAPGVASNANLAAAVSPPPPLEMYSGRSTIPHCGSPPFSVRRSEAAYSNRQHYQPQPHQGHQAPQNQMHAHIHPPHRASAIVATSLTPAPPYPVHQNLWYRQQSMQEMHRRHMTPTPIDLSSNAPLLTSTLRNGYLHSICSCVHARNGPVSSLDPAYYPPYDAAPAAAAPPPSPQQQSPATSGSGNSSVAAQASMRHLQLQPQQQPQAQQSPPVMQHMQRQRAIHHHMFHHHYSPLHLEIGLAPLSLGSRILIAPSRPNRGATLETIERNTLPHKYRRVRRPSETDEDAEKCAICLNLFEIENEVRRLPCMHLFHTDCVDQWLVTNKHCPICRVDIETHMPNDALPPSSSGVPDAANSAAL

SEQ ID NO: 15187 - DNA, 22313 bp, DROSOPHILA
gggggaatgggtttggctatgggtatgggcacccaacatggaatccaaacggctatgttcactcattcagtctatcgccccagtggcagtcacccagtcccgcatccatgtgccatgtgccgcctccgctgctccctgccccgtttgctttccactcggttatggcattttgtgcgctttcagtttgatgtgcaacaaagtgtaaaattatttaatagaatttcgtgcataatcaatttatgtgcagcagagagcccagcattcagtcgcccattcagcgtccaagccatctagccacatagccaagcaaggaccttccgtcagtcagtcagtcagtcagttagtcagtcagtcaggcagtctgtcatcctgtgagttttccagttcgccagtgggccagcattgaaatgctgaaactttgcccatgctaatggctaaataaatgtccgactttctgctttgttaaatattcttttttgtgcgtggcgaaggcaaaaaaaaaaaaagtggcgaggttattagagtggtttttgaaaaaaccacgaacgaaagtttgccacaaataataaatgttgcagggcaaaaagaattatttttaagttcacttgttaaaatgtagacattaagcctttaaatcttagttccgtttgctagatttctatttatatatttatttctattgctagctatatttcttgaacgcttaattggcacacagaccatacatatatcatttaaagtatctccagagttctgaaacgattcctaattgccaatggaaataaatttcattctgtgcagcagtaatttaaaagtgcacaaaactttcttaattgggcaaactggtagctagttttattcatattgcacaatttaaaaccattaaagagtttgctggcgtaattcgaaaatatttttcaatgacatactacggtatcatattacagtattatgccatttaagtcatatttttcaatttcctgcgaatcttattcacaactcacttgcaatagtagagcctcccctccttgcccacatgaacactccagccgggcttgagcttttcctgtatggcctccaagtgtccatcaatttctggccaattttcggtcatgccagcgatgacgcccccatgactttgacccaaaagtggcccatagatcccggtgccgcagttagtttcatttgctaacccagtgctcagctccgtcgatgctgtaccctccacttccgtacatccagatgggtctggtgttgctgtagccattgctgtggctgttgttgccattgtcactgggattccggaggattgggtcaacggacatccgttggagcgggtgggcgtggcatggacaacagagccatttgttgtcggcaatgttgtcaattgaggcgatgatgttcgtgtcagtagcaagggcttggggttggatgttgctcctacgccaccacagacgcctcccactccgcctgctccacccgcgccaccagctgatgttgctcctccggtcgatgttgctgttgtgtttgcggcattttgtagcggatagacatcactattcgaacgccccgaaggcagtaacatcattgaaacacattcgctgcaaagagagaagagcagaatcggtaaggcacataagtcaagttgttgtcgggccattttcacacattgttcgatccacaaatcacattccattccattccactccactcaacgaccaagtcgaccgacccactttgttcgcaaacaggctcctccataattcaacatccagctaacagtctgaagacagaccgatggcattgccttttctgctcgggtctggccaaaaaaaaaaaaaaaaaaaaaaaaccaaaccaaaacaggtcctccataacagacttccccactaccatggtcaccattaccatcattaccatcatgatcagcagcatggttgttgtcatgatcatcgggaaatggtgggataggttcaggttttaggccaactcgtttttagtgttatgacacaattttcaatttgcttttactgtttggtttcgttctctctctttttgcatatgttttgctcctttatttggcaatggtgcaaaaatggattggccatggctgaggaggaactggtttcgaaatgggatcaaatagttggcatcgtttgcgaaatgcagctcttgggtgaagtatgacagcgataaggaaatggaaatggaaaacccaggcatacttaactaactaaatggtttaatattaataatgcaaacagttatagatttatatcaaagctattatgacattgcacttggcataaagccgtttaatccgctgccacaatatttatttaatttacaagtaaatccatttactttctaccatacacactgagtaaaaacaacatgccaaagaaactgaaacaaatttcaacaaattcgttttggacaaacccattcgaacatcgccaccgaccgaattgatcaatcccgcccacattgtttacactgggcgaactcctcaataatatcaaagagcatttgcataatgtttagatttcaacgccaccaacgacagcatttcggcttttggctctgacatggttcagtaaatggctggcaaaaagattttttcaaatttattccgcaccggaaggcgggagtgtggaagttgaggaagttgtggcagttgtggcagtgcagggataaaacatagatacgtctgccagaagtatcaatctatctatctatgtaagtaagcatgtgcgtctgtgtgggtgagtgccaatggccgatagtgcgactagttggctgagtccaaacaacaagaggacgcttggaaaaatggatgtgtttgtttgcttgcgcaatttcactcgatggctgcttggcttggcttggctggcggaaacggtgcgaaacggaaaaggagtctgcagaaccggagaactggagtggcgtacggatagatgcgacttcaaaaaccgagatacgacagatcccagccaaacaaagagacatccattaggcgagcagagcagccgggggacagctcatcaacttgcaacgtgataatgacagggagagacaaaaggaatgggctctgcactgcaggaaatggggatttactctaattaatagctttttgaagttcgataaactgccaagtcaacaattacttctatttagaaacaaatattagaagaagtaaccttacctaaaatataatatatatagatggataatgcattgtatgtttatatttttatacttttcttttttaaattattagcagattgctggcaattttttacagtgccattaacggcttggcaaacaacggctagcgactagcgacatggtcaagttccttctgcgacttctacttcttatgtgtgcttttctccattctggctatcttcctatgtggtgcaaaagttttataaacaacttgtgctgacacacactcgaacactaaaaactggaacacttgaacaatgttttgaattacatattttctttgtttgggagtgaaccaaatagacaagtgcaaaaatgttcataaagttgttctccctcgtttttcatttctgggttaggaatgctcgactacggaatgttgatttggctcgagacacaaacttgcccagcagttgaacggatcccccgaaaaggatcaaatatttcgttgtatattaaatgtttgtaaaatataccatatcataaacttgtcttacagtgaaattggttacatctaaatacgtttgagttcccatggaatttcacgactgcttttgacaaacaaaaatcaattttgaaaagatcacacattccccctctttcttcccctccctcttgctcatcgaaatgagtaagaatttcagttagcatgtgcagagaacccagaactcttagccgagcaaacattttcgctatcgtcagaagctttacacatcccatcctagtgtaaccgatacgaaatacgaaagcggttccagctcatgccgcccatgcatttggacaccaagaccaaacacaaaagttgtcaagaaagaatggctatcaggaaggggctgaggggtagttggtggccgggacaggaagaggggccaatggaaacgggagcgacacttccagcgaatgatttgtgtcaacagagagaaaaggcagctgagaaatgtttatgcacgtggcgttgcgttgtgtgagtatctatgtgcgatggatgacgtcggggcaatgacagagatcagtaaatggaaaccacacatagcacatacattggcgggcaatactataggtatcactactgaaaactacatttacacgtaatgaaaaaggaattaaataatttgtatataacccttttttttactaagcttttatctttgtatcactcggatttgttgaacaaataactgttggaaaaaataaagcgaaagtaaactcaattatttgataaaaacgattagttatgaaaacaataagcaaaactcaaaccaaaaacacaaaaacattaacaagcatttcgcgcaaactttgcgatatgaaaacgtcaaaaaagtccacttacagatgtaattcccccagataattgcacgaatctgcggataacatcttgattgctattattttgtccgcaagtgttcgtgccatggacagttgtaaaatgtcagtgcggaaattgtgcggagcagtgaaaagaaataaatgaaaagacagcaagagtctgatgatgggcgataacaaaaagcgagcagcatcaagaacgaaaatgttgaccaacagttacaaataaaaaaaataataacaaacaagcgctggaagaaacaaaaaaaaaaaaaaaacaaagttaagctctgcaaattgtcccagttccgagggcttaaatgaaaggtggattgttattgcaatttccccctgcgacgaaggaaattctcctttgtgaagaaattaaacacaatttgtgaatgcatttgttattcgcagtcgcattcgcattcgcattaaagactccagcaatttgcagctcttacagcagcccagttttacccccctccccatttgccattgccactctggcttttaccaatttcgctccgtttcgttattgttaattgaaaagaaattacggctgcacaatgaaataaaattgcgtcgcgttatttattttgccgacgctgtcgctcatttcaattacatttaacacaaagtaaaagtaaaaagaaatgggcgtgcgcatattaaaaaataatacgtatacgtacgggtgacttcatatttgtacggctaaatattttaatggaaattgcctataagtgtggttgattttctgttccagtgtaatattatatatccaataaaattacagatttcaatgctctcacctaaaatgtgacttttaatatagaaattaagatactttatttgctgtttttaacttgtatataatgctattactttgcactcgttagcatgccagagaatcaataaaatgtaagcaaaacctttaaaaaaaaaacatcaagctcagctccccgtaggaataagcatgtgccagccatttagttagatcgttataaatgcacatgcgatgcgatggtgtgcgtggccatatccatacccacatccatatagacacggcacccataactacccaggcatcgatatatcgggatatcgctgccgtcggttgcggttgaacgtgattctcgaaatgtcacgcacacacggcaaaatgaaatgaaatgaaagaaaagcaacagcggtatatcaatttgttttatttttttcgatttggtttgggggcagggactggggctggggcactcatggtacattcatgaaaacgctttcgctttggacagccagcgataacatatccattcataaaacttggcaaccaagagcaacctatgctaccatggcaacgtggctctgataaggcgcgagtacgagtatctagatagttttaagtgcggaatccgtctgtgcaacgcatgcaagctttgctgatgttcgacgtgagattgcacagcaatgagggtcttctagctagctctcagattataaaaaacattcgatctatttacaattcataaaactcattcctgagtaaatggttttatgttctaacagagctcatttccacacaaattaaacattagcaaattgatttcctcacgcttccaaatgccaaactggaaactttagtacatgcaacaccacttagccctatattgaaagaaaatatttgcatttcccatcgctttgtagctgtaagagctccttagccaaacgggaatgaacatcacttggggcaacatttaatccaactaattcgtaccgtcattaaccgagtaatttcacactttgagctgggatatcacaacaatggcgccgacatcaaacgtatcggaaaacagggcgagaacaatgtagcaggggaatcctttttgtctagaacgactcattagcagaatcactggggcacgcccaaaagtaggcaactcaaacgcagacactgaaaatacattacagacacattttgaggaaagaaactcactcggctgattacaactaagagccaaacttttaattgatataccgtgaaccccacacacgaggtccaaaaaaaagaaagaaagaaagaaagatgttgacttacgacggccaaataatgagtttttaacaagttcacggaaagaaaaggtattcgttgtgaggaaaacgagagagtttattaagtgcccgccgggcagagctgtcttttcacattttttttccccatttcccccctccattttaataagtacagcagcgaaatgtcaaatgcaacagcccagcgaactcgtggagcttgtacacctgaaagtattcaccttatagcgcctgacataacgtgatgtgaagtcttctcgttttgggggaaaagaggcgggggcggggggtaggtattgcatgtagtgcaattttcacgtatccaagtcacatatcatgggccaatcgtgaggcaggcggcgaaagaaagaaagaaagtactggtaacgtgccttgctttttggctaacctgattgatttcaacatattcatcaggcagtgccacgacctcttctccactcccccattcgcctcacctcctcccaaatccgtccaactcacttattcattcacttattgccgcactcacactcaatcttgggcatgtggatcccgtttgatttcaaaaacagcacgtgtctacagtgaaatcgattagacgcaattatttataataatactagttcattatagattctctatgaacttaacatacggcatggtatacaaccaattctatgtttatatttcacatttctgtttagaattaatgtttcttaaaaaatagctgaatatgtgtaatcctgcccagtcttttatttcagtgcacacctctcggtgttttccaatgccatcgaacggcagtcacgaaacaagcagctctatgaagtctgggattattgaagcgatgtctcagtttcgtagttttccgcttgacgcaagcaggcttttgtggctttggtttttggtgggtgggatggtatggaatggcatggttcgtatgtgttaacagctcgaagaaatgttgttgctgttgctgccctgccgagggattatcaaattggcccggagattgtcttggctgacgggcagcatctggttaggcaaatgtcgtcaacttttgtggctgtcgaaaatttgggcaaagagttttcaaacatttttcacttggtaaactttgctgataaaatggcatggcatatgggctattgaaatcccacttaatacgaacgactttatgtttaattaaattggattaagtaatgcgcatacgacctgataaatttccattcatgatttgccttaaaggctttagaagttatttccatctatacattttatgaaaattgtgtatttacttgggatatacgaagccaattatcatcttggtaatttattaacaaataggttaaataaatgggatataaattcattaaatttatagataatattccatttctcattttgaatttatgttacctttagtatactcatacgacctgtgacattttcgaatatcctggacactaaaagctgcataaaattatgcaaatgaataacgtttatcgcttcggcaacttcgcatatggaaattaacataatatttcatattaaataataccaaatttaccaaacgatacaatttacgaacaaatattatcatgtttcgctcccaagcttactaaattaaatgttcttgtgtcttgttaactagaaaatgaatgcaagtgttcccttgtcttattaataaagcgaataaatcaaatgaaaccaatttgttttgtcatccaaatcgtttccaattaccgcatctatgtatccatttctcggtctgttacccaatcgacagcagaggaaaaccagggattatgcttccccgtccaaacatcttgtaatcatttaggacaaatggcctttggaggaggcattacgcacttggctcttgcagtgccgcagagccactgagcggaatgtaaattttttacgaaatagctgagacacttgtatcattaacagctgtttcacatgacacatgacagggcacacgggtgggttgggttttgtgtggtggtggggtggttggagctgctgacccggtggcaaggccatcccacgctgatgacgatgagcgagtacaggcgagaaagtaggtaggccagaagggaggaactaacaagcacacgccctccatcgctaatgactgcgaatgaacctccttgacacaattatgaagggaagattctcggaagacagggagcaggtggctggggggcagggggtggtgatttcaggcgcccatttcgaggcactggcgcagcttaaaataatggaaacaaattgcaaaattgtttaatgttcgtggcgcgtttggcaatttgtcgtccttcatttgccacagtctctctgccacacacacacacacacacacacaaaagcagagggagagggaaatggataccggatataggacacaattggcggaaacgttcggccggggagttattgattttcgaatttaacggttttatgctttattggccaagtcaattgttagccatttgtttttcgcctctggctctgcctcgacttctgctttttgctctgtcttgtgcttcagttccagaaattccttggactccatgcccttttaactgcctcttcaatggctaaagtgttcactggtcttaagtgaactacatatataatttatgcgaatggctatattgctatctatattatttatttagtttctagctcacatactgtgttccttgaaagttgcctcgtataataataataaatgcaatgattcaataggttcctctcttcgagttcccactgtaccttttatttttcctggcttccggtcgcgcttcggcggctttgaaattggcttctccttttttttttttttgccttttcacttaaaccgaaatgtcatttcgattcggctccttacaaatggccattcaggtggcctccccctttcgccacccaaaagtccacccagtcaatttgtttgccgcttgtgtcttggcgaattagccgtttagccgcaaggccaaaaaggagatgggaaaagctgaccaggatcgtagggcgttccaggtgtgcgtgtgcagagcccaaggcagggcaattacttgcatacatattggggcgatatgggttcgaaacatgtcctgtccgctcaggcggcaagtgaagggccatcgcagaagcaggcatttgacctcatccttatccccggaatcgaaaatacgttagataagaaagatgttagacaagctccacgaaaaaaaaacggcagttggctataacttctagagcagaacttggcgtattggttggcagacagaagttggcaaatatttttacacaaacacataaaagaggatggagattgtctatgggcttttgggatttatttgtggaagttggccaagcgcccgaaaggtcgattcaatttccgttgaaatgagattaactggaatgtgcaaaattcatgttttgtcaaacttaattggaaaattgagcataagaaatttgagaaggaaaaatggtatgaatatttttactgaacgtccaaagaattcgctgatggacagctgcgtaaattgagaaatttccgtagaatatttcttagaaaagttagatgtgtttatggaatatatttttgtaacaagaactattgatttcaaggagcacactatttcaatcagaaaagctttagttagattaaatgggtaacaaagaagtaaataatgaataggtaagtcaaagtaagattgacattttccattaatttcaaagtatttcggtatttagccgtcgagcgcttctaattgaaatgacttcaaatgactggaacttaaaaagttcaaattaaaaattctcgaatcgtgttcaatcgaggaattccatcgctctgtccgtggattcattaggccaggattcgccatgccggcttggctcaggtgactccgatccgatccgacccctctaatttccaacactgctcactttgtaggccactcgaatgcaggtggcacacggagacaaggcaaaggtcctaccgtgtgcacttgctataaataaacgcacacacaggcacgtagcaggacttctttggtggcaggacacggaagcggaaaacgcccccgaggcgcgcattaattacgacttccggttggagctgctcgatggacggaaaaagcgctagcaggaagcaaggaaatgtcagataacaaaacagaaaacgccattaaaccgattgaatgacagcctgatcaaatgagtgaatgaatgaatggatagggagcactttgagttcggcttgaaatgtcacgtttcatcagcgttggaaaaaaaaaccaatcagataatattgaatggagagtccttggccaatgagatatctatttgatttcagtaaatatttaagaaacgtttttgtaaacgatgtagctattaaagtagcttttaaatttgaagacttgcccgggcgagaatctgttgaattctaagaaaaccaccaatcaaattttacgatgcacattttaggaattgaacaatctttatgggtcttttttttcccaaccacctctaaaagcaagaatgaggaaaccaaatcatgcaatcaataaacaatgatacgggcagagcaattccaattccattctattcagtggataccccctttgtttacacgaaagatttgttaacaagtgtgaagtgaaaagccgaagatggggaaattagtgtagaggtggatatatttccaaatgccgcaaagagtgggtgaacaaagggattattgacttgggccaagtttattttacgccaaatgagctcaaccgcaaaatatcgatttaaatcaatgtccatccaacttcccctcttttctcctccttttttttttcatgggctccggtctgttctgctctgccaagtggatttgtctacatcgtagggaggagggtgggggcttgaaaatggaaaatgaagggggggaaaggcggaaaagcagggggactgaggcaggtcacggtgccttgcctccatgaatgggagctcgtgcacatggctaaaaaacaagggaggcggtcctcagaagggggagggagcccgttggggcagcttctgggctggctgcgtcccctttatttttagacatatcgacgtctcagctataaatattatttctattttattacacattttattccatgcgatgttttcgttctttactctcccgattttctttcaaagctctcgagcgccaaagttgtacgtacttatattctcggctagggcaacatctggccacatcacgtgccaatccatttgaaaatcccctctcacagcatggatggtcataacaaaaaaaataaattatattacattgttggaaagaaggcactaccatgggacataacgtaaaatgtgcattaatgtatgcgcagcatcgggttaatgctgccacgaaagccatcataaaagattggttttgatttcaataaagttgtcacaaaacaaaagggcacaaaacagcatccgaaagatattagatttcagacaaagattctggttagttagaaggttttcgttgaaaagggcttaaagatcgattcttggtattttcgagataagcattcaattctttatggtgatgccagaaccaaactgagagaagcgcacatgtgacacttttaatacgtgataaaatgtatatttgataattactattgtttatattcatagaacatgaactgtagtcctttcgtctgtactacattagatgacaccattacttcattgagtcctaatgatctttcataatccatcaagatcatgctcataatcacgttccccacgttggccatccatcttcacattgaaaatcttaggaaatacgggccaaaacgagatcacttgtctacgaaaacgaaaacgatgcagtgtcggcaagttgaagacctgagaaggcccttagacccgcaaatagacgaagccaaagggaaaggcgatgggatgggctcactggcgaagtgaagaggcgttggcattgcgttgacgaccacgttacaactgactgaatgactaagtgagtgaatgagtgactgagtgacggagtggcgggtcatacacatatagcatatagcatatagcatatagcaccaccactggccgaccgatcccactggaaaaatgagatctttaagagcaaacgaaacgctggggcagtacaacacacaaaaacttcgcccgaaaacaagacatcaagatcaagccgatttcaacggaattccatttagtgctgggcaaataaataacaaatacggcaaacagaaccggcaacaggaactacttgtacaagtgaagtaaatggaggagaaacaagttcaagacgaaattaaggtgaaactctcttctgttctgtttggcaacggaaagtcgcgactcgggtcccaaaagccaccagagtgataaaaaaaatcaatgtttgagctggtcgcttattgcttgattctgtttggaaaatgcttgttgatttttgtgggcggaggatgagaaattcagagagttgggggtcggtcacagttcggtccttatcaacatttgtccaggcgcgcaataaactcgaatctattgtgttggcccaggtcattactctgcccgcaatggccaaaatatattgctgcggatgggtcgcggtattagatattagatattagatattactttttataccccaataatgaaataagacttttctgagggtgcagccaaataaatttaagtaaagcgttgaaaaacattgtaaatattatacatgtatgttaaagaacaaactggatcatatgctcattcttataaaagaactaataattcattaatttggtatttttcagccgatagttcttagtaaatattgagtataaacaaatttatctcaaaccgaatatcgtctcctacaactgaactcaaaaacgtatccttgtcacaagcaaccacaagtgcatatctcaacgctacttaaccttctatctgaatttcaatccggaccatcgagcacttgaagaacaccagtcactgtatgccacccaaatcgcccagccccaatcaagtgccttgacccttttggccagccaggaaaaaaaagaaaacagaattataataatcgtatattgccgcaatgccataaaagttgaccaacttgggagggattgcgggccgagagatattccatacatataaatgaactaatttggtttacgcttttggccggttttatggaccgcaatgccgggcatttgcggcccagcccgaaagccctgggaatttctcatagtgtaggagtgatggccgcacaagacagcaataatgcgggccaaaaacaattgtactaaaacataaatatactttattaaataaggaaaatacaaccataattctttggcttccatttcgtcttgttttccccactccccaatattttggccccatcctctgctgacgttgtctctgccctcgtcttttttttcgattttttttttgttttgtggactggcgtcatggtgggcgttttgacaaccacgcggctaaattctggccttacttaaccaaaaataattatgtgggatacgccaccactcacacatcagagccaactaaattaagcatattttagctatttttatagagaaataataataatttggctgcttcttgccatttgttaatggctttgatgaacagcgaggcgagaacatacaaacaaatatttccaataaaaatacccaaagatttatgatagccatcgcaagcagatgtacccttaaactaaatttaaaataaaatttgaatgatttgaaattgaattaattgaattttaagtatatattaggccatgagaaataaatttaagtgcacaaagatggttccctaattgaggctataatttgcaaagtaagctcatggccatttgatttttctcttttttaaaatatcgtagtacccattatgcgctagagtatcgaccatgatgaaaactcttttgcgaaacgctaacaacgataacagcttccacctgcatgtcccaccaacaaagccaaaggcaatgttttcctcttgtttttagttttagtttatccacgacttctccccaactatttcagcgacgtttgtgtctcgtttttgttttgtaatttatttataaaatctttccccctacacacaaccagaccaaaagttgagcagaagacgcacccaaagaaaagcaaaaaaaaaaaaaaaaaaaactaaactgacaccggaagttgtggctgcctcatctttggctcgtctggggtcttctgcccaatctgcatcttttactctccttcggaagccagacaaatgctttagagacaaattacttgatttgcatatacttatatacactctcaaccgaaaaacctctcaacattgtcaatttttttgtacttctacacgctcttcactcgcttgattcttattttatggaaatttatcaagaaattgtcggaggcgggatgcgggcgggtcgagcgcaaatttgacgcgcagtggagcgcagcaggagaataatcaagcaaagggaaaactcccagcttaccgccccttttcccagctgcgctccactgtcagttggccaagccggctttacttaagacggtctccattcattcattaatgcccaaaagcagcagcgacgcgggatagacatctgcaatacccagatactttttattacacgactcccgctccgccggcgaaaaacattgcaccagcataatcccaataagacgttgattcggcctgacggactagatgccattgctctagcaacgattacagcagcaccagttatacagtacaccagttccacagtacaccagttgcccagtagcagcggtagccagagtgcccaaagttaaagccaacaactgtcgcctcgaatgcacagtggttcaaggtcgttggggaaacgataatgccgacagatttacggtgaatggatcaacagatggtttatagattgcacgcattgatgataggtttatgaacaggcaaagaattgggaatactgatgattgtttgatgggatcaacagatgggcggcgtatatatgtatatataggtgtgtatattatcaactacggtttagaaacttaagtttataaatagcaataatcacatgatttgttttataggtattaagcagctagtttgcaaaaagctcattttaattattttgctgattattaaaaattactattacttcgccgcattgccgttatcaagccattttaatatttcaaataattaggtgggcatataatcagtggcctagagtgggtaattaaggaaaactagtttccacagatgaggcataatctgaatgcgatgcctgactgatgcccttaacagattgaaatataagtaatgccaggcggcgccttaaggctgactaagcaaacttttccagacccagttgctatcaagcgatgatcaggtgtaatccgatcgtttataaatagtctggcgtaacatcgaaaacaatctgcgctgtttggagcacttaatcaggcggtaacatcaacctgattatgcagcagggcgccattacttaagcatcataggaaatgagttcatacattttcagatcacttttctaccaatgtgcaatggtacaatcgtaaaaatgtagggaattaagtcagtcagtgactgtgtgtaacagttaactgaatttgtctcttaccatctcgtttgagcccaaagttgcacaaccgtggcggggaaaagtggtggaaaatcggacaattgggtgaacaaaggggcggcaacggggatcagatgaaagtcttactcaatccaagttgcagtctggggcaaaaagtaaaactcagtttgaatgcagcgcaactaattagttttgaggctgcttttcttgctgctgctgtaatcgcagtgggccacagacagcgacaattttcccactgaattttcactttttttctttacccgcgcttggttcgctacgtgcccggctaaagaaatcaaagaaaaacgagttaaacaaaagaatttatgagctacgaaaatcttttggccccgctggtgggaaaaaacgggtggggaaaatggtaaaaattggaatatgggatgggaatgggtgggagtggcaagcagttctatctttgttatttttcccattggcatcgttgtttttcccaaacaaaatttccataaaagtacatgctggcagtcgttgaattaaaatatttaaattgctttgtcaagccagatataaagcatattcctttaaatccaatgtgtacatacgcatatatttttatttaagttgtctaaaagatctcaattaattcctgcttggcgcacaaactaaatgaattacgctccgaccaacagaaactttcggagatttatgattttcgaaatgaaatatggctttggtagtgcaggatttctctaagctaaaatattgttctcctttcaaaatgtgaaccgaaggaaaggccaacgaagcttgtaaaattaatagaaatttatggttttatgggtaacagcttacctcaaaaacttgttacacaataacctttaattatataatatttaagaagtataaaaataaacaaaagcaacaaatagcatttaattgattttaaataggctattttaagtgatcgaaagatttactccgaagatattaaccaaattgggaatcccacatatatcaggaaattgaacgtgcagaaatgacaaatcaaagtaatcgatgaccctccacaagggtatcaaatggatgccaaatgcctttacgattatatatatactttttttttattttatttcggatttctttgtcgcgactctggcccgctaaaattcaaaatcatggccatggctcctagcatgcgatttcacgtttttcgttatttttatttttttttacgtcttatggtcttttagccccacatcacaagtagaaaacacaatcacaaacactccgaccgagagacacgcaaataaataaataaacatggctgaataaatgaatattaaatggccaaaagctttgaccaaaaagcgaaaaagtgaggaggtaaataaatacaagtaataatgggaagataataaacaaaaacgatattcgatacgcaaatggcagctagtgtttaaatgtttgcctggcttatcagtttcctttttttgttttgtgtttgggttttggcatttgtttagccgaagtccgcagcggaaactcaaagcctaggcgcatgcatccgcagaatgcgtcaaagatatttcgaattttgattgacgacgacaaaagattggacgccgacgtcatccagcaaatatttcaaagcttgaatttgaacttcgggcttgacgttgatatttttttctaatgcctttgccgcccacgtacgcggctaaagatacaacagcaaaaagatacaactgcgatagatacttctatacacacacacatacatgtacatacatttattcaggcgggagcgacgaaaccgcgagagcggaagcaactacttcgacagcatagaagtgtgtgcgacccaagggggcgtggcgggaggtggaaaccgggggcgatgtgcgaaagggggagtgacaagcttttgcggtttttagttacaccgacctcagcttgtttgtcggtacagtgggacgaatcggagtaaaatccatacaaaaatattattattaaaactactgaataaaataatacaacaaataaataaataaaaaatatgaaataggtaatataagaacatagtattagaaattacgcatacgtaatacttgaaaaaaccaaagaaattgttaacatcagaagagactcattttgattgtcttagataataaagatatacctaagatgaaaccaagctaaagagcggcaattcctatattattggttatcaaaattatgcctaggtatcaatttatcgcaagcatcgtcaatcatttcttgatactaattattgcatatcagcattccattcagcgtcactttgtccccactgtcttttgccttgcgctattgtcatttactttgcggcaagcaattacatgcgacaagccgagcggcagttgtttgttgttgttttagctgttgctgctgctgccgttgatatttgatgtttgcagcttatggtttttgtaggcgtggcccagtttattgttgctgttgttgccgctgtcgcagttcgccacatttggccgagaaaattgatgtcatgccgacttctttctgggctctagcgcgaaaacatgcgtaaaaggagctgcgaaaagacaacttctctgtccgacccaacccgctgcgcccccaacatgccacacgcccactctttgtgtacttaatggctggtgaaattaaaatgcctgcgcagcaaacaaacatgcacaaactttttcggccagcgaaggggtgtgggttagggtggcacgatatgtatgttggtcgagcaggccacagcatggaataatatttttggcatccaaaagttttggttatcttaattgaggctaatttcaaatgagaataatattaaagctttaatttcataaaatctagtattaaactgtttatggaacggatcaataatgtgctcttaagaaattcaatcaaatatattttccgcttggtcccaaatcaaagtattaatttggtttcatgtaaaaagggggcatcaaccaactatgggtggtgagtgttaacggcggtggagaggctgggaaaaggagggagcgagatgggctgcgtttaacagcggcgttggcagcagcactgggcgcttggcatctgtcaaacgtgtcatacgcaaaatagcttaactgtcataaaaacaacaagtgcgtcaggcaccggagatcgtaaaacgctttattacaataccccaccaattggagtgggggtacggcaaatgtgcggcgacgtttatgtctcacaagtgggtgaaaggggacggaaaggaaagggaatggatggtggtgtgggcaaggtgggcgagaggtaaacactcgaaattgcacaggaattccttgggcggtgtttgttgatttacataatgtttatcttttacgttttacccgatttgtttgatttatttatgaactgaccccaaaaccgacaagatttctgtgttccgcgaaattctgttaatataattagttcacacagtgtggataatattataatgacctttccagcgtaaacttttagatggctatatggatttagatggatatataaaatatcaattcaaagtaaatataacatccccatacaatttgcaatacaaaatcgaccgtattttggtttagttaaacatttcatctatttatttcaatttacctatttatttactttcctccgcttatttgtttgattctctaatttatttatttagtattcttcccactctcttcccctctcccatttcaccacttatttccgtttcctttcaccccttgccgctgcgccatcttcctcttctgctggtcagaacgccaacgcctcgcacaaatacacacggccatagttttttgctccatgcacatggctgtgtgtgtgtgtgagcgttgggggttttaataatagcgcacacacacattataaaagctcccgctggagcagagaaatgttgcactaaaaacttcaacgcccgcacttctggcacatatcaaacagcaagcagaaatcacaaaagcaaatacaaaactttcttgccaacacacacactctcacatttcgcttcccttttcagagagagtttgtgggcggaagaaagggctgcggaggcgcaggcagggggcggggcggtactgccacaataatagccttgttgtctgcggcaacagttatgaaaagtgcggaaaagagaggcagacacataaaaaacaggaagtttgttgactttttttcaattaacacaagggacggcgagaaagagagagagagaacaattctctgctgggggaattgcacaatttatgggcttttgcactatgtaaacaaatgcttatacaacagtcccctatgctgtttattaaatatgattttagttttactttgcttttgctgtattgtgtgcgtttttcggctatttgtttaatttaatattctcaatttgttgatttcctacgatttaactttaactttcatgttcatattatacttttatttttatttatatatatattaaataatttccacacatagttcatttatttagtttatattacttgatgaaaagttgaaaacaaaaccccaacataaatgcaaatcaaatcgcacgcacacctgcaactaacacccactcgcacacatacacatacgagtatagcgtacctctcacaacaacaattagtttgcaccaaaatgcactggacgtcgctgctgctgctccgctgcgtcgctgctactgcgctatagccgccaacgccgccactttgttgttgcctttggggctgttttacctttgtatttgcaaacacataaaaacacacacacgcactcacttggcggcgccgctttctttacacatttttcaagcaaacttttttcaaaagcacacagagaggcagaaaggcccgctagaccgctatttccgattccagttcgaacccgaatcgacgaccgtcccgctcgcgatgcaaaaacacaatgagactggcgcggcaacagctgaaacaaaccccaagtgttatcgatctatcgacgaagtgttatcgacattgtatacccgctatcaagttcggtgcgtgtctctgctaagttgggagtgtgtactagctatttaagggtaatttgaaattcgaaacggggacttcccgaaaaggtaataagcagtaatttaattttaatttaatttatttgtgctttatcccttatatatatatgtacatttcattaaagctaatggtataattaggtatttacagtgtttagctaaggctttcatctgaaatatttattaattatgtctagttgacctgtttttagtttttttttgtataacaatatttattatttattaaggaaaacaagggagaagaaaaaccttaattgacttacaactaacttaaaaactaagacttgaaacaaaagattgttaatattgtattttttgttgaactttttgtacacctgcttttatatgtaggtacttagtgtttgtgtaataaggtaagttcattattaattttaacagcttgttttggcatatttgaagttttttgatatgagtttgagcacatctaccccaaacaggtgacccatacattaatattggattaaaaattgttttaaaaattatgatcttattggatattgataatttagatttacgatttattagagggtacagtgtgcaaataattttattaactttcataattgtgttgttgatgtggtatttaaatgttagttttttatcaaaaattatacccaaatatcgaatgttgtcaacccattgtattggagagtctagtattcgcaactgtctatcaggaagataacgaggtttccttctttttgtaaaaaatatatgtacagggagtgtaagcttggagtgatgtataggtttatgagggactgctttaagaaaggcataattgattactctagtgaaagagccgattaa

SEQ ID NO: 15188 - DNA, 895 bp, DROSOPHILA
ggacggtcgtcgattcgggttcgaactggaatcggaaatagcggtctagcgggcctttctgcctctctgtgtgcttttgaaaaaagtttgcttgaaaaatgtgtaaagaaagcggcgccgccaagtgagtgcgtgtgtgtgtttttatgtgtttgcaaatacaaaggtaaaacagccccaaaggcaacaacaaagtggcggcgttggcggctatagcgcagtagcagcgacgcagcggagcagcagcagcgacgtccagtgcattttggtgcaaactaattgttgttgtgagagcgaatgtgtttcaatgatgttactgccttcggggcgttcgaatagtgatgtctatccgctacaaaatgccgcaaacacaacagcaacatcgaccggaggagcaacatcagctggtggcgcgggtggagcaggcggagtgggaggcgtctgtggtggcgtaggagcaacatccaaccccaagcccttgctactgacacgaacatcatcgcctcaattgacaacattgccgacaacaaatggctctgttgtccatgccacgcccacccgctccaacggatgtccgttgacccaatcctccggaatcccagtgacaatggcaacaacagccacagcaatggctacagcaacaccagacccatctggatgtacggaagtggagggtacagcatcgacggagctgagcactgggttagcaaatgaaactaactgcggcaccgggatctatgggccacttttgggtcaaagtcatgggggcgtcatcgctggcatgaccgaaaattggccagaaattgatggacacttggaggccatacaggaaaagctcaagcccggctggagtgttcatgtgggcaaggaggggaggctctactattgcaagtga

SEQ ID NO: 15189 - protein, 195 aa, DROSOPHILA
MMLLPSGRSNSDVYPLQNAANTTATSTGGATSAGGAGGAGGVGGVCGGVGATSNPKPLLLTRTSSPQLTTLPTTNGSVVHATPTRSNGCPLTQSSGIPVTMATTATAMATATPDPSGCTEVEGTASTELSTGLANETNCGTGIYGPLLGQSHGGVIAGMTENWPEIDGHLEAIQEKLKPGWSVHVGKEGRLYYCK

SEQ ID NO: 15190 - DNA, 6454 bp, DROSOPHILA
gaagtttaagttttacctaaaaacatataacaaataagtaagtagtttattaaagttagcatgcaataaacgcattactgaattttttaactacttactttcttagcttaaacttataattaactaaagagtaaaatttcatttcgcagctagataaatttcaaattgcaaacagcaaagagccgaagagttcagccacatcgtagtgcattgacctataaaaagttgaattcacccggtgtctcgaaccaccggcaacaaaatcatcggcattcaatgttgaatgccaaacggaacatgctaaaaatcgaaaaaactcgaatgcgactcagtgggccaagcacacacagatactcacacacatactcacacacatgcgagtaatgggggtttgtggccaacacagatgtagaaaaaattgcatgcactgcggcgccaactgaacgaaacttccgttgttctatggctcttttcgggggattcgccattcgttgagttgccgaagtcgggctctatctgttattgggcatttgtagttgtacttgtgagccagccaagtattttgcacaagcgtcgcgatcgcagccgctcagcctctgccaccgattctgccgctgctctgctcggctggcgctgcgaaaaagttactttatcttgtgattgctgagaagttttagattcagttgagcataaacattcctaaggtgtggtggtagaatccagccagatctgcgcgtctatatccaatacgaattgggcaataataaattaaacagcgaatacagcgagtcgaaaagtgatttttctgagcgtgtgcagtcaataaagtgctttcgatcggcccgagcgcagtatgcaacatcctgcggcgagcctctgaccaaacgaactgaacgtataaaacgcacaaaaaaaaaaacgcccaccgttttggatacttcaagttttaggccaaggataagcctgaggataactgagaacccatatcatcatcatgagtatgaactaccacaactacaacagcagctcgcgattcgaaatggtcgtggagatagccaatatcgcgctggatgagttcaagacccatcacataacgcgcaactatacgggcctcgtgcagcgctactaccagctggtggaagaggattacggcggtaggtgtcaagtgttcgggtgcttttcgaatatctggtgcattagccgacttaattataaatccataaaaatgacgaattgccatgaaattgtcattttttatggcctacaaatcgtaacacaaaacctaaatgccaaacaaaacgaacacgagatggcaaagaaaaaatgttaaaaaaaaaaaccacacaaaaaagaaaagtaaaaagacaaagccaaaagttgagccaaaaaacttctaggacaattaaaaatgatttcttgtgtgcgtttgtgtgtgcgcgctctttaaattgcgaccttggcagtgtcaattgtatttttgacaattattaacgtaattaaaatgtatttacattgcttatcttagacatttttatgatgcgaccgtcgccatcgacgactttggttttgcttttggtttcgccgtgtgcagctgagcatgtatttattaagtacaatagcagccggagcacttcgaacatgccaattgcctctggggtctgcccatgagttccgtttccagaggtaccccatattcacatatacactttcctggcaatgcgaaaagtcggcggtgaaaggtcaatggcaggcagttgcaattaaaagcagtgcaaatagagttattttttcggtggcttagtgatactaaagcgggtttaagaagattacttagtgccaaaatcacgcttacgaagcaaaaacgttcgggggtttttttggccatagacaaaagacttagaacacaaacttgaaaaaagtaacagttccggtccgtgagcgaaagacttaggacacgaacttgacgcacaaattgggagaaaactcgagacttttttatgttagtgctatgcaaatttattaaaaacaaaatatatattaaaatatatatatatatacaaaatatatattattatattatattaaatatatattaacgagatatattaattttatgatacatgaaatataaaggttttttttttaatcttaatttgtagcatattttacatcataacaaaaaatgtaaagcagtgtacagacaaatatttatagacatagaaatatgaattttctctagtttttgtatattatattttagcatcttaatattttagtagaagcttctgtttgacttagtaaactaagttatccaaatgacattgaggcccagaatagaaccaactgctcagtgcaacaggtcaagaattcccggcataaaagtgatcccaagcagccaatggaatatttgtagtaaacaactatttgctggcaatatcgtcgaactggatgataaatcataactattgtagtaaacaagcagtgttatggaaaagttggtccatttagaaatgcaaagccccttgcaattaattaccatatcatttctgtggggtttctttaaattaccgggctatgacgtcgatgtttactaagatatggaataattccctaaccggcatgccagcctcgcatattttactattattgctcagtgtagaggcgattgtgctgacactttaaacgctacaagtgacaagttgactttatatttagccacgatttcattcagctggcatggattgaatggcttggctgaaactaattaaatgcaaatcgaagctgtttcgtaccgtctctgcattagcataggcaaaacgtatagcaaatgaaatgaacaacgaatggtggtaattaattaggatgttttgcgtctaaattttacagatccgcgagcaaagcgcttcccgctgatggagcacccaatgttcacctttggcatggtggccgtctacttatcctgggtcctggtcattggaccattgttcatgcgcgatcgcaagcctttccagctgcgccgcaccctggtcgtctacaatgccttccaggtggccctcagtgggtatatgttctacgaggtgagttcgaatctagagattagcatatagcctaaggttcgtccaactgatatcattcccttttcggtttctcacaaatagcacctaatggcaggctggctgaactactacaatctgaagtgccaaccggttgactactccgatagtcccagttccaagcgggtaagtggtcgcaaccggtcatctaagttctgaattaaattcactgtcagatcgaaactcgctcatctccaatcaaatttctatttcgagaggcacgcgtggacttaaggagtttatggtctctttaatatgattcggcatttgtcatttgaccggttgatagttggttgttggtcggtctttgttttcgcctcaccttgccgggttcatcttccgcagttggctagcaagttcgttgcctctgttttgtgatgactcactgactccggcagactcgagagtcatttagttcggctcaaagccacttttttgaccagtcatagagcagatacgaaaacaaccacaaataaagtgtttttaattatgtctccgcgacagcacaaagttcacattcaaattttagtgagctcggcaattaaatggtcagcttcttaatccaaattctaccttttatggcttttcaagcagccatttgttacgcctgtccatcgattgtattcccctttcccaggccacacagcaaaaacaattaatggcaatttgaagttaaatgcacaattttaatccaatttgtttttgcaccacaaatgggtcttaaatgctagcagatttgtaacaaaagctgaaaccaacttaccgatttttctatactctaaatttgatttaagaattgcagatgaaatatgaatattactttctcaaagttttaaaatgttttctagcgaagcagcattcaatggatctactttacgtttttattttttctcacttaccaaacctataaccttttcctcattggaatcttttattcttgtgttaattaaaccgaaatcaatcgaatcttcatagagagtatatgaattgcaagcatttaaggcctccaatattacggtcagaaaaatattagagacagccacaccctcaaggttgttgtactattggctagtttacaatcaaattaacaacatttgaagtggctctaaacagtttggcttgctcagccgtttgtttgcaattggaattgtacttgtggtctgtttgagctttaaatcaatagagcataaattctgtgaattaccactgaccacaccggaccttttcctacacactcattgatcgatttcacatccgcaacgaaaacgctccaaaaagccaagagaaatataaaacccaccgagccccagagacaagtcaataaactccggtggaccctagagtcattagcgtctgtcatctagttttatggtcatttccataagtccacggcgccttagcgaagtcataaaagtcagcattgtttacattgcgcatacgcagcgtgcgcccaaacgtttcacttgcaaaacagaaacagcagaattcttgctcggaaaatgaaaacaaaagtgtttgtttgggtattccaaacgagaaacgaaacaacgcgaaacgaaactaaagaggcggcgaaacgaaaagtctgtcaatgtcattgcgcaagttcttcttctgcggtttctacgctaattggccacgttgctcggtgggcgcgaattgcataacgaccttgctaggtcaaccgcaccgatacaccctactcctactcccaccctcactctccatctcattccgcagatgctcaacctgtgctacctgtactacctgtccaagctgaccgagttcgccgacaccatgttctttgtgctgcgcaagaaatcctcccaaatcacctggctgcacgtgtaccatcactcggtaactccgctggagacatgggtgctggttaagttcctcgcaggtgagtaaataactagtaaaatgtatttacattagatcgaattcagaattttatttccaaatattaatagcaatttatgtaaattagaatcaataattaaatatgaccatgctgttatagcacttcatgttccatgaatgaaatctcttttatccaaaattctactttctatgattttgattccggatcttacaaatatcttttactataatctgcttattccaatctcatgttacaggtggaaacgccacgttcccgaatctgctgaacaactttgtgcacgtttgcatgtacttctactacatgatggccgccatgggacccgagtacgccaagttcctgtggtggaagaaatatatgaccgagctgcagatcgtaagtacaccactcattaaatgcgaatcagttccagcccagataacgcccgaaatcaaatgaaacttgttcagaattcttcgctggggccaggcatgtgtaaaatgtattttttttttttcggagcacagatcgaagtcgatgttagtcgctgtgggctagcaattgcccgactgatttggccaagacgccgccaaaaatttaagccaaaatgcaaaccagttagaccggcagtcgtgccttaaagttagacttagtgctcagctggctctgccacataaattgccattattcagtgggcccaaaggcacgcacaccatctagcatccgcggcgaccagttgctatccgtgtttatattgccaaaataaaatgttggccaatgcttctaactagccaactgtgtcttgcatttgtctaaaatgccgaaatgccactgcaaaaaccaagattcggcctccgccgttttgtttgcgctagcgcttaagtttttcccaaatctttttctttttttttgggggggggggggccaaaggccaatctctgggccatcgatctcaaaattctcgttgagagattacgcaacattgctagattcgaaagcaaaagtaaagcgaaatcgatgcgaatccagagattgtcgccaatcgagtgatctagatttcgcggctgctttctggtttttcccatctgattttttatgctagccaatttggcattgtattagattggctcttagttggatcttggctccatatgaacggttctttgctggccagtattttttttttttagtgaatatgcataattgaaatacgacaaacacatggcattttttctcaatcttttctcgtttccaaaagtttcgaaattctcgaaacgcatggagatattggcgagtatagtttgttctgctggctgactgactggcctccttcgaatcgagattcaatgctgtagttgttattgtcgcagccgctagttagtgaatcgccttgaagctctgctccacagttgagttgtcaaacgttcggtgactaagttaagtagcaagcacaggtttt

SEQ ID NO: 15191 - DNA, 789 bp, DROSOPHILA
atgaactaccacaactacaacagcagctcgcgattcgaaatggtcgtggagatagccaatatcgcgctggatgagttcaagacccatcacataacgcgcaactatacgggcctcgtgcagcgctactaccagctggtggaagaggattacggcgatccgcgagcaaagcgcttcccgctgatggagcacccaatgttcacctttggcatggtggccgtctacttatcctgggtcctggtcattggaccattgttcatgcgcgatcgcaagcctttccagctgcgccgcaccctggtcgtctacaatgccttccaggtggccctcagtgggtatatgttctacgagcacctaatggcaggctggctgaactactacaatctgaagtgccaaccggttgactactccgatagtcccagttccaagcggatgctcaacctgtgctacctgtactacctgtccaagctgaccgagttcgccgacaccatgttctttgtgctgcgcaagaaatcctcccaaatcacctggctgcacgtgtaccatcactcggtaactccgctggagacatgggtgctggttaagttcctcgcaggtggaaacgccacgttcccgaatctgctgaacaactttgtgcacgtttgcatgtacttctactacatgatggccgccatgggacccgagtacgccaagttcctgtggtggaagaaatatatgaccgagctgcagatcgtaagtacaccactcattaaatgcgaatcagttccagcccagataacgcccgaaatcaaatga

SEQ ID NO: 15192 - protein, 262 aa, DROSOPHILA
MNYHNYNSSSRFEMVVEIANIALDEFKTHHITRNYTGLVQRYYQLVEEDYGDPRAKRFPLMEHPMFTFGMVAVYLSWVLVIGPLFMRDRKPFQLRRTLVVYNAFQVALSGYMFYEHLMAGWLNYYNLKCQPVDYSDSPSSKRMLNLCYLYYLSKLTEFADTMFFVLRKKSSQITWLHVYHHSVTPLETWVLVKFLAGGNATFPNLLNNFVHVCMYFYYMMAAMGPEYAKFLWWKKYMTELQIVSTPLIKCESVPAQITPEIK

SEQ ID NO: 15193 - DNA, 5314 bp, DROSOPHILA
gcgcgcatggaacttggtgcattgaatgaagcacttgtggacgccaatgaggcgatgcagcaggccgcccaaagcggtgtgctctgcgaagtggtcgaggtgctgaagcgcatccagaccgagctgctcacgcggatcagcatcagcagcgaggatcagaccggcaggatgtcgaatatcggcggcggggcatccgtcgcatacgaatctcatcatgagatcaccgatttgtaaatgtcgattgttgtgtattgttgtactcgtcgtatacccttcgaattaatcgctattcctacttaagagctaccctagaccttaatttttgctatttattgccttcgaatgtttttaatttaaaccaactgaaactatcattgtaatttgtttttaaattttctttttaattgtgtctgcgcatgtaaaaattagttttatactctgatttagcataggcatcagttcttatccataacgaatattaaataaatgcgaattcttttaagatttaataaacacattattattttgatattcgatgcagacttttgggggtaggctcgggcactctgggctaagattataaaacattctttaacttattagtgcatagttttgagctgtttttaaataaaacattgttgaacaacggcaagggagttgaaataactgggaaacattttaacgtttgcagaatatattacaaattttcacatttaagagtatttaaatttatgaacaaaatttaaaacaattatgtgaacttatatatatgtgtgtgtatgtacaattaaagcttaaacatttcgggggagaataaaacataggaatgaaatagtttgaaatgaaatgtgggcgtatttaagattaataaataggaagtttagagagctttaaatgctaatttgtatactagcatgagagtgaactttccataaataagttgtgtgttccaacgtatacttaagtacatataaaattaacaatggtagttctcttttatctacgaagattttccattaagtttactcagttcagttggttcgccactatcgccatgtaccaagcgggactcgacgagcggtgctgaaatctgcaaatgcagaacgtagtcggcagctggaagaacaaagtttcagttacgccaagagcttaaagtgggaagactacatggaaataaataaatagaaatgtgctagatgtggcatgttgttttgggagtaatcaaacatgggaacaagctgtggatgaaagcggaggaaacgaaaagcgtgagatttttagtagcgctaatgatacgtgtaaatgaatattctactaaaaactcctctcactttgctccaaaaggaattccagatcatcggggcagtctatcgtggggaaatcaatattagtcgactccttgaggatcacaccaatagtcttgtccgcactcatcagaaacaaaggtgcattcgccttggcgagctccttttgcaatgagcccattccgcgagctgccgtaaaatcgaattctggaagacagcacatttaaaaacctatagcaaaaagtaaatcgtaaatcataccatgcacgtgggcgcaatccaagaccacaggtgcggttccatgaatggtcagagcttttgagatgcccgaacgaacccattcgactgccgggaagtacagtgaactgtgcttagggcgaatcagaatataattgatgccattggtggtttgcagtttggagacactcagtacgggtcgagcggctcggtaaaccagaaacgccacatcggtactcacgcccagcagaagaccgatctcgacgcccacagccagactcattacgaatgtaatggcacctggaagcagctcccgccggctgcaccgccacagcggcttaatgacctcgaactcaatcatgaatatcaccgccgagatgataaccgcactgagagcagccttcgggatgtactggaaataaggtgccaggaggccgagtgccaacagaaccagcacgcttgtgtagcagcctccaagcggcgtccttactccactggcgtggttaacagcgctgcgcgagaaggatcctgtcaccggcatggagctgcagaacgcgccacaaatgttgctcatggaaagtgcaaccagttcccgcgtcggactcagtccagctcctccaaaggctttcgaaatggctacatttccaagcacagctataatgggtaggattagcatggaagggcccagttccgagagctgaaaaaaagattaaaaacattatagttaagttcttcggttatcaggaagttggtcgatcgtggaattctcctttctatttttatctacattaaaaaggtgcaattaactttataaaattggaacaaaatccagagagggcggaatacaaataaactcattttaatttattctaaagccgagcgacaatttaaaacaagaaaaaggtatcttaaacaaagcaacgaaaaggcagactggcttgatgataaattaattcggtgacaaaaaaaagctaattagtctacttgtgcccacataccatctgttcaaagttctgtctgatctcagtgccattcctgtccagtatggtggtctcaaactttggcagtgaaacgttgggcagaccgcttttgacctttccagtaaggatgaacgggcagctctccatctgctcacatgtgctgtaggccagcacactggtcaccagtacgaccagcgcattccgaccggtgcctattacccagatgctaccacttacaagctgctgtgttcgcaagttccggattcgaccatccagcttaacgtcttttagtttctaagggaattgaatgggtttataaagtagtttcttaggatattttagactctcttacccgcagaagtagcaaaactataatggaagtcaaaccaagggtaaaatcaccagttctaactttgtgtagatttccgaacacggagcgcatggtattgatgaaatcagacccggatccaccacgcagtcccagcaaaccctttagctgcgaggtgccaatgatgacggcggtggccgaggtgaatcccacggtaactggcagtgatatcaggtccaccagggcacccagtttcagcactgccatacccagctccacaacaccagagatgaggcacaaaagtatcgcgtacgctggacccgatcccagtccaaatcccgtgtgccggcttgtcatcagtgcgagcaaagccgtgggtccaatggtcacctgccggcagctgcccagcatggcgtatataataccgcccacaaaggcggagtacagaccatattggggctccagtcccgccagcgtagcgtaggccagtccttggggcaacaccgtcaggccgaccgtcactccggctatcagatccgcaactgcatcttggccagtataaccgtgcagccactttagacccggcagcaggcggtatccccacttcctcaggctcatggcttctatttctgtgggataaatacaaaaaaaaaaaaagaatgagtaatgtattggagccataagaacatacttcccagctcattaccaaaaaaagggaattgaaaatattcaacaagattaaaatagaattacgtcgtatatattgaagatcgcaggttcaacgacttttccaatttcgcataattatacatttgattatgagacgtctgcgtgacagacgaaaagatagaaagacatcaacttatttatcaccaataagcaagtcataaataaacgtcgtagaactcaaaacaatagaagaaatacgagtttatggtaaataaaaaagaatagctgccagaattacaaatggctcagtgagtaaactagatggtataaattaaacaaagctaaccgaaaacaggtttgcgttattttacatttttttgaactgaaagtgaatagaaatgccaaaagaaattagcaagaatccaaaggcaatcaaagctattataagcattacaaataagttgtctcaatcttcgcatagtattgcattcatctaaacctatttatggaatgattgttaccacatttaaaaataattaaaattacacgtttcgctcttctcagagctattccacttcactaacaatattgcattccatccaaattaaaacaatctaatccaaaaagtctatctaaccgcaattcgttgaatttggttgaaaactcacgtatttaaacaaatgttttgatgttgttgtcgttttgaagggcgcgttccattcgaaatgcgagttcttttcggttcgaattcttctagaattctagaaagaacggagagctctggggaagatcaattcggttcggttgctggccagagactgaaaaacgatcgcgtgaacgaagaattcctgatcagtgatcacacgaccacctcaattagctgaacaactggcgaagttgaaagtattggttcgggtcgcctaaaacgtgatcaaattgctcgaccgaaggcacgagatacaatgtgcactttaattgaatttcgctttgtttacaaactattcttttcaatttagagccaataattatggcgaaattgtttgtttgttatgtcatttgcaaacgccacaatggcaaatattgccaatcgcttgtggaaagaatggcgagtttagaattgctattagttccacaaagcaatgataatgcgatttatacaatcgacagtcaacaatttaacagcgtttagtgaactattaggtagcattgtgaaataagtaatgaatataatgtatcttaaaataatcagaccgattagagcgactagaatgattttctaaaaacgcctataaaggggaggtttaaatggaacgttcttgttggatcggtttgtaaatatttaaatataaaatagaaactaaataaatttgacatttttgcaacacaatctagaaagtttccttccttgtaggtaaactattgaattccagaggtcagataagaagaaaagcccttatcagtacggaaacgtgtagttcaagtggttttatcagcattttgtaaccggattgagcataaaaatgcgaaacgtgcgaaaagtttattaaccctttgaagaaactggagaaatccgttctttgagggtccacgaaaccaaaataattggagagatcagtcgttatgtaccgatgtacgtacatgtatgtatgtatgtataaacataattgccgattgttgacagacggcgagctttatttatcttatttgctttctttttttaatttggcatgtgtgaaaaaactagttttgcactgtattggtataaacgtaaacaaactgagaaaacagttgattca

SEQ ID NO: 15194 - DNA, 1907 bp, DROSOPHILA
aattgatcttccccagagctctccgttctttctagaattctagaagaattcgaaccgaaaagaactcgcatttcgaatggaacgcgcccttcaaaacgacaacaacatcaaaacatttgtttaaatacatgagcctgaggaagtggggataccgcctgctgccgggtctaaagtggctgcacggttatactggccaagatgcagttgcggatctgatagccggagtgacggtcggcctgacggtgttgccccaaggactggcctacgctacgctggcgggactggagccccaatatggtctgtactccgcctttgtgggcggtattatatacgccatgctgggcagctgccggcaggtgaccattggacccacggctttgctcgcactgatgacaagccggcacacgggatttggactgggatcgggtccagcgtacgcgatacttttgtgcctcatctctggtgttgtggagctgggtatggcagtgctgaaactgggtgccctggtggacctgatatcactgccagttaccgtgggattcacctcggccaccgccgtcatcattggcacctcgcagctaaagggtttgctgggactgcgtggtggatccgggtctgatttcatcaataccatgcgctccgtgttcggaaatctacacaaaaaactaaaagacgttaagctggatggtcgaatccggaacttgcgaacacagcagcttgtaagtggtagcatctgggtaataggcaccggtcggaatgcgctggtcgtactggtgaccagtgtgctggcctacagcacatgtgagcagatggagagctgcccgttcatccttactggaaaggtcaaaagcggtctgcccaacgtttcactgccaaagtttgagaccaccatactggacaggaatggcactgagatcagacagaactttgaacagatgctctcggaactgggcccttccatgctaatcctacccattatagctgtgcttggaaatgtagccatttcgaaagcctttggaggagctggactgagtccgacgcgggaactggttgcactttccatgagcaacatttgtggcgcgttctgcagctccatgccggtgacaggatccttctcgcgcagcgctgttaaccacgccagtggagtaaggacgccgcttggaggctgctacacaagcgtgctggttctgttggcactcggcctcctggcaccttatttccagtacatcccgaaggctgctctcagtgcggttatcatctcggcggtgatattcatgattgagttcgaggtcattaagccgctgtggcggtgcagccggcgggagctgcttccaggtgccattacattcgtaatgagtctggctgtgggcgtcgagatcggtcttctgctgggcgtgagtaccgatgtggcgtttctggtttaccgagccgctcgacccgtactgagtgtctccaaactgcaaaccaccaatggcatcaattatattctgattcgccctaagcacagttcactgtacttcccggcagtcgaatgggttcgttcgggcatctcaaaagctctgaccattcatggaaccgcacctgtggtcttggattgcgcccacgtgcatgaattcgattttacggcagctcgcggaatgggctcattgcaaaaggagctcgccaaggcgaatgcacctttgtttctgatgagtgcggacaagactattggtgtgatcctcaaggagtcgactaatattgatttccccacgatagactgccccgatgatctggaattccttttggagcaaactgccgactacgttctgcatttgcagatttcagcaccgctcgtcgagtcccgcttggtacatggcgatagtggcgaaccaactgaactgagtaaacttaatggaaaatcttcgtag

SEQ ID NO: 15195 - protein, 592 aa, DROSOPHILA
MSLRKWGYRLLPGLKWLHGYTGQDAVADLIAGVTVGLTVLPQGLAYATLAGLEPQYGLYSAFVGGIIYAMLGSCRQVTIGPTALLALMTSRHTGFGLGSGPAYAILLCLISGVVELGMAVLKLGALVDLISLPVTVGFTSATAVIIGTSQLKGLLGLRGGSGSDFINTMRSVFGNLHKKLKDVKLDGRIRNLRTQQLVSGSIWVIGTGRNALVVLVTSVLAYSTCEQMESCPFILTGKVKSGLPNVSLPKFETTILDRNGTEIRQNFEQMLSELGPSMLILPIIAVLGNVAISKAFGGAGLSPTRELVALSMSNICGAFCSSMPVTGSFSRSAVNHASGVRTPLGGCYTSVLVLLALGLLAPYFQYIPKAALSAVIISAVIFMIEFEVIKPLWRCSRRELLPGAITFVMSLAVGVEIGLLLGVSTDVAFLVYRAARPVLSVSKLQTTNGINYILIRPKHSSLYFPAVEWVRSGISKALTIHGTAPVVLDCAHVHEFDFTAARGMGSLQKELAKANAPLFLMSADKTIGVILKESTNIDFPTIDCPDDLEFLLEQTADYVLHLQISAPLVESRLVHGDSGEPTELSKLNGKSS

SEQ ID NO: 15196 - DNA, 13635 bp, DROSOPHILA
tatgtttaattcaactgcaattatcgttaaagacgtatttactgtttgtgatccaaattcattgattaaacgtaaactacacaaagatacaattgttgcatgggcaaggtttgaagtccgggttcgcaaagtacccacaagtactcgatccccgggtctcaaagacgaggaaatcacgagtcaataagccaggtttaaaacttgcaggtgcgtcgtcaatggctcgcaatattttccggtcgggccaaatccgaaaatggcctgcccgaaaattatacacaccttacaggaccgagtgttaagagtacttttggactctctgcgaacccatagaaatagagcaggaacagtaaattgtacttaattgaaaaatgatataataaaacaccgccactttgaaatatatttacttgaatcaaataatattaatgagtatatataactttgtacttgaataatattttatttatatttaccttaagtcaataaaaattctaataaattataatcacccaaaaatgcattttgttcaaatgtcgaggggagttcttttcaactgctgattggaaaattgatgccttttattattgatatttgcgaatactgattgacaagctgcgaaccttgagtaaacgtattcttcccaaaaataaaatataaaataaataaagaaggctaataagtttcatagtggggtgtaaattaaacaattcaaaagaaccgcccaactgtggtttataagcttggcgcactacgccaagtaaaatacatgtagaaaacgtgacggcgttgccactcttattgtatttagctagtttaaccaccaaataaacagcgaagttctcaaccatatgtgagttgcgtagccatactacatttgaagcaaaaaaccctagtgtcgctgccgtcttgtggtattttcgttggcccgaaaaacggtcctaccaaaatggtacctccggccacacggatgaattcgtcgtcattcgtcggaatcattcgaactttgaaaatggatcggtagctgggaaggaaacttaaagcgaaatacgcaaagaaaacggcttttgtccgctattcagcgattttttttgtgttgtaatcagcagaggaaattttaacgaccaactccaccgccacaccagccatctccagcagctccggaaaataaaatagaactaaattaacgcctccatcactacaacaaccatctcaccaacaactacaagagcaacaaccacagcaacagcactactgcaccaagcccacaaagaagaggtgaaacgcaaaaatcgcaatacccgaagaaaaaaacaaaaaatatcgcagataaccgaaaaaagcggtgcaaatagataaaccccattttttgcttgagcttttttcgcctgtgtgatgagagaaatcagcagcagccatcgattacaacaacaacagcagccacaccaacgacgactcaaccaccaaaccaagaataaataaacagcggagagcgatagatagagagagagagagagaggagcatctgcagcagaattgaatcagttttttcatcaaccgccgcattgtattaaaaacacaaaaatcccataggcggccaccattttgattttgaatgaactgaacgagaagagaggaaagagcacgagagactgagaaaaactgctgctcatttgttgcaccgtaaaccctttttccagcttgtaagcactctgcctgtctcactctaatcgcgtccaggagcaccgtacagtaacaacaacagcaacaacatggtggagcccaagtccgggacagctgcttctgccgctgctgcgaaagcaagcaacaacaataacaacaaccacccccgtggatctggggacagcggcatccggagtggcagcggcatttcctgcagcaacacggacaacagctgcagccagagtcagtcaggtgagcaatttgagtttctagaactctgggagtttgacactaaattcccatagctgagaagcaaactgtgatgcatgagatatattttggaaaccttctgaagagatttcgcatatttgcgcttcgtgtgtcaccagtttaattttaactagacaacatgttaacagaatgatgaaataattgcaaatatttgctctgactgtgaatttggcagctctttcgtataaatttgaacttctacctattggaaattcacctgtatctctgtcgtaatattgttgtattgcctaaatataaagtatatttcgtaggcaacagttatttgcatgccaaaagaaaacaaaagccttatttaagcatataattattattttgagaatgtgacaaacgttctttgcttcttaaagttgtacctataaaatacgatttgtaggatatttctgctaaaatgcaatggtaaaaaaaagatatacgttaatgtaatattttgtatcggaagttatacttcctctaaagttcctaaccatatgtatgtattattctgcttgtcattgggtggggactgactaccaatcagagaaaagacccgaccattgctcctacgctttcattcagtggatttctagtcagttatcggcaaagctgggccaggcagcactttcgtttcgtttacccttgctaatcaatcgaacgaactagggagcattgactgactgggccacgttgcgcaccgggtgccgcagtgtatttccttgacgtcacacgatgttcgagaacatgcatgctgtctgcctgccggcgcccaaccccaccacccactccgcttcccttcacccaccccgcacagtctgtgtggtgtttacagttgttttgtttcgccaagagaaccccattgcatcattcgactggggccattaagctgaatataagtgtgtatgtgccctaattttaggggtattccagcatctggactttataaccatcactgggggtgttattattgtacacaagttcttaattatatgtgggatttgatatatgctataaaataacaatgacaaagatcaactaaatccactaattagtcatattctaactggaggttaaactagaagtttgttgttttcgtttagatagtgattatagtccatactttgtgtttatcaaagataatcttatgaaacaggacagattgttgtgtaaatatgctagatacggttgggttggaccactgacatccactaattccactaatatcctataaaatcgggcataagtgagctgctttgaaaaatcatgaaatccatatgggtaaactgctgtacaataggaatatattcacacatacatatgtagatttcagcaccaatagttaccctttgtaattagaccagttgactggtataaattcgcataatatgattatcaatttaagcaatactagattccaagcacaaaagggtattccttttccctgccattccaccaacaccaccaaagctgccggcgaagtgagagagacggcactagtatctgtgccagctagccgagaccgagaaattgaaattgagcgtgtgcaggcagttatggaaatggaaaatgactcatgatggctgatcgattgagcgtaatgcactgacactcgtgttcaaatgcgtattcgtgcccaaaatgcagcgaacgcggcgaaatgtgaacaaactacgattataaccttcatgacgtttattgcacttggtgtgacgttcgttgcttggcctcccacacatataaaatgtgtgcgcccattaggagttgtgctggagtggattttgcagctgcaatcaactgagtgcaaaacgctgtcaattggagcccaccagctggaaacttgttttccccccaacgatccataataattttccataattatcgagaagtttttcattctatcgaggcctatcgataggaggacatctagtggtgcctacgtgcagcctcctccgattcatgaaatcagcccaatatatctctgtctcccttgctcgtttgcgcaaaagccctgagagagaaatttattttttagctgtggcaatgccgcagtggaaaaaacgtcagctgaggcatatgtgttgtttactgtgcaaaacgaaaacaaagcaagttaaatgtagtttttgttttgctgtttgccctttccacttgtttgcttttaaacagaactcgcgcacatcacaccaccttcattggtatgcattggcattggtgttggagtctgtctctctccctcgcacctctgctccacgtctttcacgacattttctcgggcatcgcgctctcacactccaaaacgtacaaaaacaatgaaacagggctctctctgcactgaaagaaaaataacttgtttacttcaaattagctaaatatgaaaacattaggctgttcagtgaaatacgtttagtttatgtgccactgtaaaactatgctctaaccgttaaaaatcaatcatatgccacaaccatatttcttcctgtgtactctctttttacaagaacttaattgcatcatgtaacgctctcccgcaccggtctcttcctgtgccgctctcttaaactttagtctctctctttcgaccgcttctcggtttgtcgctttgttattgtttttcctgttgctgtttttgttttgcttgcggcgtgtcggacacaaccacaaagcgactttttgtcaaaactggttctgtgtccaatatgatgtggctttatcgccgctctctttccgccgccgatgcgttggtgtgcgtgggcttattggccaggttgtgtgataacacaggtatcggtggaggtacaggtatcagtatcggttacctccttaatctggcctaaactagtgtgtcaatatttacacccctcgaaagacaagaactcgatcggcaaacacatagctaatgttttctctttgccatcgagatctcagcaaatatgagtttgtatcgaccaactaacttgactcgatgaattgacatggccggtaattgttgtgcattcgatttgaaaccggatttttgcaaccagaggcgtttctcttccgggctgcttttttaatttgagtgtaagcaaaaagattgacttattgtttttgttgtcctatgacgaacgacactcgcaattattgagcaggcttctaactacgtacatatctatgcttgtacatatgtatgtacaaagtatgtttatcgctacccttgcaaacagcgcattataaacatatacatacatatctatttgttacaactctcgctctcgtttcggccgctctcttcgctcgccgcccaccgctcttttttcgctcttcgcgcaccgcggtagtttggttttcagtttttgtcgctcccccgaaagcgggcgcgtgtttgaattcgattctttcctcgttggcgccgcgcgacgtaggtccgcaaagatttgtccgtgtttttccatttctttcaaattcatttttttggccaattggtttttgtcgccggtactaatctcacataaacgcgaaataaatctaattcgaaattcccggccatttgatctgaacaattttccctgtgcttccaataataacaatcattcagcagtaaattgtcgttttcgttttcgtcggtcgaaaagggaaaagtgtacttcaaatcgatgatgatccaaccggaatagggttaaaattagcccaacatcgtaattaaacaaacaactaattcgaaactaaagcaataccatatcgacggggagcaatatatatcgaaggcaggcggttttatctacgcattgcaaaaaacgtgccgcccagaagaagaacaagcagcagaacgggcgttgcttagacaaattgcgttgcgattaaaaggcgaacagcagcagcagcaacaacatcagcggcaaaaggcagcaaacatgttaggtaaatacagcaacaacaacgatagcaacaaagtctaggaacgagatgagatgagagaactgtcgcacacactcagccctgctcactcacacccacataacgtgatgggcatgtgcatctgtatgtgaggggaaacgtttcgaaatgccggtttttgcatttttgttattgttttagttccaagtttcctctacattttacaggctgctaaaagcaattacattttaggcttatctttaaacaactgatttttaatttaaaaattaaagtaactaaaacgaccttgtatgcatataataactatggtaatatattcccatttggttattctctaatttaattcctcatcttattttttattgtcataccttatgttctggttctctcgccgttttcatacattttttcgcttttacaatttcatttgctgcgcaataattttctgcttctttacagcacacaaacacaggcgtgcagataacgttcgtgtgtgatgtgtgcaagagtgttagtgtctctgcctgcccgtgaattcatggtgtcaggagaagaaggtggtttaagaaaaaaaagagtgagttgttggggtggcatctcttcagcattctagaccattcgcaagggaacgtgtaaataacatgtatatgaaatgtttaattaatttgcggagttacaaaagaattcttttaactgattaaagtgtgtttttagatgtaggctgaataaaatgttaacgaaatctaaatttttgaaattccaattaaaatatttgcatttttaattgaacaatattaatatacctacatgtatgtatgtatgtattaaagcagtgacttattcttgcttaggattacattttctgccgtcacagctcttagatgttgagcaccgcaaattggcaacttattcgaagtgctctctgtcgcactttcaccctgccatgaagtaacagagagcgagaaagaagcggacccaccttatcttcctcttcctccctacgagcctactcccactctttcggatcctctccaccgctctctaaaagctccttatgtgcgaccgcatgttgtttctccttcccttattttcgtttcgctggcattatttgaatttaaatcggcaaagttaagtgccaaaagcaaaccttttgctttgctcgctttttgcgtagttcgtccgtcttatcaaccttttgtttattcgtaaatcgagtggctaccgtgttattttgcgtttcctacccagacatttgataacttattatggcactggcttcgatgatgtttgcgcttagccttaaaattgaaatttctcaaggttttctctagacgctttcgaatcttgttttgttttcagtttcgtattatctgctagcttttgttttcttcttctgtgttttgcacctgtacgtgaatgtccttcatctcggttaatttttttttaactttaaagaaccccaattctaatcccgattccagttggaagttttttaagctattcgttaaaaaatgttttgcatacatatgtatttataaattgctaagtacaatgtgcattgattctttaaaaatacctttggtatttttatacatatgtacttcatagggaatttacttggtaccgaacttacataaaactttacatatgcacatgcataaataagcatctgaaaagccggccggcaaaccatgaaaatatttatctaggttttcaaattcgtatcaggtttgttttgacataagttggtttggctctgtaacgattgcctagccgctgatgaaatgtagtaagggcatttcaataaatgcctactgtcgtcatcaccttatcgacttgcacctgaagggatcggatgatgtgttatgccgacgtcaagcacggactttttgtgccggaactgcggaaattgtttatgcaatttaaacaaaaatacacacgtcttcagaacactcacacatattttgttcatcaaaacgaaatgatttggcgaaaaataagatgcatatatacatacattattaattaaatgcgcagaatattcggcagacttgtgagaggggagagtccatttcgataaaaaagagaaatgcaaaaagtttgaacgcgtctgttgtttctgttgtctcggcgtttatttacgcaattgataacaattaaagctggccaacaaataggccaaattttatatttagaacagaacggaaagcgtgcgacgaatcagaaaagcgtgggtgggcgaaagggggagaagcaaagtgtttatataaattggtcattcatttaaaagacggatagcaagaaaatgttttttataaaatgaattttacaatgccatgggtataaaaacaaaaactaagatttcaattatagtaatgtaggaaaaactgtaccctaagagtacttgactccataactccaatgaagcaatacttatttacaatgcaacgtgacttcattagtagttccttggtcgagcagctatatttgcccaaagataccgccctggtgcagccgtcttgggctttataaatagtcgcccggctattgacaacaattgaagaacaggcacacacccaatcaagctgatcgccggtcctcggccccttgctcagtcccctgatcttggggttagctccaggcctagctctgaacgattccaaccagaagttttctatatagcagcggcctgcttgcggctgttttctcattatttaattttacatatttatgcacacttgcggcgacttgtttacgacacgcgatttgctttctacgcagttagtgcaaaagtacgagtatttcttattttatattccctcattattatttttatacattgataaatgcagaaaaaataggcatgcaaataaatatggcgaatgttttcgataaaaagctcataccatacatacatggtacttgtcaagccgatcgcactccgatattaagctagcctatccgcttattaccagctagaatgcagaagttaaagggttggagcgaatttattgtagttcgaaacttttatttctgacattgtcttatttggttgtttttacagacggacagaatgagctgacgcgctacagcagcgaggatgtgtcgggcaacgagtccagcgaggcgcccaacatgaccgaggtggaacgccaggcggagcttaacaggcacaaggaggagatgcagaagaagcggcgcaagaaacgcatcagctcctcccttcattcctcaacctttcagggtgagtatgggggttagagaatagctgacaatgtgcatttccttaattggtaatttcttccaccagagctgtacaagctgactggcgagattcttggcgagggagcctacgcatcggtgcaaacttgcgttaacatctacaccgatctggagtatgccgtgaaggtgatcgataagataccggggcatgcgcgtgcacgtgtctttcgcgaagtggagacattccatcactgccagggccatttgggcatcttgcaactgattgaattctttgaggatgacgagaagttctacctggtattcgagaagatcaacggtggtccattgctatcgcgcatacaggagcacatttgcttctccgagcatgaggcctcgcagataatcaaggagatcgcctccggacttgattttctgcacaagaagggcattgcccatcgtgatctcaagccggagaatattctgtgtgtcaagacggattcgctgtgcccaatcaagatttgcgactttgatttgggttcggggattaagttcactacggacatctcgtcgccagcagccactcctcagttattgacaccagtaagtcggaaattagtaatgactttagattataaatactaaatgaaagtatctcgtttttaggttggcagtgccgagtttatggctccggaagtggtcgatttgtttgtgggtgaggcacactattacgataagaggtgcgatttgtggtccctgggagtcattgcttacatcctgctctgcggttatccgccattttcgggcaactgtggtgaggattgcggctggaatcgcggtgaaaactgccgcacgtgccaggaactgcttttcgagtccattcaagaaggttcgtggatgctagaaatattatcattattgatattaatcataaccttactattgtttaggacacttttctttcccggaggccgagtggcacgatgtcagcgatgaggccaaggacctaatttctaatctgcttgtcaagaaggcatcgaaccgcctcagtgccgaggcagtgttgaatcacccatggattcgtatgtgcgagcaggagccaccggcaagcaagcatggcaggcgccacaaggctttgcaaacgcccagtaacatccgacggtaattaaatagaaaatattacggttgattttcagaaataattgatgtttttcataaatttgcagcaatcaccagtcggcaagggaaatctcgcagtttgccgaatctgctatggccgtcaagcgtgtggtcctacagcatttctcgatgcgctacgattacatgaaagagcgtcccaacatctaccagccatcgcaggcctacatggatgcctatagcgatgaaaactacaatcccaagccgccgggtcattacactcgcaatcgctcgcagcgcaatcccgcttcctccttgtgcggctacggagggcgtatgtcctcgatgcacggccagcgggccaatagccgtcggtcttcccgaaatgcgtctcgcaatgcatctgcaatttatccgaatagcgggggcttcaagacattgaacgtccacgaggaagatgacgacgatgaaggtctggaggcttttggccacatcgatgatgatgatgagtggagcaggtctaggagggaatatcagcagcagtgtgagacgctgggcgaggatcgctttaggcgtcagagcggaagcgaaggcgacgaagtggaagatgatgaggatggagagaatgaggactatcagcactataagcattactggcgcgaattagacgaggaagagggcgacgactatctgtatgagcagcagcagcgcgtcgatgataaattcggggaagaggagttcgaggacgaaccaaaggaggaaactcaagctgacaatctaaagctatcgaaagcttacgtggagcaagttggcgagaccaatgtggagaaatcgaagccacaggacgataacggtgggtatataagggaggaccttattatggataatatggatatgaagaaaaacactcagcaaagcgaatttgctaagctcaccataatgcgcaacgatgcgcagacggaggagaataagataatgcagcagcaggatgaggagaagaaagaggaaaaacagcaggatgatgttgatggggctaagaagcaaggaccatcaagtgatattagtgctactaccatcaccgataataacaagctgcaaacaccagttatgactacaacacacattaacaactggcaaactggcgatgcaattgaagatgatgatgttaaactattggatagtattagtgatttaaatgaaaagctacctgaaatttatgagactgcaaatattgttgtcaactcagcggcagtgccagcagcatcgacaccagcagcatcagcaacacgcccaccaaccgataacccagaggaagatgattcgaacgtgaccaaaccgacgactactgctgaggggacaacaatgcaaacgacttttggcatgtcagcggaagaggagaagcctgtagccctatcccacaccgcgggtcaccacagcaagaccggccgcactgttaactttgcccccgatgcatatcagaacgacgaggatgccgatatcgacgaggacgacgactacgatgacgaggagaatctgcatgagcacagcaagcaacagctgccgtccaatgcctacactcgtaagcagcgacagcagcaccagcggtacattgtgccacgctaccagcttgcggatcaagttcctcagaggcagcacaccgaaaactggcgttatcgcacccatcactcgcaggaacagcagccgacagcggactatcgcaagtatcgcccgccgtttagcaccggaggcggcggtggccaccatggcaaccagcagcgcaattacctggggagcttctcgcacagcggcggtgccgctggttacaagattgctccaatgccgccaccaatgcagccgcctccgcggcacaacagcgccggaagcagtggcagtggtagcggcagcggcggatctccgccatctgacgagcagtcggccatacgcaactggcgtcaggattgtgtttacgcccgcagttgcgggatgaaccagggaccggaacagcagcggcacaaccgttcgtcgggtcagcgtgtccagcagcagccgcggattggcagtggacgcttcgcccacctgcaggcggcccaattgatggacgagttgcctgatatgaggatcggcctttcgccgcccagcgagagtgtactgctccaaaggcgcctgcgccagcagcagcgggccaacgatctgtctgagtactgcgagccggccaccgccagtggttaagcgggtccactgtggacagataactctgttttttttcacgcacattctcttaaaaccaactttccagttctatcattctttttggtgcaacttttcaaaagctaacgtttattgcaaaagtgtatgcaaactatttaaattcaattgattccgccactgcaaacagagttaacaaaaaccccaaaaccaaaaaaaaaaaaaaaaaaccaaaaaaacgataataataaaatgatgaatacttgtggtaggagaaagcgactgcgaagtgaaaccaactgaaaccgagggaaattgagagtggcaatagtctacgctgttttgaagcaagccaaacagtcgttcgagatgaaaacaacagaaaacaaatacctttttttataaaaaagattcaaaaaattgtaatttatattgcagtataattttttattatgaaaaataaaaacgaatacgaaaagtgtttggtcaagagatgcataaaacacttacgacttttctgttttggtgaaattgcttaaatactaagtactcttaaaaatttgttcatgcctcttgattcaaaatgatgataattttacaacgcccgttccaaataccaacatgtacaacatatgaaaattgttaatatttgaatagtatgtttttatttctcatgacaaaaattgttataggaaaggataaacgggcagcaagaataagttgattttacaaagttaattgaattatcaaaatttcgagtcgctcgccaattagttggaatcgaaatttacacttaaaaaattaaacgctagtaagttatttcaaagaaattgacacgtacacaagataaactgcaatataaaggtaattttttgttacagtttatagttttgtaacgtgtatatgccaattgcttggaaatagtttacatgcgtacagttaattatttcaaaaaatactgaaacatatatttaattaagccccaacacttctctacactgacatccatacacactaaggccagctacactgggcaaaaatcgaacacactcttgacattgcaagttgctcaacacgttttgatgggcgtaaatgaaataataacacgcaaaccaattttgttaaatacatacacctataatatttaaaaaattgtgatataaaatgtaaatgtaaatgcacctgaagaaatctatctatcaaatgacgctg

SEQ ID NO: 15197 - DNA, 4389 bp, DROSOPHILA
cgaactttgaaaatggatcggtagctgggaaggaaacttaaagcgaaatacgcaaagaaaacggcttttgtccgctattcagcgattttttttgtgttgtaatcagcagaggaaattttaacgaccaactccaccgccacaccagccatctccagcagctccggaaaataaaatagaactaaattaacgcctccatcactacaacaaccatctcaccaacaactacaagagcaacaaccacagcaacagcactactgcaccaagcccacaaagaagaggtgaaacgcaaaaatcgcaatacccgaagaaaaaaacaaaaaatatcgcagataaccgaaaaaagcggtgcaaatagataaaccccattttttgcttgagcttttttcgcctgtgtgatgagagaaatcagcagcagccatcgattacaacaacaacagcagccacaccaacgacgactcaaccaccaaaccaagaataaataaacagcggagagcgatagatagagagagagagagagaggagcatctgcagcagaattgaatcagttttttcatcaaccgccgcattgtattaaaaacacaaaaatcccataggcggccaccattttgattttgaatgaactgaacgagaagagaggaaagagcacgagagactgagaaaaactgctgctcatttgttgcaccgtaaaccctttttccagcttgtaagcactctgcctgtctcactctaatcgcgtccaggagcaccgtacagtaacaacaacagcaacaacatggtggagcccaagtccgggacagctgcttctgccgctgctgcgaaagcaagcaacaacaataacaacaaccacccccgtggatctggggacagcggcatccggagtggcagcggcatttcctgcagcaacacggacaacagctgcagccagagtcagtcagacggacagaatgagctgacgcgctacagcagcgaggatgtgtcgggcaacgagtccagcgaggcgcccaacatgaccgaggtggaacgccaggcggagcttaacaggcacaaggaggagatgcagaagaagcggcgcaagaaacgcatcagctcctcccttcattcctcaacctttcaggagctgtacaagctgactggcgagattcttggcgagggagcctacgcatcggtgcaaacttgcgttaacatctacaccgatctggagtatgccgtgaaggtgatcgataagataccggggcatgcgcgtgcacgtgtctttcgcgaagtggagacattccatcactgccagggccatttgggcatcttgcaactgattgaattctttgaggatgacgagaagttctacctggtattcgagaagatcaacggtggtccattgctatcgcgcatacaggagcacatttgcttctccgagcatgaggcctcgcagataatcaaggagatcgcctccggacttgattttctgcacaagaagggcattgcccatcgtgatctcaagccggagaatattctgtgtgtcaagacggattcgctgtgcccaatcaagatttgcgactttgatttgggttcggggattaagttcactacggacatctcgtcgccagcagccactcctcagttattgacaccagttggcagtgccgagtttatggctccggaagtggtcgatttgtttgtgggtgaggcacactattacgataagaggtgcgatttgtggtccctgggagtcattgcttacatcctgctctgcggttatccgccattttcgggcaactgtggtgaggattgcggctggaatcgcggtgaaaactgccgcacgtgccaggaactgcttttcgagtccattcaagaaggacacttttctttcccggaggccgagtggcacgatgtcagcgatgaggccaaggacctaatttctaatctgcttgtcaagaaggcatcgaaccgcctcagtgccgaggcagtgttgaatcacccatggattcgtatgtgcgagcaggagccaccggcaagcaagcatggcaggcgccacaaggctttgcaaacgcccagtaacatccgacgcaatcaccagtcggcaagggaaatctcgcagtttgccgaatctgctatggccgtcaagcgtgtggtcctacagcatttctcgatgcgctacgattacatgaaagagcgtcccaacatctaccagccatcgcaggcctacatggatgcctatagcgatgaaaactacaatcccaagccgccgggtcattacactcgcaatcgctcgcagcgcaatcccgcttcctccttgtgcggctacggagggcgtatgtcctcgatgcacggccagcgggccaatagccgtcggtcttcccgaaatgcgtctcgcaatgcatctgcaatttatccgaatagcgggggcttcaagacattgaacgtccacgaggaagatgacgacgatgaaggtctggaggcttttggccacatcgatgatgatgatgagtggagcaggtctaggagggaatatcagcagcagtgtgagacgctgggcgaggatcgctttaggcgtcagagcggaagcgaaggcgacgaagtggaagatgatgaggatggagagaatgaggactatcagcactataagcattactggcgcgaattagacgaggaagagggcgacgactatctgtatgagcagcagcagcgcgtcgatgataaattcggggaagaggagttcgaggacgaaccaaaggaggaaactcaagctgacaatctaaagctatcgaaagcttacgtggagcaagttggcgagaccaatgtggagaaatcgaagccacaggacgataacggtgggtatataagggaggaccttattatggataatatggatatgaagaaaaacactcagcaaagcgaatttgctaagctcaccataatgcgcaacgatgcgcagacggaggagaataagataatgcagcagcaggatgaggagaagaaagaggaaaaacagcaggatgatgttgatggggctaagaagcaaggaccatcaagtgatattagtgctactaccatcaccgataataacaagctgcaaacaccagttatgactacaacacacattaacaactggcaaactggcgatgcaattgaagatgatgatgttaaactattggatagtattagtgatttaaatgaaaagctacctgaaatttatgagactgcaaatattgttgtcaactcagcggcagtgccagcagcatcgacaccagcagcatcagcaacacgcccaccaaccgataacccagaggaagatgattcgaacgtgaccaaaccgacgactactgctgaggggacaacaatgcaaacgacttttggcatgtcagcggaagaggagaagcctgtagccctatcccacaccgcgggtcaccacagcaagaccggccgcactgttaactttgcccccgatgcatatcagaacgacgaggatgccgatatcgacgaggacgacgactacgatgacgaggagaatctgcatgagcacagcaagcaacagctgccgtccaatgcctacactcgtaagcagcgacagcagcaccagcggtacattgtgccacgctaccagcttgcggatcaagttcctcagaggcagcacaccgaaaactggcgttatcgcacccatcactcgcaggaacagcagccgacagcggactatcgcaagtatcgcccgccgtttagcaccggaggcggcggtggccaccatggcaaccagcagcgcaattacctggggagcttctcgcacagcggcggtgccgctggttacaagattgctccaatgccgccaccaatgcagccgcctccgcggcacaacagcgccggaagcagtggcagtggtagcggcagcggcggatctccgccatctgacgagcagtcggccatacgcaactggcgtcaggattgtgtttacgcccgcagttgcgggatgaaccagggaccggaacagcagcggcacaaccgttcgtcgggtcagcgtgtccagcagcagccgcggattggcagtggacgcttcgcccacctgcaggcggcccaattgatggacgagttgcctgatatgaggatcggcctttcgccgcccagcgagagtgtactgctccaaaggcgcctgcgccagcagcagcgggccaacgatctgtctgagtactgcgagccggccaccgccagtggttaagcgggtccactgtggacagataactctgttttttttcacgcacattctcttaaaaccaactttccagttctatcattctttttggtgcaacttttcaaaagctaacgtttattgcaaaagtgtatgcaaactatttaaattcaattgattccgccactgcaaacagagttaacaaaaaccccaaaacc

SEQ ID NO: 15198 - protein, 1142 aa, DROSOPHILA
MVEPKSGTAASAAAAKASNNNNNNHPRGSGDSGIRSGSGISCSNTDNSCSQSQSDGQNELTRYSSEDVSGNESSEAPNMTEVERQAELNRHKEEMQKKRRKKRISSSLHSSTFQELYKLTGEILGEGAYASVQTCVNIYTDLEYAVKVIDKIPGHARARVFREVETFHHCQGHLGILQLIEFFEDDEKFYLVFEKINGGPLLSRIQEHICFSEHEASQIIKEIASGLDFLHKKGIAHRDLKPENILCVKTDSLCPIKICDFDLGSGIKFTTDISSPAATPQLLTPVGSAEFMAPEVVDLFVGEAHYYDKRCDLWSLGVIAYILLCGYPPFSGNCGEDCGWNRGENCRTCQELLFESIQEGHFSFPEAEWHDVSDEAKDLISNLLVKKASNRLSAEAVLNHPWIRMCEQEPPASKHGRRHKALQTPSNIRRNHQSAREISQFAESAMAVKRVVLQHFSMRYDYMKERPNIYQPSQAYMDAYSDENYNPKPPGHYTRNRSQRNPASSLCGYGGRMSSMHGQRANSRRSSRNASRNASAIYPNSGGFKTLNVHEEDDDDEGLEAFGHIDDDDEWSRSRREYQQQCETLGEDRFRRQSGSEGDEVEDDEDGENEDYQHYKHYWRELDEEEGDDYLYEQQQRVDDKFGEEEFEDEPKEETQADNLKLSKAYVEQVGETNVEKSKPQDDNGGYIREDLIMDNMDMKKNTQQSEFAKLTIMRNDAQTEENKIMQQQDEEKKEEKQQDDVDGAKKQGPSSDISATTITDNNKLQTPVMTTTHINNWQTGDAIEDDDVKLLDSISDLNEKLPEIYETANIVVNSAAVPAASTPAASATRPPTDNPEEDDSNVTKPTTTAEGTTMQTTFGMSAEEEKPVALSHTAGHHSKTGRTVNFAPDAYQNDEDADIDEDDDYDDEENLHEHSKQQLPSNAYTRKQRQQHQRYIVPRYQLADQVPQRQHTENWRYRTHHSQEQQPTADYRKYRPPFSTGGGGGHHGNQQRNYLGSFSHSGGAAGYKIAPMPPPMQPPPRHNSAGSSGSGSGSGGSPPSDEQSAIRNWRQDCVYARSCGMNQGPEQQRHNRSSGQRVQQQPRIGSGRFAHLQAAQLMDELPDMRIGLSPPSESVLLQRRLRQQQRANDLSEYCEPATASG

SEQ ID NO: 15199 - DNA, 8087 bp, DROSOPHILA
gcggactttttctttttgcccgtcgtcttgctgtccttggtttttttgcgaccttctgtacaaatggaatcaaaggaaggggtcagcttgtggaagaatagatactttggaacagtcttactcttggccaccacttcctcggatttggcacgcgtggatgaggccttctcctgaatctcaccctcgaagcgtgctaaatcgttgtccagtcgccgtatctgcttgtccactagttcgtaggtctgaatggccagctgcaccttgtcgtcgctgtactccttggcctttccgaacagtgccttgatatcctcctggcgctccctcctctcatcctcgctcatggccccgttctcgcccagcttgcgcataaagtccttggcatggctatcgatgctcttcatcgctgtttgtgctcgatcgtctaattttcgcatcagcttaaaatttctctccagctccgttggcagactttccaatcctgtttgtaaatcgtgaataatatatgttttcgagtgttttccatgcttaagaatcttcttaccgtctaaatagttctctaggtatatagccgatgacattttcggtgtcaaatatcggatttaacaaagaatatggagtgtgtaagctaaattccagcgtctgtttacgatagcaacagctgtattgttgtacatgggatatttagggatgacagctcgctttttaaagttatcgattactttacagtggttaaaagcataacccaaaacaattgggcagtgcttaaatttaaaaattaaaagaaaaaataaaatatttacattaagtagatttcggatcggattttgtggtagttatttgctaaatctttgaaaaacttttagttacgactgcgcaacagctgtttttaagtgtggttacaactttatgatggttggcaactctacatctagtataatcacaatcaaaaacactaatttgttttgatagctcattttaaaggtaaattaagttttgaaaaatgagcgccagttccggaggatcctggattaatgccatctacgatgaggtagctctggagggtctggagggagtgacattgccctgtaagagatttccatgccctccacacatcaactccaagttatttgtttatgcttttagatctctgggatcttctggccaggcgactggagtttttcccctctccgctgcctgaccgcatccgggaacagacgtggaccttgctgctacgcacgccgcctcacaagatcgagttctttgaactgccggcggaaagaccactaatgccctactatgatcgcctcaacgacatcgacgagcagctgggattgcccgtggtgcccgagcagtgtccgtacatgttgttcccggccgcctatgtgcaagagggcgacattaagggtaattgcaacgacttcaagacacgtaagctgatcccttccagcgatctgcattctcttaatgccgctcaagcaacggaacagtgggcgggcaggctcgtagtggtggcctcccaagagctgcgggagacagcactcacgcccgaaagcctcctgatgcccaagaatctgccactgcccaactacatctttctggaggccatcggacggtctcggtacagcggacacaccaccgcaggcccttggtcgcttataaactacagcaaggacacagggattctcttctatatcaagtgagttttatgaactatacttatatttaatatttaaaattacattccttacagaaacaagttgataaatctgcagttgattattgcccaaaactataacgaaattaacaagggacgcatcttggtctcttcgctgctgatgctaccgcgcttttaccgcatctacaagaaccactctcaggaaaatcttgaaaaactatacttgggaataatgcggacgccaagccgccaagtgcccgtcaccgaaataaccgatcttctaggccgtcctaccaattttaagacaaagaaattgctggtgacccactcctttcgtaagttcttcgagactaagcaagttgaaaggcccgttgcgccactgacaaagtcgggaaagcagtccaaagcaaccacacgcaaggtgacagtgatacagctgcgcaatccggatatgcaactgaaggacctgtacaagaacgacgacagcgaggataatcaggtatccgagttcttggatctgggccactgctttcttgatatgcctccggaggaggaagttttccgcgcagtggcgagattcggtaaacgtggtcttaatagcaacgagttgtgccactacacgggtatcaacgccacctacatgcgacactttgtgaagcgagtgaaaaagcacggcctggtcaaagagtactcggagcaggtgggaaagagccggcagttccgctttgtggccgtaggacatttgggggacctttcaaaagaagacgagatcaagaaaaaggcactggagattaggtgtaaggatgagccggtaagtatatatatatatatatatattatataaggaaaaagcgtttatcctagtatttctatattattatctagaatattaccgaaagcactgatgtcctgctgaaggacttgcccgagatcgtgacgaatgcccgacccatagcgttcaaaattaagaagaccagagccgccaatcaaacgcagcgccaaattaaccgccagaaaatgattgtgcgccagatcgaccagaattgtttggtgtccctgccccgcgtcttaagatccgtccaggaaacggagcggcaggccggctttaaggacagcctatgtcgccgctcgttgatgcgcctgctgcgtccaatggttgaggaaaatattataaacgtgttcgagatcacactgcactacaatcagcgagttcgtgtctaccgtttcgccacgcatccaaagatcgggcttgaccacgcggtcatgaaacgcgagattgtcaagctaaagagtaacttccacttgatcaccgaggagcgcatgaagcggccatcacagatggcacccaaagagcgcaaggaggtactcgctcgtcgaaaactggcgccagagcgttcaaatgcggtgttcaagacgcaggcacccaaacttcttttggctaggacactgcacgagtttctctactatttgcaccacgagctgtcgccggaacagaagcccctgcccatgtccgccgagcttgtgcagcagtggcagaagtcggaaccggcactgcagccgcgccagttctttgacgagtggcaggctgatgaaacaaaggttcagccctacactgaggatataggctggcgcacctttataccgccgctaccgcgctacgtggacaaaccatctggctggctttacttcatggatgccatggaccgaatgccgctctcgctctttatgcgcatttgccgcattgagcgcgaagccaacgacgatttgcgtctacagcttcagcatcccatccgtcagcactatctgctttcccagctgaagctggagaccattgtgccacgcctgaaactgcagcagatttatgtgggcactctgcgactgctcaacaatatgggtctgatccaggtgggcaacactattcctttgctttaagtccacatattataattattcgtatttaggtgagcgagcaaaagttaggtcgtgactccctgcaccgctgggtattcctgaatcagcgaaccagcttgctggacacaacttccagcactgagcacaactacatgcaagtgagcgccgatcgctcgtatacgaagcttaactttgagttctccagcgtggagcaactgggtaactattgggccaagttgcagcacatctgcatttacacgaaactgggataccgcaaatcgttgagcacgcagagaattctgccggcgcgtttgaaggtcctagtcttccagccaacggtggagttcgatcaggccgttgagcttgacaatgggacagttcctggtgatcacctgggtgccgctggactgagctcccatttgtttgcccaccagttccgccactggtcgtgggtgcagcgtcagaatggtggtaagtcgaatgcagcaagggaaaaggccaagaggacagtccggaagcgggcagtaattacgcgcctgaagattggaccccgactagcggtgcgtaaagcacgcgagctatctaccggcaaaactttaaagaagtcatccggccctcgagacgatattgatcgggatgccctgcggaatatgcgaacattgcgcgtcaaatgggcgccagaggaggatcgtttgcttaagatgggccgggcagtctacatgtttattgatgcacccacaatgaccttggccttgtgcgacttggccgtcgtctgtcgcgatttgattcgccgctggctgggaatctgcaacaagacaactcaggcctgcgttcgccgtgttcagtttatggtgaagatgaagcgcgacataccggacgttcccagctggatctacgctatgcaaacgcagccacagttcaacacggtatacaacgaacgatttcttagccagctgaagcgggactatcccaacaagaccgattttcaaaacgcgctgatgactcactttgccctcatgatggccaaactgcagcgtatgatagcaaaatctgtaagttaaatagaagtagcaactgttgtacatacacttatatctttctttatatccagcaaggttcagttagtcgccagtttttgctgcccgacaccctggaggcctttggtagccaactacgggagtgtcgatcggcgcacgaggagcagcaactgctcttccaggaccccgcttcggagacggatcttcaagtggctgtagctcatggcgtgctgcatagcaacatatgctgtgccaaggacaagacgctgctgaacctgcagactttcgagatctacaagcacttctccgaggaagtgcttaactcagcattcaacaaagcgcgcgcagattcattgctagtagcggtgaagaggcgaaacattcaatcggcggccagccgacaaatctccggaccgggccacttgctaagctcaaagtacaagtaccgtttgatctacaccaagctgacgcacttcctctacgactgcttctttgctttggaccagaagttgcgggcagaccaggagcagcagctatcctcaccgcattttggccaactactggtgatgggcgagtggttgtcggaaaacaggctgagtctttcactccagttgcccacgaatatcctgaccgtggacacaacaaccgtgggcaggcagagtggttgcaactcggatcgaattttggatcattacagctgcatatttgacaatgcgccgcaaacagagtactctaagcggttggagggcgagtgcagtggacgccaggcgtcgcgtgtgctcttccatccggccaacctgagctttcgcctgcctaccagtgcttacaaccagctctccaagctgcagttgcgtgctatgcatttcttctgtgcgttagatgccttgggcgaggccatcactataagtcagtcgcgtttggagcaatttgattgtccattcaccaattgcattatgcggagtggcaactatttgaacgccgtcgagcggattgcccacgagcaacgacccattctccggcaactggtggccgatgctttgccatcgcagcagttcgtgctggaatcgcatccagcgggcacaccactaacagtgaccaacgcgaatctcctgccgtttgcccaacaactggaggcgttctggcgagaaaagcaacaagcgatggagctgaaggacttgggtaagacgctagcggagcgaacccagcacaagctcaccgactggcgttccatttgtgccgagctgcttgatgacgagccacatgcatgggagacggaacgcgttcaggagtacgaacccgctctcaacaaggaggagcgtgcccgagcgcaggatgtgtttgttgttcatttgcccaccattggaattaaggttgtggagcagccagagggcaaacaaacaatagacagcctgcgtacttcagtgctcgataaggtccttaagtaagtcttaactagaaacttttccggcttattatcactaaccacttcgtttggtttactcacagaactacctattggcaatacacggagaacagctttgaaagccttcggccgaaactgcaggagagtggatatgacgatcgtgccatccgccacatggaggacatactctaccacattgagaagcatacactcggggtgaagggcctggagttgcggaagatatttcccctgggagacttcctgttggaaacattgcatctattggctgaccacaatcttatcaagcgagtgggcattgttagtgtcatgtacgttcataaaaaccacatccgaaattgggtggtgcacacgttccacatcaagagattggagcgggaaaaagtgcagcccatggtggcggcggcacctggaacactccaagccgtcgttggtcacaagcgcaagctggaggctcaggagacgtctagctccgttccagaaaagcgggtgaaactcatggagcaactgagcacagagagtgagagcgacgagccgggcggatctgcttccaagcggccaaagaggattacacgaaaagaaccatcccttgaagtggccaatgcaacgctggaagctacacgggatgcgattgccatgcgaccacagccttggatccgggtgaatgcatccctcaatcgacgcgtcctcgatcgctggctgggcgccgttctcagcgagtgcatcgctcgcgtcggctgcaccgtgcacagtttgtttctgaggttcctgcacttggtgccggtggacgtcatgttcctgctggagcttctgcacgatttgggttgtatacaactcatggagatgcgacctcacaaagtgcatgtggaatcactgctggatgatgagcatgaagacggcgatgagcagccagtcacggagctctacgatcccatgcagacctatgttcaagtgcatggcaatgcaataggcaggctcaccaactttattggcctaaaaaagtacagcactgagtttatttaggattcggcagaggttttccctgttagtagtttaggttgcactaattcaatgacttttcttagattgtaagatcaaattccattgatttcgttttgtctctgattacgattgttagtttctttttttctataaactgaagtcttcagttcgtttatcaattatttttttatcctgtccaacctattcattttacatagttttttatacgttcataaataaacgtaagttaactaactgatagtgaagttgttgtggtttaatctgctattttaggattttcaataggattttggcaactgcaaacatttttatgcgatttttatactctcagtctaacttcggatattcaattggttatattttccggataataataaaagtctaggcttaaaccgcagctatggttcgaaggtatatatttgccttttaataaacatgacaatttaaaactctgtcatctggtcaaaactgatggttaaagttaagttgatgattcatgacgtacacaatatgatattcctttcttgtgtagcttccacactgtaagccaagcttgatagaaagaacacgcgacagttttttttttggtcaccacgaattcgcattcgcggcgtttgtttaattttcaattcacgagtggttccttaaatcctggactaactttagcacatcactaccggcgaaaggtgtttaccgcttgcctccgacgcggggagcagccttctgcgtgaccttggcggccttctgcttgggcgccgacttcttagcgggagcgggggcagcagccttcttggcggccttgacggcacgcttctgctccttggccaccttgatggcctggtcgcgctgcgccttgcgcacctcgggcttcatgttacgcttggccagaatctcggccagcgaggcaccgacgatggcgcgctggaacttctgggtgcggcgggtgcgcttcttggaggcctcctcctcgattcccttgcggtgcttccggcggtacagc

SEQ ID NO: 15200 - DNA, 5721 bp, DROSOPHILA
atgagcgccagttccggaggatcctggattaatgccatctacgatgaggtagctctggagggtctggagggagtgacattgccctatctctgggatcttctggccaggcgactggagtttttcccctctccgctgcctgaccgcatccgggaacagacgtggaccttgctgctacgcacgccgcctcacaagatcgagttctttgaactgccggcggaaagaccactaatgccctactatgatcgcctcaacgacatcgacgagcagctgggattgcccgtggtgcccgagcagtgtccgtacatgttgttcccggccgcctatgtgcaagagggcgacattaagggtaattgcaacgacttcaagacacgtaagctgatcccttccagcgatctgcattctcttaatgccgctcaagcaacggaacagtgggcgggcaggctcgtagtggtggcctcccaagagctgcgggagacagcactcacgcccgaaagcctcctgatgcccaagaatctgccactgcccaactacatctttctggaggccatcggacggtctcggtacagcggacacaccaccgcaggcccttggtcgcttataaactacagcaaggacacagggattctcttctatatcaaaaacaagttgataaatctgcagttgattattgcccaaaactataacgaaattaacaagggacgcatcttggtctcttcgctgctgatgctaccgcgcttttaccgcatctacaagaaccactctcaggaaaatcttgaaaaactatacttgggaataatgcggacgccaagccgccaagtgcccgtcaccgaaataaccgatcttctaggccgtcctaccaattttaagacaaagaaattgctggtgacccactcctttcgtaagttcttcgagactaagcaagttgaaaggcccgttgcgccactgacaaagtcgggaaagcagtccaaagcaaccacacgcaaggtgacagtgatacagctgcgcaatccggatatgcaactgaaggacctgtacaagaacgacgacagcgaggataatcaggtatccgagttcttggatctgggccactgctttcttgatatgcctccggaggaggaagttttccgcgcagtggcgagattcggtaaacgtggtcttaatagcaacgagttgtgccactacacgggtatcaacgccacctacatgcgacactttgtgaagcgagtgaaaaagcacggcctggtcaaagagtactcggagcaggtgggaaagagccggcagttccgctttgtggccgtaggacatttgggggacctttcaaaagaagacgagatcaagaaaaaggcactggagattaggtgtaaggatgagccgaatattaccgaaagcactgatgtcctgctgaaggacttgcccgagatcgtgacgaatgcccgacccatagcgttcaaaattaagaagaccagagccgccaatcaaacgcagcgccaaattaaccgccagaaaatgattgtgcgccagatcgaccagaattgtttggtgtccctgccccgcgtcttaagatccgtccaggaaacggagcggcaggccggctttaaggacagcctatgtcgccgctcgttgatgcgcctgctgcgtccaatggttgaggaaaatattataaacgtgttcgagatcacactgcactacaatcagcgagttcgtgtctaccgtttcgccacgcatccaaagatcgggcttgaccacgcggtcatgaaacgcgagattgtcaagctaaagagtaacttccacttgatcaccgaggagcgcatgaagcggccatcacagatggcacccaaagagcgcaaggaggtactcgctcgtcgaaaactggcgccagagcgttcaaatgcggtgttcaagacgcaggcacccaaacttcttttggctaggacactgcacgagtttctctactatttgcaccacgagctgtcgccggaacagaagcccctgcccatgtccgccgagcttgtgcagcagtggcagaagtcggaaccggcactgcagccgcgccagttctttgacgagtggcaggctgatgaaacaaaggttcagccctacactgaggatataggctggcgcacctttataccgccgctaccgcgctacgtggacaaaccatctggctggctttacttcatggatgccatggaccgaatgccgctctcgctctttatgcgcatttgccgcattgagcgcgaagccaacgacgatttgcgtctacagcttcagcatcccatccgtcagcactatctgctttcccagctgaagctggagaccattgtgccacgcctgaaactgcagcagatttatgtgggcactctgcgactgctcaacaatatgggtctgatccaggtgagcgagcaaaagttaggtcgtgactccctgcaccgctgggtattcctgaatcagcgaaccagcttgctggacacaacttccagcactgagcacaactacatgcaagtgagcgccgatcgctcgtatacgaagcttaactttgagttctccagcgtggagcaactgggtaactattgggccaagttgcagcacatctgcatttacacgaaactgggataccgcaaatcgttgagcacgcagagaattctgccggcgcgtttgaaggtcctagtcttccagccaacggtggagttcgatcaggccgttgagcttgacaatgggacagttcctggtgatcacctgggtgccgctggactgagctcccatttgtttgcccaccagttccgccactggtcgtgggtgcagcgtcagaatggtggtaagtcgaatgcagcaagggaaaaggccaagaggacagtccggaagcgggcagtaattacgcgcctgaagattggaccccgactagcggtgcgtaaagcacgcgagctatctaccggcaaaactttaaagaagtcatccggccctcgagacgatattgatcgggatgccctgcggaatatgcgaacattgcgcgtcaaatgggcgccagaggaggatcgtttgcttaagatgggccgggcagtctacatgtttattgatgcacccacaatgaccttggccttgtgcgacttggccgtcgtctgtcgcgatttgattcgccgctggctgggaatctgcaacaagacaactcaggcctgcgttcgccgtgttcagtttatggtgaagatgaagcgcgacataccggacgttcccagctggatctacgctatgcaaacgcagccacagttcaacacggtatacaacgaacgatttcttagccagctgaagcgggactatcccaacaagaccgattttcaaaacgcgctgatgactcactttgccctcatgatggccaaactgcagcgtatgatagcaaaatctcaaggttcagttagtcgccagtttttgctgcccgacaccctggaggcctttggtagccaactacgggagtgtcgatcggcgcacgaggagcagcaactgctcttccaggaccccgcttcggagacggatcttcaagtggctgtagctcatggcgtgctgcatagcaacatatgctgtgccaaggacaagacgctgctgaacctgcagactttcgagatctacaagcacttctccgaggaagtgcttaactcagcattcaacaaagcgcgcgcagattcattgctagtagcggtgaagaggcgaaacattcaatcggcggccagccgacaaatctccggaccgggccacttgctaagctcaaagtacaagtaccgtttgatctacaccaagctgacgcacttcctctacgactgcttctttgctttggaccagaagttgcgggcagaccaggagcagcagctatcctcaccgcattttggccaactactggtgatgggcgagtggttgtcggaaaacaggctgagtctttcactccagttgcccacgaatatcctgaccgtggacacaacaaccgtgggcaggcagagtggttgcaactcggatcgaattttggatcattacagctgcatatttgacaatgcgccgcaaacagagtactctaagcggttggagggcgagtgcagtggacgccaggcgtcgcgtgtgctcttccatccggccaacctgagctttcgcctgcctaccagtgcttacaaccagctctccaagctgcagttgcgtgctatgcatttcttctgtgcgttagatgccttgggcgaggccatcactataagtcagtcgcgtttggagcaatttgattgtccattcaccaattgcattatgcggagtggcaactatttgaacgccgtcgagcggattgcccacgagcaacgacccattctccggcaactggtggccgatgctttgccatcgcagcagttcgtgctggaatcgcatccagcgggcacaccactaacagtgaccaacgcgaatctcctgccgtttgcccaacaactggaggcgttctggcgagaaaagcaacaagcgatggagctgaaggacttgggtaagacgctagcggagcgaacccagcacaagctcaccgactggcgttccatttgtgccgagctgcttgatgacgagccacatgcatgggagacggaacgcgttcaggagtacgaacccgctctcaacaaggaggagcgtgcccgagcgcaggatgtgtttgttgttcatttgcccaccattggaattaaggttgtggagcagccagagggcaaacaaacaatagacagcctgcgtacttcagtgctcgataaggtccttaaaactacctattggcaatacacggagaacagctttgaaagccttcggccgaaactgcaggagagtggatatgacgatcgtgccatccgccacatggaggacatactctaccacattgagaagcatacactcggggtgaagggcctggagttgcggaagatatttcccctgggagacttcctgttggaaacattgcatctattggctgaccacaatcttatcaagcgagtgggcattgttagtgtcatgtacgttcataaaaaccacatccgaaattgggtggtgcacacgttccacatcaagagattggagcgggaaaaagtgcagcccatggtggcggcggcacctggaacactccaagccgtcgttggtcacaagcgcaagctggaggctcaggagacgtctagctccgttccagaaaagcgggtgaaactcatggagcaactgagcacagagagtgagagcgacgagccgggcggatctgcttccaagcggccaaagaggattacacgaaaagaaccatcccttgaagtggccaatgcaacgctggaagctacacgggatgcgattgccatgcgaccacagccttggatccgggtgaatgcatccctcaatcgacgcgtcctcgatcgctggctgggcgccgttctcagcgagtgcatcgctcgcgtcggctgcaccgtgcacagtttgtttctgaggttcctgcacttggtgccggtggacgtcatgttcctgctggagcttctgcacgatttgggttgtatacaactcatggagatgcgacctcacaaagtgcatgtggaatcactgctggatgatgagcatgaagacggcgatgagcagccagtcacggagctctacgatcccatgcagacctatgttcaagtgcatggcaatgcaataggcaggctcaccaactttattggcctaaaaaagtacagcactgagtttatttag

SEQ ID NO: 15201 - protein, 1906 aa, DROSOPHILA
MSASSGGSWINAIYDEVALEGLEGVTLPYLWDLLARRLEFFPSPLPDRIREQTWTLLLRTPPHKIEFFELPAERPLMPYYDRLNDIDEQLGLPVVPEQCPYMLFPAAYVQEGDIKGNCNDFKTRKLIPSSDLHSLNAAQATEQWAGRLVVVASQELRETALTPESLLMPKNLPLPNYIFLEAIGRSRYSGHTTAGPWSLINYSKDTGILFYIKNKLINLQLIIAQNYNEINKGRILVSSLLMLPRFYRIYKNHSQENLEKLYLGIMRTPSRQVPVTEITDLLGRPTNFKTKKLLVTHSFRKFFETKQVERPVAPLTKSGKQSKATTRKVTVIQLRNPDMQLKDLYKNDDSEDNQVSEFLDLGHCFLDMPPEEEVFRAVARFGKRGLNSNELCHYTGINATYMRHFVKRVKKHGLVKEYSEQVGKSRQFRFVAVGHLGDLSKEDEIKKKALEIRCKDEPNITESTDVLLKDLPEIVTNARPIAFKIKKTRAANQTQRQINRQKMIVRQIDQNCLVSLPRVLRSVQETERQAGFKDSLCRRSLMRLLRPMVEENIINVFEITLHYNQRVRVYRFATHPKIGLDHAVMKREIVKLKSNFHLITEERMKRPSQMAPKERKEVLARRKLAPERSNAVFKTQAPKLLLARTLHEFLYYLHHELSPEQKPLPMSAELVQQWQKSEPALQPRQFFDEWQADETKVQPYTEDIGWRTFIPPLPRYVDKPSGWLYFMDAMDRMPLSLFMRICRIEREANDDLRLQLQHPIRQHYLLSQLKLETIVPRLKLQQIYVGTLRLLNNMGLIQVSEQKLGRDSLHRWVFLNQRTSLLDTTSSTEHNYMQVSADRSYTKLNFEFSSVEQLGNYWAKLQHICIYTKLGYRKSLSTQRILPARLKVLVFQPTVEFDQAVELDNGTVPGDHLGAAGLSSHLFAHQFRHWSWVQRQNGGKSNAAREKAKRTVRKRAVITRLKIGPRLAVRKARELSTGKTLKKSSGPRDDIDRDALRNMRTLRVKWAPEEDRLLKMGRAVYMFIDAPTMTLALCDLAVVCRDLIRRWLGICNKTTQACVRRVQFMVKMKRDIPDVPSWIYAMQTQPQFNTVYNERFLSQLKRDYPNKTDFQNALMTHFALMMAKLQRMIAKSQGSVSRQFLLPDTLEAFGSQLRECRSAHEEQQLLFQDPASETDLQVAVAHGVLHSNICCAKDKTLLNLQTFEIYKHFSEEVLNSAFNKARADSLLVAVKRRNIQSAASRQISGPGHLLSSKYKYRLIYTKLTHFLYDCFFALDQKLRADQEQQLSSPHFGQLLVMGEWLSENRLSLSLQLPTNILTVDTTTVGRQSGCNSDRILDHYSCIFDNAPQTEYSKRLEGECSGRQASRVLFHPANLSFRLPTSAYNQLSKLQLRAMHFFCALDALGEAITISQSRLEQFDCPFTNCIMRSGNYLNAVERIAHEQRPILRQLVADALPSQQFVLESHPAGTPLTVTNANLLPFAQQLEAFWREKQQAMELKDLGKTLAERTQHKLTDWRSICAELLDDEPHAWETERVQEYEPALNKEERARAQDVFVVHLPTIGIKVVEQPEGKQTIDSLRTSVLDKVLKTTYWQYTENSFESLRPKLQESGYDDRAIRHMEDILYHIEKHTLGVKGLELRKIFPLGDFLLETLHLLADHNLIKRVGIVSVMYVHKNHIRNWVVHTFHIKRLEREKVQPMVAAAPGTLQAVVGHKRKLEAQETSSSVPEKRVKLMEQLSTESESDEPGGSASKRPKRITRKEPSLEVANATLEATRDAIAMRPQPWIRVNASLNRRVLDRWLGAVLSECIARVGCTVHSLFLRFLHLVPVDVMFLLELLHDLGCIQLMEMRPHKVHVESLLDDEHEDGDEQPVTELYDPMQTYVQVHGNAIGRLTNFIGLKKYSTEFI

SEQ ID NO: 15202 - DNA, 9276 bp, DROSOPHILA
agtgaaatacgtttagtttatgtgccactgtaaaactatgctctaaccgttaaaaatcaatcatatgccacaaccatatttcttcctgtgtactctctttttacaagaacttaattgcatcatgtaacgctctcccgcaccggtctcttcctgtgccgctctcttaaactttagtctctctctttcgaccgcttctcggtttgtcgctttgttattgtttttcctgttgctgtttttgttttgcttgcggcgtgtcggacacaaccacaaagcgactttttgtcaaaactggttctgtgtccaatatgatgtggctttatcgccgctctctttccgccgccgatgcgttggtgtgcgtgggcttattggccaggttgtgtgataacacaggtatcggtggaggtacaggtatcagtatcggttacctccttaatctggcctaaactagtgtgtcaatatttacacccctcgaaagacaagaactcgatcggcaaacacatagctaatgttttctctttgccatcgagatctcagcaaatatgagtttgtatcgaccaactaacttgactcgatgaattgacatggccggtaattgttgtgcattcgatttgaaaccggatttttgcaaccagaggcgtttctcttccgggctgcttttttaatttgagtgtaagcaaaaagattgacttattgtttttgttgtcctatgacgaacgacactcgcaattattgagcaggcttctaactacgtacatatctatgcttgtacatatgtatgtacaaagtatgtttatcgctacccttgcaaacagcgcattataaacatatacatacatatctatttgttacaactctcgctctcgtttcggccgctctcttcgctcgccgcccaccgctcttttttcgctcttcgcgcaccgcggtagtttggttttcagtttttgtcgctcccccgaaagcgggcgcgtgtttgaattcgattctttcctcgttggcgccgcgcgacgtaggtccgcaaagatttgtccgtgtttttccatttctttcaaattcatttttttggccaattggtttttgtcgccggtactaatctcacataaacgcgaaataaatctaattcgaaattcccggccatttgatctgaacaattttccctgtgcttccaataataacaatcattcagcagtaaattgtcgttttcgttttcgtcggtcgaaaagggaaaagtgtacttcaaatcgatgatgatccaaccggaatagggttaaaattagcccaacatcgtaattaaacaaacaactaattcgaaactaaagcaataccatatcgacggggagcaatatatatcgaaggcaggcggttttatctacgcattgcaaaaaacgtgccgcccagaagaagaacaagcagcagaacgggcgttgcttagacaaattgcgttgcgattaaaaggcgaacagcagcagcagcaacaacatcagcggcaaaaggcagcaaacatgttaggtaaatacagcaacaacaacgatagcaacaaagtctaggaacgagatgagatgagagaactgtcgcacacactcagccctgctcactcacacccacataacgtgatgggcatgtgcatctgtatgtgaggggaaacgtttcgaaatgccggtttttgcatttttgttattgttttagttccaagtttcctctacattttacaggctgctaaaagcaattacattttaggcttatctttaaacaactgatttttaatttaaaaattaaagtaactaaaacgaccttgtatgcatataataactatggtaatatattcccatttggttattctctaatttaattcctcatcttattttttattgtcataccttatgttctggttctctcgccgttttcatacattttttcgcttttacaatttcatttgctgcgcaataattttctgcttctttacagcacacaaacacaggcgtgcagataacgttcgtgtgtgatgtgtgcaagagtgttagtgtctctgcctgcccgtgaattcatggtgtcaggagaagaaggtggtttaagaaaaaaaagagtgagttgttggggtggcatctcttcagcattctagaccattcgcaagggaacgtgtaaataacatgtatatgaaatgtttaattaatttgcggagttacaaaagaattcttttaactgattaaagtgtgtttttagatgtaggctgaataaaatgttaacgaaatctaaatttttgaaattccaattaaaatatttgcatttttaattgaacaatattaatatacctacatgtatgtatgtatgtattaaagcagtgacttattcttgcttaggattacattttctgccgtcacagctcttagatgttgagcaccgcaaattggcaacttattcgaagtgctctctgtcgcactttcaccctgccatgaagtaacagagagcgagaaagaagcggacccaccttatcttcctcttcctccctacgagcctactcccactctttcggatcctctccaccgctctctaaaagctccttatgtgcgaccgcatgttgtttctccttcccttattttcgtttcgctggcattatttgaatttaaatcggcaaagttaagtgccaaaagcaaaccttttgctttgctcgctttttgcgtagttcgtccgtcttatcaaccttttgtttattcgtaaatcgagtggctaccgtgttattttgcgtttcctacccagacatttgataacttattatggcactggcttcgatgatgtttgcgcttagccttaaaattgaaatttctcaaggttttctctagacgctttcgaatcttgttttgttttcagtttcgtattatctgctagcttttgttttcttcttctgtgttttgcacctgtacgtgaatgtccttcatctcggttaatttttttttaactttaaagaaccccaattctaatcccgattccagttggaagttttttaagctattcgttaaaaaatgttttgcatacatatgtatttataaattgctaagtacaatgtgcattgattctttaaaaatacctttggtatttttatacatatgtacttcatagggaatttacttggtaccgaacttacataaaactttacatatgcacatgcataaataagcatctgaaaagccggccggcaaaccatgaaaatatttatctaggttttcaaattcgtatcaggtttgttttgacataagttggtttggctctgtaacgattgcctagccgctgatgaaatgtagtaagggcatttcaataaatgcctactgtcgtcatcaccttatcgacttgcacctgaagggatcggatgatgtgttatgccgacgtcaagcacggactttttgtgccggaactgcggaaattgtttatgcaatttaaacaaaaatacacacgtcttcagaacactcacacatattttgttcatcaaaacgaaatgatttggcgaaaaataagatgcatatatacatacattattaattaaatgcgcagaatattcggcagacttgtgagaggggagagtccatttcgataaaaaagagaaatgcaaaaagtttgaacgcgtctgttgtttctgttgtctcggcgtttatttacgcaattgataacaattaaagctggccaacaaataggccaaattttatatttagaacagaacggaaagcgtgcgacgaatcagaaaagcgtgggtgggcgaaagggggagaagcaaagtgtttatataaattggtcattcatttaaaagacggatagcaagaaaatgttttttataaaatgaattttacaatgccatgggtataaaaacaaaaactaagatttcaattatagtaatgtaggaaaaactgtaccctaagagtacttgactccataactccaatgaagcaatacttatttacaatgcaacgtgacttcattagtagttccttggtcgagcagctatatttgcccaaagataccgccctggtgcagccgtcttgggctttataaatagtcgcccggctattgacaacaattgaagaacaggcacacacccaatcaagctgatcgccggtcctcggccccttgctcagtcccctgatcttggggttagctccaggcctagctctgaacgattccaaccagaagttttctatatagcagcggcctgcttgcggctgttttctcattatttaattttacatatttatgcacacttgcggcgacttgtttacgacacgcgatttgctttctacgcagttagtgcaaaagtacgagtatttcttattttatattccctcattattatttttatacattgataaatgcagaaaaaataggcatgcaaataaatatggcgaatgttttcgataaaaagctcataccatacatacatggtacttgtcaagccgatcgcactccgatattaagctagcctatccgcttattaccagctagaatgcagaagttaaagggttggagcgaatttattgtagttcgaaacttttatttctgacattgtcttatttggttgtttttacagacggacagaatgagctgacgcgctacagcagcgaggatgtgtcgggcaacgagtccagcgaggcgcccaacatgaccgaggtggaacgccaggcggagcttaacaggcacaaggaggagatgcagaagaagcggcgcaagaaacgcatcagctcctcccttcattcctcaacctttcagggtgagtatgggggttagagaatagctgacaatgtgcatttccttaattggtaatttcttccaccagagctgtacaagctgactggcgagattcttggcgagggagcctacgcatcggtgcaaacttgcgttaacatctacaccgatctggagtatgccgtgaaggtgatcgataagataccggggcatgcgcgtgcacgtgtctttcgcgaagtggagacattccatcactgccagggccatttgggcatcttgcaactgattgaattctttgaggatgacgagaagttctacctggtattcgagaagatcaacggtggtccattgctatcgcgcatacaggagcacatttgcttctccgagcatgaggcctcgcagataatcaaggagatcgcctccggacttgattttctgcacaagaagggcattgcccatcgtgatctcaagccggagaatattctgtgtgtcaagacggattcgctgtgcccaatcaagatttgcgactttgatttgggttcggggattaagttcactacggacatctcgtcgccagcagccactcctcagttattgacaccagtaagtcggaaattagtaatgactttagattataaatactaaatgaaagtatctcgtttttaggttggcagtgccgagtttatggctccggaagtggtcgatttgtttgtgggtgaggcacactattacgataagaggtgcgatttgtggtccctgggagtcattgcttacatcctgctctgcggttatccgccattttcgggcaactgtggtgaggattgcggctggaatcgcggtgaaaactgccgcacgtgccaggaactgcttttcgagtccattcaagaaggttcgtggatgctagaaatattatcattattgatattaatcataaccttactattgtttaggacacttttctttcccggaggccgagtggcacgatgtcagcgatgaggccaaggacctaatttctaatctgcttgtcaagaaggcatcgaaccgcctcagtgccgaggcagtgttgaatcacccatggattcgtatgtgcgagcaggagccaccggcaagcaagcatggcaggcgccacaaggctttgcaaacgcccagtaacatccgacggtaattaaatagaaaatattacggttgattttcagaaataattgatgtttttcataaatttgcagcaatcaccagtcggcaagggaaatctcgcagtttgccgaatctgctatggccgtcaagcgtgtggtcctacagcatttctcgatgcgctacgattacatgaaagagcgtcccaacatctaccagccatcgcaggcctacatggatgcctatagcgatgaaaactacaatcccaagccgccgggtcattacactcgcaatcgctcgcagcgcaatcccgcttcctccttgtgcggctacggagggcgtatgtcctcgatgcacggccagcgggccaatagccgtcggtcttcccgaaatgcgtctcgcaatgcatctgcaatttatccgaatagcgggggcttcaagacattgaacgtccacgaggaagatgacgacgatgaaggtctggaggcttttggccacatcgatgatgatgatgagtggagcaggtctaggagggaatatcagcagcagtgtgagacgctgggcgaggatcgctttaggcgtcagagcggaagcgaaggcgacgaagtggaagatgatgaggatggagagaatgaggactatcagcactataagcattactggcgcgaattagacgaggaagagggcgacgactatctgtatgagcagcagcagcgcgtcgatgataaattcggggaagaggagttcgaggacgaaccaaaggaggaaactcaagctgacaatctaaagctatcgaaagcttacgtggagcaagttggcgagaccaatgtggagaaatcgaagccacaggacgataacggtgggtatataagggaggaccttattatggataatatggatatgaagaaaaacactcagcaaagcgaatttgctaagctcaccataatgcgcaacgatgcgcagacggaggagaataagataatgcagcagcaggatgaggagaagaaagaggaaaaacagcaggatgatgttgatggggctaagaagcaaggaccatcaagtgatattagtgctactaccatcaccgataataacaagctgcaaacaccagttatgactacaacacacattaacaactggcaaactggcgatgcaattgaagatgatgatgttaaactattggatagtattagtgatttaaatgaaaagctacctgaaatttatgagactgcaaatattgttgtcaactcagcggcagtgccagcagcatcgacaccagcagcatcagcaacacgcccaccaaccgataacccagaggaagatgattcgaacgtgaccaaaccgacgactactgctgaggggacaacaatgcaaacgacttttggcatgtcagcggaagaggagaagcctgtagccctatcccacaccgcgggtcaccacagcaagaccggccgcactgttaactttgcccccgatgcatatcagaacgacgaggatgccgatatcgacgaggacgacgactacgatgacgaggagaatctgcatgagcacagcaagcaacagctgccgtccaatgcctacactcgtaagcagcgacagcagcaccagcggtacattgtgccacgctaccagcttgcggatcaagttcctcagaggcagcacaccgaaaactggcgttatcgcacccatcactcgcaggaacagcagccgacagcggactatcgcaagtatcgcccgccgtttagcaccggaggcggcggtggccaccatggcaaccagcagcgcaattacctggggagcttctcgcacagcggcggtgccgctggttacaagattgctccaatgccgccaccaatgcagccgcctccgcggcacaacagcgccggaagcagtggcagtggtagcggcagcggcggatctccgccatctgacgagcagtcggccatacgcaactggcgtcaggattgtgtttacgcccgcagttgcgggatgaaccagggaccggaacagcagcggcacaaccgttcgtcgggtcagcgtgtccagcagcagccgcggattggcagtggacgcttcgcccacctgcaggcggcccaattgatggacgagttgcctgatatgaggatcggcctttcgccgcccagcgagagtgtactgctccaaaggcgcctgcgccagcagcagcgggccaacgatctgtctgagtactgcgagccggccaccgccagtggttaagcgggtccactgtggacagataactctgttttttttcacgcacattctcttaaaaccaactttccagttctatcattctttttggtgcaacttttcaaaagctaacgtttattgcaaaagtgtatgcaaactatttaaattcaattgattccgccactgcaaacagagttaacaaaaaccccaaaaccaaaaaaaaaaaaaaaaaaccaaaaaaacgataataataaaatgatgaatacttgtggtaggagaaagcgactgcgaagtgaaaccaactgaaaccgagggaaattgagagtggcaatagtctacgctgttttgaagcaagccaaacagtcgttcgagatgaaaacaacagaaaacaaatacctttttttataaaaaagattcaaaaaattgtaatttatattgcagtataattttttattatgaaaaataaaaacgaatacgaaaagtgtttggtcaagagatgcataaaacacttacgacttttctgttttggtgaaattgcttaaatactaagtactcttaaaaatttgttcatgcctcttgattcaaaatgatgataattttacaacgcccgttccaaataccaacatgtacaacatatgaaaattgttaatatttgaatagtatgtttttatttctcatgacaaaaattgttataggaaaggataaacgggcagcaagaataagttgattttacaaagttaattgaattatcaaaatttcgagtcgctcgccaattagttggaatcgaaatttacacttaaaaaattaaacgctagtaagttatttcaaagaaattgacacgtacacaagataaactgcaatataaaggtaattttttgttacagtttatagttttgtaacgtgtatatgccaattgcttggaaatagtttacatgcgtacagttaattatttcaaaaaatactgaaacatatatttaattaagccccaacacttctctacactgacatccatacacactaaggccagctacactgggcaaaaatcgaacacactcttgacattgcaagttgctcaacacgttttgatgggcgtaaatgaaataataacacgcaaaccaattttgttaaatacatacacctataatatttaaaaaattgtgatataaaatgtaaatgtaaatgcacctgaagaaatctatctatcaaatgacgctg

SEQ ID NO: 15203 - DNA, 3960 bp, DROSOPHILA
cgcgacgtaggtccgcaaagatttgtccgtgtttttccatttctttcaaattcatttttttggccaattggtttttgtcgccggtactaatctcacataaacgcgaaataaatctaattcgaaattcccggccatttgatctgaacaattttccctgtgcttccaataataacaatcattcagcagtaaattgtcgttttcgttttcgtcggtcgaaaagggaaaagtgtacttcaaatcgatgatgatccaaccggaatagggttaaaattagcccaacatcgtaattaaacaaacaactaattcgaaactaaagcaataccatatcgacggggagcaatatatatcgaaggcaggcggttttatctacgcattgcaaaaaacgtgccgcccagaagaagaacaagcagcagaacgggcgttgcttagacaaattgcgttgcgattaaaaggcgaacagcagcagcagcaacaacatcagcggcaaaaggcagcaaacatgttagacggacagaatgagctgacgcgctacagcagcgaggatgtgtcgggcaacgagtccagcgaggcgcccaacatgaccgaggtggaacgccaggcggagcttaacaggcacaaggaggagatgcagaagaagcggcgcaagaaacgcatcagctcctcccttcattcctcaacctttcaggagctgtacaagctgactggcgagattcttggcgagggagcctacgcatcggtgcaaacttgcgttaacatctacaccgatctggagtatgccgtgaaggtgatcgataagataccggggcatgcgcgtgcacgtgtctttcgcgaagtggagacattccatcactgccagggccatttgggcatcttgcaactgattgaattctttgaggatgacgagaagttctacctggtattcgagaagatcaacggtggtccattgctatcgcgcatacaggagcacatttgcttctccgagcatgaggcctcgcagataatcaaggagatcgcctccggacttgattttctgcacaagaagggcattgcccatcgtgatctcaagccggagaatattctgtgtgtcaagacggattcgctgtgcccaatcaagatttgcgactttgatttgggttcggggattaagttcactacggacatctcgtcgccagcagccactcctcagttattgacaccagttggcagtgccgagtttatggctccggaagtggtcgatttgtttgtgggtgaggcacactattacgataagaggtgcgatttgtggtccctgggagtcattgcttacatcctgctctgcggttatccgccattttcgggcaactgtggtgaggattgcggctggaatcgcggtgaaaactgccgcacgtgccaggaactgcttttcgagtccattcaagaaggacacttttctttcccggaggccgagtggcacgatgtcagcgatgaggccaaggacctaatttctaatctgcttgtcaagaaggcatcgaaccgcctcagtgccgaggcagtgttgaatcacccatggattcgtatgtgcgagcaggagccaccggcaagcaagcatggcaggcgccacaaggctttgcaaacgcccagtaacatccgacgcaatcaccagtcggcaagggaaatctcgcagtttgccgaatctgctatggccgtcaagcgtgtggtcctacagcatttctcgatgcgctacgattacatgaaagagcgtcccaacatctaccagccatcgcaggcctacatggatgcctatagcgatgaaaactacaatcccaagccgccgggtcattacactcgcaatcgctcgcagcgcaatcccgcttcctccttgtgcggctacggagggcgtatgtcctcgatgcacggccagcgggccaatagccgtcggtcttcccgaaatgcgtctcgcaatgcatctgcaatttatccgaatagcgggggcttcaagacattgaacgtccacgaggaagatgacgacgatgaaggtctggaggcttttggccacatcgatgatgatgatgagtggagcaggtctaggagggaatatcagcagcagtgtgagacgctgggcgaggatcgctttaggcgtcagagcggaagcgaaggcgacgaagtggaagatgatgaggatggagagaatgaggactatcagcactataagcattactggcgcgaattagacgaggaagagggcgacgactatctgtatgagcagcagcagcgcgtcgatgataaattcggggaagaggagttcgaggacgaaccaaaggaggaaactcaagctgacaatctaaagctatcgaaagcttacgtggagcaagttggcgagaccaatgtggagaaatcgaagccacaggacgataacggtgggtatataagggaggaccttattatggataatatggatatgaagaaaaacactcagcaaagcgaatttgctaagctcaccataatgcgcaacgatgcgcagacggaggagaataagataatgcagcagcaggatgaggagaagaaagaggaaaaacagcaggatgatgttgatggggctaagaagcaaggaccatcaagtgatattagtgctactaccatcaccgataataacaagctgcaaacaccagttatgactacaacacacattaacaactggcaaactggcgatgcaattgaagatgatgatgttaaactattggatagtattagtgatttaaatgaaaagctacctgaaatttatgagactgcaaatattgttgtcaactcagcggcagtgccagcagcatcgacaccagcagcatcagcaacacgcccaccaaccgataacccagaggaagatgattcgaacgtgaccaaaccgacgactactgctgaggggacaacaatgcaaacgacttttggcatgtcagcggaagaggagaagcctgtagccctatcccacaccgcgggtcaccacagcaagaccggccgcactgttaactttgcccccgatgcatatcagaacgacgaggatgccgatatcgacgaggacgacgactacgatgacgaggagaatctgcatgagcacagcaagcaacagctgccgtccaatgcctacactcgtaagcagcgacagcagcaccagcggtacattgtgccacgctaccagcttgcggatcaagttcctcagaggcagcacaccgaaaactggcgttatcgcacccatcactcgcaggaacagcagccgacagcggactatcgcaagtatcgcccgccgtttagcaccggaggcggcggtggccaccatggcaaccagcagcgcaattacctggggagcttctcgcacagcggcggtgccgctggttacaagattgctccaatgccgccaccaatgcagccgcctccgcggcacaacagcgccggaagcagtggcagtggtagcggcagcggcggatctccgccatctgacgagcagtcggccatacgcaactggcgtcaggattgtgtttacgcccgcagttgcgggatgaaccagggaccggaacagcagcggcacaaccgttcgtcgggtcagcgtgtccagcagcagccgcggattggcagtggacgcttcgcccacctgcaggcggcccaattgatggacgagttgcctgatatgaggatcggcctttcgccgcccagcgagagtgtactgctccaaaggcgcctgcgccagcagcagcgggccaacgatctgtctgagtactgcgagccggccaccgccagtggttaagcgggtccactgtggacagataactctgttttttttcacgcacattctcttaaaaccaactttccagttctatcattctttttggtgcaacttttcaaaagctaacgtttattgcaaaagtgtatgcaaactatttaaattcaattgattccgccactgcaaacagagttaacaaaaaccccaaaacc

SEQ ID NO: 15204 - protein, 1090 aa, DROSOPHILA
MLDGQNELTRYSSEDVSGNESSEAPNMTEVERQAELNRHKEEMQKKRRKKRISSSLHSSTFQELYKLTGEILGEGAYASVQTCVNIYTDLEYAVKVIDKIPGHARARVFREVETFHHCQGHLGILQLIEFFEDDEKFYLVFEKINGGPLLSRIQEHICFSEHEASQIIKEIASGLDFLHKKGIAHRDLKPENILCVKTDSLCPIKICDFDLGSGIKFTTDISSPAATPQLLTPVGSAEFMAPEVVDLFVGEAHYYDKRCDLWSLGVIAYILLCGYPPFSGNCGEDCGWNRGENCRTCQELLFESIQEGHFSFPEAEWHDVSDEAKDLISNLLVKKASNRLSAEAVLNHPWIRMCEQEPPASKHGRRHKALQTPSNIRRNHQSAREISQFAESAMAVKRVVLQHFSMRYDYMKERPNIYQPSQAYMDAYSDENYNPKPPGHYTRNRSQRNPASSLCGYGGRMSSMHGQRANSRRSSRNASRNASAIYPNSGGFKTLNVHEEDDDDEGLEAFGHIDDDDEWSRSRREYQQQCETLGEDRFRRQSGSEGDEVEDDEDGENEDYQHYKHYWRELDEEEGDDYLYEQQQRVDDKFGEEEFEDEPKEETQADNLKLSKAYVEQVGETNVEKSKPQDDNGGYIREDLIMDNMDMKKNTQQSEFAKLTIMRNDAQTEENKIMQQQDEEKKEEKQQDDVDGAKKQGPSSDISATTITDNNKLQTPVMTTTHINNWQTGDAIEDDDVKLLDSISDLNEKLPEIYETANIVVNSAAVPAASTPAASATRPPTDNPEEDDSNVTKPTTTAEGTTMQTTFGMSAEEEKPVALSHTAGHHSKTGRTVNFAPDAYQNDEDADIDEDDDYDDEENLHEHSKQQLPSNAYTRKQRQQHQRYIVPRYQLADQVPQRQHTENWRYRTHHSQEQQPTADYRKYRPPFSTGGGGGHHGNQQRNYLGSFSHSGGAAGYKIAPMPPPMQPPPRHNSAGSSGSGSGSGGSPPSDEQSAIRNWRQDCVYARSCGMNQGPEQQRHNRSSGQRVQQQPRIGSGRFAHLQAAQLMDELPDMRIGLSPPSESVLLQRRLRQQQRANDLSEYCEPATASG

SEQ ID NO: 15205 - DNA, 5344 bp, DROSOPHILA
gggtcagggcgagctctttgtcctccagcagcttcttgcgtgccttcagctcggctactgcctttttcacatcgatctcgggggcacccttcgccttgagatccctcaccaggttaccctgctcctgaactcgttccctcaatggggcaagttgagcctcaatctcgggattcgacatgatgaactcggcagcggcggatcttagttttacctttctattttgcttcttggtgccccaacttgtggttgcagctggctgctgcggttgcgttggtggaggtggtggtggtgcggagggagtaggttttgtggtagtggtgctaaaaaacactttcgtggcaatgtgctcgctccacgttgttcttgcaatctgagttctcacggctgtggtggcgctgcgcaggtggggtagcgcttttaacaactgcaatgacataaagaggcttttattttttcagccgaaaaacgcgaatttatgtaataaaccgtccaattggctactgctgcaataccttcactttcggctgcaatttcgacttggatgagtcttagtcggccggcttgcagcactgtctttgcacaacactgattatggttaacagagctgctcagtgatgcgcaatgttgcgactttggtaaatgttatttgtttttattgttttatatttattttttatttgctatatttggtaaatgtgtcttggatagtttggtttcaacatagtttcaacatattctttcatctttacttatagttgaataagcgatggaattattatttaataatattaaaaaattaattaaatttaaaaacaatgctctgataaaattaaggtatcccaaaatcactgttaccgtgtcggcaacattgatcacttgtccctaacagggcggctgataataacagcaccttatgatgtttttcagcactccagtacatcgatatcgggtagggccttcttcgttatcgatatgtttagtttttgttttaattatgtaggcgcagcattgcagtctggtttttcccatataatttgctcaattttggtttagttcggccgaactcaagtgctgcccaaaccaattgctcaaacgcgtagcgcacaaattgaaaaacaagcggttaatgtgaaaaacaggacgagtttagttgttttctatccgaggggacgcggcgttgcaacaacagcgacgctatgcgaccgcatttcgagcgataaaacagaaaggtgtgcttctctctccctctctcggcactctctcacctgagctgctaatacaaatgttgttttcctgccaattttccgaaatctttattgcaaacacttaaaaaattaactcattcacaggcgctgccacacataacggttgatgtttgtttttacgacaacgcacacacacgtacaccggccaaagaggcagcggtcacaacaacaaaggtcttcgttcggtgagttgcgagttgtttttgtttaaccgtttttcgttcttgacctgtttttgttgttgtcttgttgttttctttttttttatgagtgggccaatcgatctgtataaagtatgcattataatttatttattagtcataagcgtagtttgttattgtacgtgtatgtgtgcacaccattttacatcatttaacatgcacagtggaggttctttaattagaaaccaacccccacgatgaaaattattaagaatgcggagaaaaaaccagtttggttcctctcagcgagcatccactgtaggcgcacttaattcaacgacttttgcacgtttgatattaagtcatcgccggccacgaaggccaaactcaagactgtacgaaacaaaaccaaaaaaatgttcaaaaacacggacacaacaaacctaacaacacctcatcgggatgctctatgttttgggttaaagttctggccatttttttgagagggttcgcttcaaggtttactgtggttgtggtgcgtgatgaaacgggttggaaatcggaagcaaacaaaaactaagtctgtacatacaacaaaaagcattaatatcctaataaactagtgcacgtctctaattcaaaatgctaactctgaacgaaatcatccaggggtattcgacagctctgatacaataagaatttatacagtatatttgaaaataattcagatagttttcgtagactaactaagaaaaatcagcttctgagttacagactcattctgttatattttctttcttgtttcaaaatgttaaaaaaaaaatgtagcaaacaaaaatggaatggttaaagttttgtatcagagtggggtgaataccccaaaataaacccataaattacataaaaacaaaggaggcgactgatcgaagactgcttgtcttttctaggatcccctgaaataccaaaacccgcaccaacaacccaccaacgaagccgacgaaccactggcgatgcaattgaaagcgcccaagagcagaaatatggccagtcttaaagatgaagatcaggcggcaactacaagcaactctatgcacaatctcaacaacaacaacaatacgaataacataaacaataaccacagcagcagtagcaacaacaataaaatcgaggatgatccaaaggttaggaaggagaatctggaggctaggaaacaggccttggagcagcgtcttagcgaaaaaagctggctgctgcagcaaatccagaaacaggagaccgccatcatcaatggcaactacgagcacatgacggtcaatgagttttttgtccaattagcacaacagtacaaacatgaacagcagctgcaagcgttggcaagggaaaacagctcaattctgaggagaaaacaaagtacaacgagtcgggaaagtcgcgacagccaaatgaccatcaacaataacaatcgacagtcggaaacgctatcgaatcgcagttcagaatatgacaattaccaaccctcctcatcggcgggggcgggcgatatgctggtaataggcgtggcccagcagcaggcgcaacaacaaccgcctctggtgaagagtgccctgaagaagcgaccaacacccacgccgagtcaaatgcaatatatgcgccagcagcatcagcaacaagctcatttagcaatgaacatgaactaccagagatcacagccggatgtcatatccatgtactcggcgaattcatccaatgtagcaactttaaggcaaccgccacaagtggcgccccagcagcaaccaattatagtgcagtgcgataaatattacctatcgcccacgcatcaaagttacaatgagggcggctttattaaatcaagtcagaacatcaagaaatatgtgtccccaatggcatcgcccagtaatatcagctacgagcagcagcaacagcgtaatcctttacatcaccagcgacaactagatgctatatcccttgcgcccagctatgtttccgtcgatatggaagctgcccagcatcagcagcaatatcgatggcgttcccagtcacacatagcgcccttaactcctccacaattgggcataatagaggtgaaatcgcactccagcgatatgctggcggtgcctatgccacccagccgctatccgccgcacgatgagatctcactgtcatcctcgtccacgaccattgagaagaagcccaagcccaagcagtggctggaatcttcgctagatgggccagctgttatcaggcagatggattcacagccccacagtccagctgggagtagtaatgggagtagtaatcccggcgcagctgccatggtttcaagtaaaccccgcgctaagctctcctcgcagtccatgtcggtagcgggtcgtcactattccatgtccaaccagcgaccgactccgaattatcccagtgccagctatgcggtgaataccagttcgaaagccctgctaagtcaatcgacttcgtatctcaatgcaatggagcaaactttggggatatcggtatcgtatccgctggaacctctggacataccagcactgcgaaacttaccacccaagccaagtcaaatgcagcagccaacgccgccgcccagaccgccacccgcaaatcaggctcatactcagaaccagaacctaagtcacagtggtaatggcagttcaagcggacttgctcatgggaatgctgtccaaacagcgcttgtgtcaccgccagtaacagtggccacagccagtttatcgccggaaattcgcatcgagtcgcccaaaaacatgaccgtagttcagcaggccactttccagccgtacaaggaagtgacgaaacccttcgagatgtccgatttctacaaatactccaccaagtttaagcaaaaggagggcggaaatcctaattgacctataaggttgtacggaattctcatgcactttcaccttttaatgtgattaactaaactaattttgtagcactgagaaactacaaagcaaaagcagctcaaactattggactcctttcgaattttaagttcgttagccaaattatttaggatcaagaaaataacaatgctcaaaagatctgccaaattgaaaactgacgtattgaaagcaatttatcgaacgacattcaaattttgtattgaatttttaaagtacaaaaaacacaggacaatattatccccgagggggacagaaatcgccttacaacaggatgcctagaaaatatggaaatattttatatagttaacagcatttataaacaaataactgactagctaactaataagtgtataaaggatatttaccctaatcgaatgatatttttatatgaatataccgattggatactgatatattcaccgagttttcttaagactaactaccgacaagcaataacaaatagataaaaataaatattttatattaaaatatatgcgagtgcgtttttattgatatttaagcattcaaatatttcgttgaacttccaatatttttctcaaaacattattaatgctcttgtagcatttcagattttttgaataattgaaatgaaaagaaagctttatatttccctagcctataaataaatgtctcatttatacccataaatgtgttctcacttccttaaatcattccttatcgaatatatcttgtagttccttaatctctggttaaaacttatttatagaacaaccgataaaacttaattactttcctcccctttatctctcggatttctctttgtttctctcgcgatctggtagtagtacattgaattctctcttttggactctccccaactcaatgccactgcaacaaattttgtttacgattgattatttttaaacaatctcttgttgtgcttcactgagcattacagtatctggatggggagaaaaag

SEQ ID NO: 15206 - DNA, 2301 bp, DROSOPHILA
gcgcagcattgcagtctggtttttcccatataatttgctcaattttggtttagttcggccgaactcaagtgctgcccaaaccaattgctcaaacgcgtagcgcacaaattgaaaaacaagcggttaatgtgaaaaacaggacgagtttagttgttttctatccgaggggacgcggcgttgcaacaacagcgacgctatgcgaccgcatttcgagcgataaaacagaaaggcgctgccacacataacggttgatgtttgtttttacgacaacgcacacacacgtacaccggccaaagaggcagcggtcacaacaacaaaggtcttcgttcggatcccctgaaataccaaaacccgcaccaacaacccaccaacgaagccgacgaaccactggcgatgcaattgaaagcgcccaagagcagaaatatggccagtcttaaagatgaagatcaggcggcaactacaagcaactctatgcacaatctcaacaacaacaacaatacgaataacataaacaataaccacagcagcagtagcaacaacaataaaatcgaggatgatccaaaggttaggaaggagaatctggaggctaggaaacaggccttggagcagcgtcttagcgaaaaaagctggctgctgcagcaaatccagaaacaggagaccgccatcatcaatggcaactacgagcacatgacggtcaatgagttttttgtccaattagcacaacagtacaaacatgaacagcagctgcaagcgttggcaagggaaaacagctcaattctgaggagaaaacaaagtacaacgagtcgggaaagtcgcgacagccaaatgaccatcaacaataacaatcgacagtcggaaacgctatcgaatcgcagttcagaatatgacaattaccaaccctcctcatcggcgggggcgggcgatatgctggtaataggcgtggcccagcagcaggcgcaacaacaaccgcctctggtgaagagtgccctgaagaagcgaccaacacccacgccgagtcaaatgcaatatatgcgccagcagcatcagcaacaagctcatttagcaatgaacatgaactaccagagatcacagccggatgtcatatccatgtactcggcgaattcatccaatgtagcaactttaaggcaaccgccacaagtggcgccccagcagcaaccaattatagtgcagtgcgataaatattacctatcgcccacgcatcaaagttacaatgagggcggctttattaaatcaagtcagaacatcaagaaatatgtgtccccaatggcatcgcccagtaatatcagctacgagcagcagcaacagcgtaatcctttacatcaccagcgacaactagatgctatatcccttgcgcccagctatgtttccgtcgatatggaagctgcccagcatcagcagcaatatcgatggcgttcccagtcacacatagcgcccttaactcctccacaattgggcataatagaggtgaaatcgcactccagcgatatgctggcggtgcctatgccacccagccgctatccgccgcacgatgagatctcactgtcatcctcgtccacgaccattgagaagaagcccaagcccaagcagtggctggaatcttcgctagatgggccagctgttatcaggcagatggattcacagccccacagtccagctgggagtagtaatgggagtagtaatcccggcgcagctgccatggtttcaagtaaaccccgcgctaagctctcctcgcagtccatgtcggtagcgggtcgtcactattccatgtccaaccagcgaccgactccgaattatcccagtgccagctatgcggtgaataccagttcgaaagccctgctaagtcaatcgacttcgtatctcaatgcaatggagcaaactttggggatatcggtatcgtatccgctggaacctctggacataccagcactgcgaaacttaccacccaagccaagtcaaatgcagcagccaacgccgccgcccagaccgccacccgcaaatcaggctcatactcagaaccagaacctaagtcacagtggtaatggcagttcaagcggacttgctcatgggaatgctgtccaaacagcgcttgtgtcaccgccagtaacagtggccacagccagtttatcgccggaaattcgcatcgagtcgcccaaaaacatgaccgtagttcagcaggccactttccagccgtacaaggaagtgacgaaacccttcgagatgtccgatttctacaaatactccaccaagtttaagcaaaaggagggcggaaatcctaattga

SEQ ID NO: 15207 - protein, 635 aa, DROSOPHILA
MQLKAPKSRNMASLKDEDQAATTSNSMHNLNNNNNTNNINNNHSSSSNNNKIEDDPKVRKENLEARKQALEQRLSEKSWLLQQIQKQETAIINGNYEHMTVNEFFVQLAQQYKHEQQLQALARENSSILRRKQSTTSRESRDSQMTINNNNRQSETLSNRSSEYDNYQPSSSAGAGDMLVIGVAQQQAQQQPPLVKSALKKRPTPTPSQMQYMRQQHQQQAHLAMNMNYQRSQPDVISMYSANSSNVATLRQPPQVAPQQQPIIVQCDKYYLSPTHQSYNEGGFIKSSQNIKKYVSPMASPSNISYEQQQQRNPLHHQRQLDAISLAPSYVSVDMEAAQHQQQYRWRSQSHIAPLTPPQLGIIEVKSHSSDMLAVPMPPSRYPPHDEISLSSSSTTIEKKPKPKQWLESSLDGPAVIRQMDSQPHSPAGSSNGSSNPGAAAMVSSKPRAKLSSQSMSVAGRHYSMSNQRPTPNYPSASYAVNTSSKALLSQSTSYLNAMEQTLGISVSYPLEPLDIPALRNLPPKPSQMQQPTPPPRPPPANQAHTQNQNLSHSGNGSSSGLAHGNAVQTALVSPPVTVATASLSPEIRIESPKNMTVVQQATFQPYKEVTKPFEMSDFYKYSTKFKQKEGGNPN

SEQ ID NO: 15208 - DNA, 3177 bp, DROSOPHILA
ggtgatggcaacggacggaacggaagtagttttggtacaaaggtttcaactaacgctaagctaagcttaagagccataaatacacgagcgtgcacgcacacacacacacaaccacagaagagaacgaagaagaggaagtccgccttccgatgatcgatcgatcgagcatggggaacacggggcgtatgcgcaacatcaattataacttggcgattatcccctcgccagcttcgcttgattgcttcgcttcgcatcgcatcgcattctcgccatctgtggctgcattcgcatgtgtagaaccgtacaacaaactgggtcaattttcgagatctgcctaatgtgtaagtcgcctaattctagaacctcacgaacgaaacgcgtttagtctttaattcccttaggctaagtgattattgtaattgtaattgtgtatagacgatttgtaaatagcctgttaaatgttaaatatttgtagtcctaagccaactagtctaacttacaaaattcgcacgaacaaatacggcgagcacgaaattaaaagccaagacaaataaaaacgaagaaaagataaataaaataaaaccgaaaaccaaccaactgggtttcaatatgttctaaattcacagcggaaaaaactgagctgtatattggcagggtctttcggtgcgaaagagataaataaattttagaaacatatcaattttagaaacttccacaaacgaatctagtgcatattaaaaatatatgtaaccgaattgactaaaaatgctttaatagaaatatatatggttaatttggcgcataattaagctaacaggaattacaaaacataaattcaaatatagtactcgctaatactataatcgagccggcaacgccgacgttcagtttaaaaaggttcgcgccactgcttagactgcataaggtgtggtcacaccattctgctgtcccgatagatagcgataagtaatatcgtactactgagagaccaccaataacgataacgacagcttataccggagcttgtcaaacaaaaagaagtaaaattaagtttataccgcaaactacgtgtaaataaaggccccccgacagcatggagcaaatggaagtggacgttgacatgtcggccaagcccagcacatcgtcctccgccgccgccgggagcagtatggcagtggataagactgcggatcaaaacccacagccgcagggaaacataatggctgcagcgggcaccagtggttctgtgaccatatcgctgcatccgctggtcataatgaacatctccgagcactggacacgctttcgtgcacagcacggtgagccgcgacaggtgtacggagcactgattggcaagcagaagggccgcaacattgagattatgaactcgttcgaactgaagacggacgttattggcgatgaaacagtgatcaacaaggactactacaacaagaaggaacaacagtacaagcaggtgggtgtccaagcctctacatacgctgctttaccagctgttactcttttttccccaggtgttcagtgatctcgacttcataggctggtacacaaccggcgacaatcccactgccgatgacattaagatccaaagacagatagccgccatcaacgagtgccccatcatgctacagctgaatccgctctcccgcagcgtcgaccaccttcccctgaagctattcgagtccctaatcgatctggtggacggcgaggccaccatgctgttcgtgcccctcacctacacactggccaccgaggaggcggagcgcattggtgtggatcatgtggcgcgcatgacctcgaacgagtccggcgagaagagcgtggtggcggagcatttggtggcccaggacagtgccattaagatgctaaatacacgcatcaagatcgtgctgcagtacatacgcgatgtggaggccggaaagctgcgggccaaccaagagattctgcgagaagcctacgctctctgccaccgactgcccgtcatgcaggtgcccgccttccaggaggaattctacacgcagtgcaacgatgtgggactgattagctacctgggcacgctgaccaagggctgcaatgatatgcaccactttgtgaacaagtttaatatgctgtacgaccgccagggatccgcgcgccgcatgcgaggtctctactattgatatatgcaaacaatctattaaagcttcggagataaatacacataatcgtacgatgggtgaatgcggttttatttcagctgccgctgggcaggctacatacgtatacgggtggcatcaagcgatatcactttcttcctgagcttccagctcctcttgcttcgtaaattcaattcagatgcacagacaacatttcctagacactaaattaggtaatttcgcagcggaattagtggttgtagtcgtccagcttgatgctgggggcatactgctgcaagaactccacctccagcggatgcatctccttggcgggaatgatgagcgagtgcagcggtccgcccaaatcggtcgagcgcatctcaagcagcgtgccaacggcaatctgctgcgactcctggccaacacgggccagtccaacgcacagtgactgctcgttgagcactgtgttcttctccagcgagtccttcttctccacaatggacagcaactgatgagccgcctccgccacggtcatgaaacgcggtggcatgtactccttgcgtttgcgcatcaaggactccggcgtgggctccttcaccttgatgtccagcaggcacagcgtgtgcatgttgtgcaggcgattcagcttgatcttgtcgtagaagctgtccggcttccatgtctcgtcccagtacggaatcgaaacggtctcgccgaatttgtacaattgcaggccgcagcagccgacggcgttcatgatcgatgcattgtggatgaccttgtaggggatgttcttctccttggcgcgcagtatgaagtctgtgtgggtggtggcgccaaaggggtcgcccaccacgagcagcgcaacatcggattcgcccgcacccgccaggatctcatccgcaccctgctccaccagatcgcggtcggctagcagcagtggtcgtccatagaactcttgctgcgaacaaagtggagatgcaattagcattgggggtgctcccagaacgaaggccattccaga

SEQ ID NO: 15209 - DNA, 1119 bp, DROSOPHILA
ataacgacagcttataccggagcttgtcaaacaaaaagaagtaaaattaagtttataccgcaaactacgtgtaaataaaggccccccgacagcatggagcaaatggaagtggacgttgacatgtcggccaagcccagcacatcgtcctccgccgccgccgggagcagtatggcagtggataagactgcggatcaaaacccacagccgcagggaaacataatggctgcagcgggcaccagtggttctgtgaccatatcgctgcatccgctggtcataatgaacatctccgagcactggacacgctttcgtgcacagcacggtgagccgcgacaggtgtacggagcactgattggcaagcagaagggccgcaacattgagattatgaactcgttcgaactgaagacggacgttattggcgatgaaacagtgatcaacaaggactactacaacaagaaggaacaacagtacaagcaggtgttcagtgatctcgacttcataggctggtacacaaccggcgacaatcccactgccgatgacattaagatccaaagacagatagccgccatcaacgagtgccccatcatgctacagctgaatccgctctcccgcagcgtcgaccaccttcccctgaagctattcgagtccctaatcgatctggtggacggcgaggccaccatgctgttcgtgcccctcacctacacactggccaccgaggaggcggagcgcattggtgtggatcatgtggcgcgcatgacctcgaacgagtccggcgagaagagcgtggtggcggagcatttggtggcccaggacagtgccattaagatgctaaatacacgcatcaagatcgtgctgcagtacatacgcgatgtggaggccggaaagctgcgggccaaccaagagattctgcgagaagcctacgctctctgccaccgactgcccgtcatgcaggtgcccgccttccaggaggaattctacacgcagtgcaacgatgtgggactgattagctacctgggcacgctgaccaagggctgcaatgatatgcaccactttgtgaacaagtttaatatgctgtacgaccgccagggatccgcgcgccgcatgcgaggtctctactattga

SEQ ID NO: 15210 - protein, 341 aa, DROSOPHILA
MEQMEVDVDMSAKPSTSSSAAAGSSMAVDKTADQNPQPQGNIMAAAGTSGSVTISLHPLVIMNISEHWTRFRAQHGEPRQVYGALIGKQKGRNIEIMNSFELKTDVIGDETVINKDYYNKKEQQYKQVFSDLDFIGWYTTGDNPTADDIKIQRQIAAINECPIMLQLNPLSRSVDHLPLKLFESLIDLVDGEATMLFVPLTYTLATEEAERIGVDHVARMTSNESGEKSVVAEHLVAQDSAIKMLNTRIKIVLQYIRDVEAGKLRANQEILREAYALCHRLPVMQVPAFQEEFYTQCNDVGLISYLGTLTKGCNDMHHFVNKFNMLYDRQGSARRMRGLYY

SEQ ID NO: 15211 - DNA, 3100 bp, DROSOPHILA
aatgatgtgctccgagccaagggaataattgggcccaaggcgaaggaggcggagatcacagaggatcagatccagaagctgatggacgatgccatccagcggcgcacagatctgccactgaatgaaggccagcgcgacaagaagatcgacgacatgtcgctggacgaactcgacgaactggaggattccgaggacgaggctgttctagagcagtatcgccagcgacgcatcgccgagatgagggccaccgctgaaaaggcgcgatttggatcagtgcgcgagatctcaggacaggattatgtcaacgaggtaaccaaggccggcgagggcatctgggtggtactccacctgtatgccaacggcgtaccgctgtgcgcactgatccaccatcacatgcagcagctggccgtccgctttccacagaccaagttcgtgcgctccgttgccaccacctgcataccaaacttccccgagaagaacctgcccaccatctttatctaccacgagggtgcgctgcgcaagcagtacataggcccactggagctgcgcggcgacaagttgaccgctgaggagctggagtttatgctgggtcaggcgggagcagtgcccaccgagatcacggaggatccacggccgcagatcagggacaagatgcttgccgatctcgaagacaaaagctcggacttctactgagtcatagccaaagcatagccctcatccaactttaagttcagtggggtgggtaaatatttttaggatgaatcatcaagtaaagcccaatccaaaaccggcaagcggatctttttttgcggattcacttaactaacaaatcaaacatttaaacgcagtttgaaacgtaaacatccgccgttgagagcgaacgttattgatttatatattaaccagtcctcaggaatttcccttgcacgttttcatttcattgttttttggcatttatgtaccctcataaataaattgtttacttttctacagaaagtcactatttatgattttgtttggtgctggtagccgttgcttttgccacgctttttggtttaccccgaaaaatgttcggatcaatgatattgtacggatgctcgcaagcgggattcagtactcgtccacgtcgtggctcgtgctcctcgagaagatgaggtgctagcaaaagaaacagctgctctgtccaagagggcaggccacaggtggagaagcacagctcccagtacggcagtcccaagtgcgcgatggccatccgaaggtattcactaaaggtgtccgccaaaaactgccagctcagggtgctcagctctagcagatagaacttgggattgttggaactggtagattcgtacagcatacacacctatcagaggagtattttggaattaatcatcagccttctcttgcgtctgaactacttcgattaagtacacaccttggccacctcgtttacgttgttgatctcaaatattttcgatttggccgttataataggcgtggcattgccccacttgtcttttccggtggcaataggtgctggaagggattgagagctcccggctgctcccacaacatccgagttgctattgggcacagccgtcgaattgctggagtggctcgatgtggtttctatgttctcccgcaaaagggtcacttgcagcaagtgcggaaagtgaatgtgacccacgcgcctaatatcgttggctggaatcaaagcgatatataaaggaaccagaaaactacggagacgaccccactcacgagcatattggtagctccagtttaagataaagccatcagaagataggtagaacttcttcatatcttccgggaggtagacgcagtgcctctgctcccaattcaccaactggcaggcattcagaggttgtcgtcgctccaacgtcacattacatacccttggcacattggctgcatgtttgagaggatccactcttacaggacttcaatcttttgttggtttcatactcacatagcgtccttatcagaccgagggtcaaattttcataaaatgcatcctctggcgagagcttcttgttcatcatcaaataatttatgcctcagaataaattctgttaaatttatacgtcagactgttttccacatgtatagactagctgtcacggtataaacaaagtcacatcgaattggttgttgtggcaacggtgcggattgttgatgccatcgacttcaaagttaggtaaataagtgagcaaagcttatgaaaaaaaaatcaaattcaattttcagacaacatcgaaaataatttatttacattacttatatttgcgataaaccaacaactataaactgtggagctttaacgacaattacacataaaataacatgattacatgaattggttaaaggagacgagtggtattgaatggtatttgttattggtatttgaatgaggacaatctgctgctgccgcctcatcttttgctctgatcctgggcctcactctcggcctcctcctcgtgtcaggaaacctcccaaaccgtggattccacagaccgtcgtggacgggcggccacctccacatgggcgtccagtccatcgctcagccgactgaaacggcgtgcccaactccctcgggtcgtcaccgtgcttccggctatcgacgccctgttgctggtgtcccggaacaggctcataatgtcctggctgtcgccctgagcacgcttgatgccgtgctggtacttggcctccttggccagcagctgctcccgctgcatttgggtcttcacctcggatggaacgtccggaatgatgaactgcatgatgccagttatcacaaacacaacgtgctggaaattcaagattatttgagttcattatcgttatagaactggtatttataagacccacctcgaaaaccaccacaaaagccaagcgggcagcaaagacatgccagtaatggggactcagtccatagggttcgtaatccttggggccatttctaaatggatacaaatgaagtggtgcacaattaaaagtggtgttgtagaaacatacctatagccacgatattggcaggtgtcgggatctttttcgctgaccgatgcaccccactcctcct

SEQ ID NO: 15212 - DNA, 910 bp, DROSOPHILA
aatttaacagaatttattctgaggcataaattatttgatgatgaacaagaagctctcgccagaggatgcattttatgaaaatttgaccctcggtctgataaggacgctatccaatgtgccaagggtatgtaatgtgacgttggagcgacgacaacctctgaatgcctgccagttggtgaattgggagcagaggcactgcgtctacctcccggaagatatgaagaagttctacctatcttctgatggctttatcttaaactggagctaccaatatgctcccaacgatattaggcgcgtgggtcacattcactttccgcacttgctgcaagtgacccttttgcgggagaacatagaaaccacatcgagccactccagcaattcgacggctgtgcccaatagcaactcggatgttgtgggagcagccgggagctctcaatcccttccagcacctattgccaccggaaaagacaagtggggcaatgccacgcctattataacggccaaatcgaaaatatttgagatcaacaacgtaaacgaggtggccaaggtgtgtatgctgtacgaatctaccagttccaacaatcccaagttctatctgctagagctgagcaccctgagctggcagtttttggcggacacctttagtgaataccttcggatggccatcgcgcacttgggactgccgtactgggagctgtgcttctccacctgtggcctgccctcttggacagagcagctgtttcttttgctagcacctcatcttctcgaggagcacgagccacgacgtggacgagtactgaatcccgcttgcgagcatccgtacaatatcattgatccgaacatttttcggggtaaaccaaaaagcgtggcaaaagcaacggctaccagcaccaaacaaaatcataaatag

SEQ ID NO: 15213 - protein, 290 aa, DROSOPHILA
MMNKKLSPEDAFYENLTLGLIRTLSNVPRVCNVTLERRQPLNACQLVNWEQRHCVYLPEDMKKFYLSSDGFILNWSYQYAPNDIRRVGHIHFPHLLQVTLLRENIETTSSHSSNSTAVPNSNSDVVGAAGSSQSLPAPIATGKDKWGNATPIITAKSKIFEINNVNEVAKVCMLYESTSSNNPKFYLLELSTLSWQFLADTFSEYLRMAIAHLGLPYWELCFSTCGLPSWTEQLFLLLAPHLLEEHEPRRGRVLNPACEHPYNIIDPNIFRGKPKSVAKATATSTKQNHK

SEQ ID NO: 15214 - DNA, 3289 bp, DROSOPHILA
ggccccagtggtcgtgtaatgtgggtggctccctggttccgtcactctgggcggacagaaatgtgggcctgggcacggggaagctgagctgagctgtgctctatgtacagcgctttcgggttggtatatgtgtatttcaaggacgcagtcatcactcgtcgtgcgtctcccttcggcttcgttatttataaatgtttttgggcctgtctgctgtcccccatgctggtgtgggtggtagcgtggggggagtggggaggggaggtgttgctataatggcaccatagcatactttttcatccagttttacggcgagccaccttaaacaagtggatgtgcttttctcatcctgattacgaccgtatgcaaaaggcaaaaatgctgggaaaatgggaagtgggcgatttgtccttggcagtaaatggttactatcctgggatttttgagaatagacagccctttccggtcacaaacgtttcgacatgttttgtacaaattgtaagatggttgctacggtaattgataattatattaataaattgtttccttgcatttaactaggttttcttcccctgaggccaaaaaatgcttaaattatatttggtttttaataacttgtatgcttacgttttcatttaattaaaatcaaacatgaaacgtacggtaacttcaacacttaaatattctcctttcaccttcacgttttaagcataatagtcgaaatctttaatggtctgtgcattgttccttaattttaaaactcatacgcagtgtttgcccccaattgtgggaaatttatcgctggcttcctctttttgagccgaaaaaaattatgcaaagggggagtaggcttataattatattgattaaatgcatcagattaagtgctgcaaagtatgcaacttttatttagagtgagacaaattagtttacacttactgttaggggcgcattaggtggaaatggagaattacaaaaaattttatgtttgaaactataatttatgcattttcttttcacttctctagtcctcaaccagcagatcctgcagaatgtcaaccaatcctggcagacgttggcaaatacggccaacacggtggactactcgtcacacctgctctccgccacactgcccatctccatacagcacttcctcaagtactcggagacgatcaagaaggagtccaccggcgatgtcctgaagaacggcaccaatttggccagcctggcgctggggggcgtggccctaacgcccagcaacaacggtgcgaatggcggccaccacaacggactggtgggcatggaccatggcggtcacatgaccaacatgacggacgccaacggagcggcgctgacgaacggagctagcaacggagtgaatggcaatgctaacggcactgtgaccaatggtggcgccggcgccgtctcgagctccggatctgtgggcacaacaaacgccagcggcggcacaggcacggccagcggcaagaagaccaaaaagaagaaaccaccaaaggagaagaagccgcgccccaaaccgggagaaatccgcgagacaaaggcgctggatggctcgacgctctactgctgcccggagtgccaaatggcctacccggatcgcagcctcatcgagcagcacgtcatctcgcacgccgttgagcggcgcttcgtctgcgacatctgcaatgcggcgctgaagcgcaaggaccacctgaccaggcacaagctctcccacataccggacaggccgcatgtgtgcaatgtgagtggctcaaggagccgacaaattcccaaattctaaccatcgataccataatgtttaatacgagcttatagtcttgattgaattattgttttgccatttaatatattaaatactttaaaattgaaaatatataaagtataaaattatgcggtctagatttagcgtaagaaaccataattggctcttttataaactctactctttttccacagatctgcatgaagtccttcaagcgcaaggagcagctcactctgcacattgtcatccattccggcgagaagaagcatgtttgcattgagtgtggaaaaggtgagtggtctgaaaagcaatttcgtttacctcgttacttatcgctgccacctgcaggtttctatcgcaaggatcacttgcgcaagcacacacgatcgcacatcgcccggcgtgtcaagtcggaggtgtcggcgcagaacgttaacggatccgccggaggcggtggcggcggtggaggcggcaacagtgcgcagagcaacgcgctgcacggctcctgaggatcgtacaaggacttctggtaaactcccagccgaatttcaagccataaggggcggccagcctgctggcggcggtggacaggtggtgttcgtatacggatacgactgactgccgccgggagcaggcgagctgcctttgaaattcgctgggggcttaccgggggtcctgctgagcgtcacccaactccaattacaataaccctcaataaacacgagttatacttactgtatgcaagtattagtacgattttgtttacaacactttcagttctttagctttagttctttcagttgagattttcgcacaaacagtcgagcaaagtatagcaatcgaaatgtacaaatcagcagaatgacagatttaaattcgagtttagtatgcgcatatgttaagggaagaaaacgctgcttaaacgtcgctttcgtttctttttggggatctgtgatctgtagtcgctgcataaactaaaaacaaacgagacgatcgtaggcggtcgacagctgttctaagaataagttaatatgtctgcaaccgatttaattatatatgtgcaatttataatccttttgatttgccttttagttgccctcacggcgcatttgttcactacatttaatgctaaatgtgttttccccgccgagacaacgggggaaattgaattcttattgaattatgcacacttttaaggaagtaagaagctctacaagcgaaatttgtacttctagtcttgtattttattttaccgataggcatagagcgaaacccgatacgaggtcatgtaatcttaagcttttaaacttgaatgttcaaaggaaaaccttcgacgcgagtcacaccaaacactaaacagagagccgcaatacgaacttgcatcttggcatgcccaacttccagccatcgtcattgcttgcaactgcaatagccaacagtagacctatatcccgcttaccaatcaataccgatactgatactaatacaagtacagatacagatacagat

SEQ ID NO: 15215 - DNA, 1017 bp, DROSOPHILA
atgcattttcttttcacttctctagtcctcaaccagcagatcctgcagaatgtcaaccaatcctggcagacgttggcaaatacggccaacacggtggactactcgtcacacctgctctccgccacactgcccatctccatacagcacttcctcaagtactcggagacgatcaagaaggagtccaccggcgatgtcctgaagaacggcaccaatttggccagcctggcgctggggggcgtggccctaacgcccagcaacaacggtgcgaatggcggccaccacaacggactggtgggcatggaccatggcggtcacatgaccaacatgacggacgccaacggagcggcgctgacgaacggagctagcaacggagtgaatggcaatgctaacggcactgtgaccaatggtggcgccggcgccgtctcgagctccggatctgtgggcacaacaaacgccagcggcggcacaggcacggccagcggcaagaagaccaaaaagaagaaaccaccaaaggagaagaagccgcgccccaaaccgggagaaatccgcgagacaaaggcgctggatggctcgacgctctactgctgcccggagtgccaaatggcctacccggatcgcagcctcatcgagcagcacgtcatctcgcacgccgttgagcggcgcttcgtctgcgacatctgcaatgcggcgctgaagcgcaaggaccacctgaccaggcacaagctctcccacataccggacaggccgcatgtgtgcaatatctgcatgaagtccttcaagcgcaaggagcagctcactctgcacattgtcatccattccggcgagaagaagcatgtttgcattgagtgtggaaaaggtttctatcgcaaggatcacttgcgcaagcacacacgatcgcacatcgcccggcgtgtcaagtcggaggtgtcggcgcagaacgttaacggatccgccggaggcggtggcggcggtggaggcggcaacagtgcgcagagcaacgcgctgcacggctcctga

SEQ ID NO: 15216 - protein, 338 aa, DROSOPHILA
MHFLFTSLVLNQQILQNVNQSWQTLANTANTVDYSSHLLSATLPISIQHFLKYSETIKKESTGDVLKNGTNLASLALGGVALTPSNNGANGGHHNGLVGMDHGGHMTNMTDANGAALTNGASNGVNGNANGTVTNGGAGAVSSSGSVGTTNASGGTGTASGKKTKKKKPPKEKKPRPKPGEIRETKALDGSTLYCCPECQMAYPDRSLIEQHVISHAVERRFVCDICNAALKRKDHLTRHKLSHIPDRPHVCNICMKSFKRKEQLTLHIVIHSGEKKHVCIECGKGFYRKDHLRKHTRSHIARRVKSEVSAQNVNGSAGGGGGGGGGNSAQSNALHGS

SEQ ID NO: 15217 - DNA, 9355 bp, DROSOPHILA
gataatttcttaagtatattgattattgcactttttcaaaatcattgcagtgtatcgtgcgcccaacagcacaatgttaagttggacagcaccaaacgctatgttacgccgaacagctgctggcgaacattatgttagtgggcgcgccaaattcgaaattcgtttccagtcaaacacgaaactccttaacgtctttactcatttaagtttttattgattttattttactgctgcacttgtcataaatatacaatcgggtatatttcaacatttacaaagttacgcaagtttggtttgttctttttttcgtagttttctcttgtagtttaaacatttatttaaatttatgaattcgaattcattgataatatgtatgcatagtttaattctccactcatccattttatgcttattacaattacaaaaaaaaaaaacaattacctagatgtagtttcatatatatatttaaatatatatagttttatgtgtagcatatttatttcgtattaagtacatattttgtaattgttctaagcttgatttacgtataaaatgtgtcttgattaggtatgggtaatgcggattatgtagttgcgttctggagctccctgcttgcacacataaaaaggggaatttctctatttagaaaatgtaatttcgaatggatcgaaaagtgaagtaaagaatcagttgcgaattatagcatatttctttaaattgaaatgcagttgtatgaactattaaaacattaactcttggcgatgatccacccagaagtttgtgtacaaattttaaaattggcgaacaacttaagtgaatacattaggtaaatgtaaattggcaatatcacttacgaatacctctagggatttcaaataactggaaaaggactcaggagtatgcaataataaatgttcaatttatcacagcatagtaataaagcccatattgaaagctttccaaatccctagagtttaatttaatacatacgatccttccgcttttctatttggtattctttacttaaatccgtttcgcaactcttactacattgactagtttcctccttttggggcatctgtttacaatcggtcgatctgcttaggtgctatggaaatgtatcttcgcctcggctacaatattatagtatgtacagtgatagtttgccttatatgctacgatctttttgctggtccaacgggacatatttggtttttttttattgtgggggaaaagactcccccttacatacacacacacgcacacttattactcttcttatggcatatacacccgcacaattttcttttggggtggcagggaaaaaaaaacaaaaaaaaatagtcattacactttacagactataccgattcgatctagggttttaggactatgtctaaggctaaccgctaactaatactgatccgtcgattaaatactttcgtcgttggcatttttagatgcgctccctgtccacctgcgtctcctgcagctcgagttccgtttcctcggcgagtgtatagaccccagaggcattcgctcccgttggcgtgttcatgacatcgaggagcggactgctcagcgaggagtagcccagtcccgggtcgctgccgtgggcaatgcagctgttgccgggagtggtcacttcgcccgaaccgggcattcccgtcgatgtgttggcgggcgtgtaggcgggggcgggggtgggtgccaggcgggcgccattggggtccattgttaggatgggcaccagctcgtggtttacgtagtccttcagcaccagcgatgtgggtgtgtctataagtggaaatatccatatgcattaacaatacatgcaacaaaagtcaaagtggtcctgctgcgaggaccatgaattgatgcgctcacctgtcaccagggtctcttcggtggggttgcgctggtagagatgacctcgcttctcgtagtgtcaagacgccggcacataatactggccaccctcctcgtgcgccacgtccatcatcgatccaccagcaccacctgcaccacccgacacactgccgccgccgatcaaaccgccgcccgagttagcggcactcgtcttcttaaactccaccacaatgcgaatgcgatggacaatctcctcgtgtatgacattgaaacacatggccgttagcgtcatgcccgacattatgtaaaccgaacaaaaccaggtggtggcattcgattcccgtcgcagtcccggcagcatatcgccaaaaccaatggtggacaggctcataaagcaaaagtatatgccatccagaatgggccatttttccaggcgatataagacggcagcaccgaaaacgatgtagatgatcatcatggagaagcagagcaggatgggcgccaaaatactcaggccgtgcatggagccccttgattcgctggcactgagcgaatcgatgtcacccaaaccaccaaccgatccaaccggaccgccggcattcggtggcggtgctccagctcctgcatccttttcgggcgtggcatgaaagacatccctcacgtaatacggctcctgcatgacggcctgctgtttgcgtagctcctcctgctgcctcttgcgccgcatccgtcgctccttctcagccatccgcttctcgtcgtagcagcaatagccacaatttgagcagagacaacagcacagggccttcgagaagacctcgcgtgccactctggccaaaatgctgcccgtactgctcaggtagaccaaggtcaatgggatgccaaagaaggcatacgccagggtgacgatccttccgagcgtcgttcgcggcgcaacgtttccatagcctaaattgtgaaaagaaagtgaactcgttacaatggtgtcgctaaatttaacactctttaattcctttcaccgaaacaaaataaataatccggttcgaaggaccatgttaaaatgtaaagtcaccgccttatatatttgctttaattaacttttcgaatatatgtaccactttttgtttggttattaagagatttcccattgcaaaaaaaaaaaaaaatttccgttaacaattttcgtttttgttaatttgttgttgttgttgttgttgttgttgttgttttttcacattaatttgccagaagtcaatttgtgcgactcccacgagagatccgacttattgacattacccaaatgagccgtaacttcacatataagccccgtaagccccgcactcctttccgtcttttcgccatttttgccaacgttgtaaagggcaccaaaaataattaagctggcagaggcaataaaaatgcttaacaagcttaaggccggaaattccctaaggaaggtagaaaaaaggaaaacaggggggcggggacacaattgagcaggtgggcgtggaacacacgcacacgcacacacacacacaggaaatcatcgtcaggtgtgtcatgcataaatttgaaaatttcttaattttattgttttcttttattttttctgtcatttcgcagtcggcggttttgcgatatatgtatgtttcctatttaaacgtgggcgtggtttattggttgccgcgtcttctatttttttttattgcacaaatgttgcccgcggaggaagtgagtcatttgtgagattcgaaggaagctgtgggagaaaacgtatcgaatcgaatcgaatcacatgtggcagggctcaagtgcctccggcagtcggtctactggaaacggagaactttttgggtgatgcacagagagaaataatgttttatgctgcacgcttctgtaatgtgtttacagtcatagtcccactgtttttctctgttcactcgaaatcagcaacagtgactgaaacaggaagcggatttccaataccttggtaaccatgtaattgcgttgacagcaaatttaaatgaaatccccctctacacagaaccaaaatgtcaatgtgtcacaaagcggacgacagcacagcaacccccgaaagtgcccccatcgttatatctatatatctatatccctttttgccgatccccagcccagcacagtgggccactgctgtgcatggggggcataaatcaatctggttgcaagattttcgtcaacactttgctgatttatttgcaccactgtgcccggcatccagacacggatcccaccactaccctggttagaacgaccccccaccagccatggctaataatattgccattgacccgactcgagggggctgtaaaactcagctgtcgcgctgtcaatttgctgggagtatcatggcgtatccacggataacgtaaggcggggcggggggatttggtggcatctacatattttattgaaagatattgaaagatttcaatattgagtaggattggcgtactgaatgctggtttataaacgaaagtaataattattattagtattactagagcaaatcaccttttaaccttaatgacattgtacgccacagagttgctttgcgatagatacttatcgaatatgcaaataaatcgctcatggtgtttatgggctgtacttagcgatgggagcactaagccgataggcgagtgaattatttatcgaatatgcgtgtgtggccaagcaaatacaattacccgctcccagccaaagcagcacactccagccataaacaactagacctaatctgcctccgacttggacttggacttggacttgggttcatccaatccgcacccctcgccagcccctttccatcacgctcattgcggcccatttgtacatcgatggtccttcggttatgcgcacacataacacaaaatggtggagcataaaacggaatcgctgggccccaaagatgagcaattgatgatagtggatgtggaaatgaagcctcagtcccattctgtgtgtgtgtgtgtgcaaatggaaaatgaaatttaaaattattttgcaactaaattacttgtcttattgccgtccaggggattggtcgatcccgatccggggtcctatttattgtgccagcgacagcagaaggcaactcgaggagcgcaacgagcgcaaatagcaggccgactataaattcgcatttatgcccaagacaatcatagaactcatgccagccaacaaggatgttgccagctcaatagggctcaactggcggatactctcgaaagatggtaatgtttgcaaaccaaacgttcgaataatgcaatgtagttgttctttgcttaaatgaattttaagcctgaattgtatatgtaattatgagtgttttttttttttttattgtgccccctaaaggaagctagtcaattttaaggccaaaatgactgcagagtaaggcagctgcgaacatggcgctgcattcaagtgctcgagtggcttagtcctttggccagaagcacggaccaataatcataatcatattgttcgggctgcccggccaagaacaatgaagacctgctctggccaaaaagtaaaacaaaacaccaacaccaacaaagaaaaaaaaaataaataaaaataaacacaacccacaaaaacaataataataataataataagcagggacaaggacaagaagtgggtgatggtgtggcaggatgtcatgttaatataaatgtcccggcagtcctgctgactaacgcaattgcaaactgccccacgccccctcatcgccgcccctttctttatgcacacttgcaggggcgggtgtgtgtgtgtgtgtgtgtgttgtgggtgcccgttttctggccctatatttgctttctggccttttggcattgccatcaactgccaagatcagcagaaaatttttgcaaattttattttatagcattttcacaagtggaaagtcgtgtcgatgtatccctgcatatatgtatgtatatgtagggcggatataaaaccgaagaatgcgagtgtgtgtgtgtgtgttggccattcgggctaagcaaatagcttcgtttgttgttttgctctatcaatatttgactttcggcttggttttttgtctccaaccgctttttttttggtttttttgttgttgggcctacgaaattaccatccaagtgagagggaaaaacgtacacggcattttactggaaaatccggcaagtggctgtgtggaaggccaggaaaaatcgaaggaaaaggtgcggacaagtcccctgctgatggatgaacattttttggggcttaaaagtttaggccctgcacaaggcaatatttaaaattggccagagtttcgtgccgcttgctgctgacaaatgccaattgagaaatcctcgacagagtcagcaatcgaagacttatcgaattagtttcggtaattgaaaggacagagctggaaatctatttcgcaaaacccattgaacgtacacgacaattttttttgctgaatttatatatttaaaagagctgatatccattagattcggcatcttctcttatccgatagccagctgcaatcccctcgataaataatcgatgtctggaaacgataaccctttaagctcgcacatcaatcaattaccactgcagttcttatggcacaaattactctggctccgttgtgaaagctgcaccatggttgtgaccatgggatcgcatcatcatcaagttccccttgtcgctactccgaacccggaggttacttttagccaccacttgcacaccgtttgcagcccttttagagccatccgtttacatgcccccatacttttggcataccccccaccccttttgaccactccgctattctccatggttgccatcaacaacagcagttgctgcggccccaaatgcactcatgcgatggtgtcaaaaggtgtacgggtcatgcccgtagcccccatggccccatagatccccatcgccccaactctttttgccatttttatacacggccataaatggcactcaataaatttgaaacccagttgaaatgaaattcaactcactgcattatattacaaaataaatcgcaagttttaagcttatatgcaacatttttgatattagacaccaatagaaaatcaaactttgtacttgaattttttttttttttaaatttcatatcatattctatggcatttttttgcagtgtgcccgcccctttcagccgcttttgcctttggtatcctgcaaacacgagcgcactcgccattcaagtaaaacaaatttccgttgctggaacatcaaatttatggcccacagccatggatagagcgggggtcattgtttccatctcccttgtggaatcgggggtacccaaagtcctgcccccccatccccacctattgcactctttgtgtctgcgaaggcagaaggccactggcacttaccaattgtggtcaaaacggtcagcgaatacaaaaacgctttggcaaaattccactcatgcggcggtccaccgcccactgccacgcccccaacgcctccggcacgatgatggtgatagtgtgtgtgaaggagcacggcttccgtggccggattgttgctacccggaacaccagaggcgcccgtcgaggacgacgacgatgacgacgaggatgaggaggaggaggaggaggagggggcgttggccacatcgtcgtgcgataattgcagcataacatcctcgttcagtctcttgattaattggtcttgaaacttggctatttcaagtgcggctaatctgtgagggaaatatagaaagagaaggagaaggtgaatgagtgggtcacgtcggtgaagcatatatgagtatcaagtatacgcccagtttgcttgcatcaagtatacgcacggagtcaccagattaagttgaacaagtctacacagctatgtaacttattattttataagtttatttaaagtttttgtttttctttgttcttttattacttaagagcactcactttgtccagttctccttgtacagaatgttgagcgagacggtaatgtcccatatattctcaatggtccgctgtcgcacatcgtatgtgtccggcgagagggcaaactggggcattccgcccgcctccaaatcggtggcatccatgccatccaggccgtaaacaaactcgccactggatgcgggctggccaaatggattgagcccgccggcactggcgcttccggccaacgttccctgcgcggcgacagctgcggctgcagcggccatcgtgtcattgtcggcatgacgtccctgtaccgcctgatgctgctgctgctgctgatgtggtgtcctttgctgctgctgctgttgctgttgctgatagatactactcccgatacccgctgcaccaatcccgagtccagccaaattgcgcttggtgctggccagagtgtgctgctgatgcagcaaagccgagtcctcgttctcgatggtcagaaagatgaaggagcctgcaacgaggtggcgaacaaaagccaaacatcagcaatgcaacactgcgagaaactggtaagcaaaatgcttgaaaagttagaatacttaatactgcacacaaagtaagctaaaacacgttcatcaggatccgaaaaccttatatcttatcagcaagttagtaacaaatattatattaaattatatttatagactatagatagatagctagattttccttgccgtgcaacgtcgtgtggcaaaatttccagcagaatatgaactcaacgctaactcatttgtttcctatatgggcgaaaaaggatgcaggtggcgaggagatagggctcgggccataaagcatcttgaaggtgttgcaatcgttctgagccaagttaagagcatcctgttgcaaccacatcgttgaatggcagaattctcgggcatgttacggccaatttatgggggaattttataaagtgaaatgctctggcaagtgcaaacgccttttaatctactcgtatcaaaaaatagtatagtatgtttacatactgaaaattttagctattggtaagtccttgtttttgtgcctcctttttcgcagcaaatcgatacaattcccaaaggccttgttcctttggggatgtcagtgttgattcctgtcactcatttaatgttaatgctcgccaactaatacacacgctcacatgtcacatatttttttgaaaagtttttcgcctgcctacaacaaagtttccatttatttttccattcacgcccctcgtgtgttgaatgttggtgtgtgaaatgagcagttgatgtcctcgccaaaagccaacacatgtcaaagttgaaaataatatatgcatggatggtggaaaatcggatcggaacagatcgcaacaaaatgccaagatgatgatggttcggacagaaatctgaaggatatgacacatgctagtgtaatggtcttgattgcgatggaaaatccgacatattcgactttattgagcgggaaat

SEQ ID NO: 15218 - DNA, 2459 bp, DROSOPHILA
gctccttcatctttctgaccatcgagaacgaggactcggctttgctgcatcagcagcacactctggccagcaccaagcgcaatttggctggactcgggattggtgcagcgggtatcgggagtagtatctatcagcaacagcaacagcagcagcagcaaaggacaccacatcagcagcagcagcagcatcaggcggtacagggacgtcatgccgacaatgacacgatggccgctgcagccgcagctgtcgccgcgcagggaacgttggccggaagcgccagtgccggcgggctcaatccatttggccagcccgcatccagtggcgagtttgtttacggcctggatggcatggatgccaccgatttggaggcgggcggaatgccccagtttgccctctcgccggacacatacgatgtgcgacagcggaccattgagaatatatgggacattaccgtctcgctcaacattctgtacaaggagaactggacaaaattagccgcacttgaaatagccaagtttcaagaccaattaatcaagagactgaacgaggatgttatgctgcaattatcgcacgacgatgtggccaacgccccctcctcctcctcctcctcctcatcctcgtcgtcatcgtcgtcgtcctcgacgggcgcctctggtgttccgggtagcaacaatccggccacggaagccgtgctccttcacacacactatcaccatcatcgtgccggaggcgttgggggcgtggcagtgggcggtggaccgccgcatgagtggaattttgccaaagcgtttttgtattcgctgaccgttttgaccacaattggctatggaaacgttgcgccgcgaacgacgctcggaaggatcgtcaccctggcgtatgccttctttggcatcccattgaccttggtctacctgagcagtacgggcagcattttggccagagtggcacgcgaggtcttctcgaaggccctgtgctgttgtctctgctcaaattgtggctattgctgctacgacgagaagcggatggctgagaaggagcgacggatgcggcgcaagaggcagcaggaggagctacgcaaacagcaggccgtcatgcaggagccgtattacgtgagggatgtctttcatgccacgcccgaaaaggatgcaggagctggagcaccgccaccgaatgccggcggtccggttggatcggttggtggtttgggtgacatcgattcgctcagtgccagcgaatcaaggggctccatgcacggcctgagtattttggcgcccatcctgctctgcttctccatgatgatcatctacatcgttttcggtgctgccgtcttatatcgcctggaaaaatggcccattctggatggcatatacttttgctttatgagcctgtccaccattggttttggcgatatgctgccgggactgcgacgggaatcgaatgccaccacctggttttgttcggtttacataatgtcgggcatgacgctaacggccatgtgtttcaatgtcatacacgaggagattgtccatcgcattcgcattgtggtggagtttaagaagacgagtgccgctaactcgggcggcggtttgatcggcggcggcagtgtgtcgggtggtgcaggtggtgctggtggatcgatgatggacgtggcgcacgaggaggacacacccacatcgctggtgctgaaggactacgtaaaccacgagctggtgcccatcctaacaatggaccccaatggcgcccgcctggcacccacccccgcccccgcctacacgcccgccaacacatcgacgggaatgcccggttcgggcgaagtgaccactcccggcaacagctgcattgcccacggcagcgacccgggactgggctactcctcgctgagcagtccgctcctcgatgtcatgaacacgccaacgggagcgaatgcctctggggtctatacactcgccgaggaaacggaactcgagctgcaggagacgcaggtggacagggagcgcatctaaaaatgccaacgacgaaagtatttaatcgacggatcagtattagttagcggttagccttagacatagtcctaaaaccctagatcgaatcggtatagtctgtaaagtgtaatgactatttttttttgtttttttttccctgccaccccaaaagaaaattgtgcgggtgtatatgccataagaagagtaataagtgtgcgtgtgtgtgtatgtaagggggagtcttttcccccacaataaaaaaaaaccaaatatgtcccgttggaccagcaaaaagatcgtagcatataaggcaaactatcactgtacatactataatattgtagccgaggcgaagatacatttccatagcacctaagcagatcgaccgattgtaaacagatgccccaaaaggaggaaactagtcaatgtagtaagagttgcgaaacggatttaagtaaagaataccaaatagaaaag

SEQ ID NO: 15219 - protein, 592 aa, DROSOPHILA
MAAAAAAVAAQGTLAGSASAGGLNPFGQPASSGEFVYGLDGMDATDLEAGGMPQFALSPDTYDVRQRTIENIWDITVSLNILYKENWTKLAALEIAKFQDQLIKRLNEDVMLQLSHDDVANAPSSSSSSSSSSSSSSSSTGASGVPGSNNPATEAVLLHTHYHHHRAGGVGGVAVGGGPPHEWNFAKAFLYSLTVLTTIGYGNVAPRTTLGRIVTLAYAFFGIPLTLVYLSSTGSILARVAREVFSKALCCCLCSNCGYCCYDEKRMAEKERRMRRKRQQEELRKQQAVMQEPYYVRDVFHATPEKDAGAGAPPPNAGGPVGSVGGLGDIDSLSASESRGSMHGLSILAPILLCFSMMIIYIVFGAAVLYRLEKWPILDGIYFCFMSLSTIGFGDMLPGLRRESNATTWFCSVYIMSGMTLTAMCFNVIHEEIVHRIRIVVEFKKTSAANSGGGLIGGGSVSGGAGGAGGSMMDVAHEEDTPTSLVLKDYVNHELVPILTMDPNGARLAPTPAPAYTPANTSTGMPGSGEVTTPGNSCIAHGSDPGLGYSSLSSPLLDVMNTPTGANASGVYTLAEETELELQETQVDRERI

SEQ ID NO: 15220 - DNA, 8172 bp, DROSOPHILA
atgaggtgaccttcgacgatgccggcctgtatcgcgtcacgctggagaacgatttcggtcgtattgaggccaccgctcgcttggacgtcatccgcagctcccgctactccaagtcgccttcggtgcgcagcgtgcgtgcctcctcctcccgccgtaatgcccacttgtacaggcgcatcatgggtccatccacaggtgggtgctgctccttgcccaatttacagcttaactatttcaattgataccatgccacccacagcaattggcggacgcatggctctggcaagtggctatcggggttcgtcggtgccctcggtgagattctatcacaacgacgtggagctcgaggcctcggaacgagttcacatcctgctgcaggactcgatggccctgctcatagtggacaatgtgacgcgcgaggatgaaggccagtacacctgcatcataagcggcgaccacgatcccctcatcacttccaccaccgtcaccttccacgactcgaatacggagattcgcaggcgtcgtgctgtcatcacggaacgactgcccgagattactaaatcgctggagggcgaggtgatcgatctgtgctgctccatcgaatgcgatgaaccctacagctacgtttggttgcgaaatggcgagattctgccagacagcgatgagttcaagtgagtataaatctttagttcattgaaatatattgagttgtaataacttgaatacataattagttataaaaacattgttaaattgctcagttttttataagcacccaatttccagcgattagcttggattgaataataaaagcgaatggtttccctttgtttcgaactatccacatacttatggcactttcattgctcactgcagttacattgatcacggcaatggacgcctctgcctgcgaatcaacgacgccttcgacattgactccggcatctacagctgtcaggtgtttaccagcgacatcaacgactccacctccgactccaccttcgactcccattcgatctgcagcttaatcaacagcggatgcagcgattgcagcagcagcggtgagctgtgcgtcctggagcgtgatcttcgtggccaggatgaagagtgtgttcagctgctgaagacgccacttccggtggtctgcgcatccggcgatgaagctctcttctacgcccgtgttttcccctgcgatgcggaagccgactggtatctcaatggccagcttttagcccaagcggatgactcacttaacatgacggtgcgtatgcgtaataaacgtaataaatatcggaacgctgtgctttttggcccaaaaaaacaaaaccgaagacgaaagcaaaaacagtgctcttcattttcaacacttgccttgccgcaggctgcttgttcgcacttttggcggcgaaaacaataataataattgtgtatatatctacatatgtatgtatgttgtatatattcatgtacatttcgacccgaatctgcgagagagtatgctcatttgcataagccgcacatatgaggagctgccaaaagatgcgagctgcatgccaacgaagttgctgcccgggattcattcgttcatcggcgctcgagcggtgcacatcgcgtgccatcggtatctcagacccaatcacccaccccacccccctatccagatgatagggcaatcgaagagcccggctcaaaccgaatcagaatccaaatcccaatcgatcggcacaagggcgtgacaagatgtcacaggtaggcgatggcgagccaaatggattgcaagtatcaatatcgctggcgttcggtttaagcccccataactattcccattcgcattcgcattcgataaggaacgccgcgtcgtttgtgctccaatgaaaatgagagcgggcgtgaaagtgtcattgtcacattgttgtccgctcatggaattccgctcgtggcgtagtttttagctcccatccgttcccgcttctcgcttaattggtgcgtgccacggagagggtcgctcagttctatagcaacctcagtccgatccgcgtcacgtcaccagcagcagcagcaccttgctccggagtcggttcgcccggattcgaattcggattcggattcggatcgcccccctctccagacacttgtgcacacagtatataattgtttacccatgcgagcgaggcgtacaccgcgagaaaagtaaccagtagtttgtgaaaaagttaaaagttgtggttggttaataaatcatcagcttaaagtagtttcatggaatatatttggaataaagtttcaaatccacagcctgatatacaataccatataatccaaagcatattaattttattatattgcttaataagcaaaaaatataaataatttagcttttcaaatcgattttaatatcatctctatagagaaccaaaacttgatcagaagatttcaatcaacaatgtttattttccaataaaatttcaattaaaaaagcttttgagaatgtacaataatttggttcacttaaagaacaataattctttaattgaaacgtaatgacagaaataagtggcaagcttttgtctcagtgcatgtgcgattttcagctaattttccacatatttcctctccctttttttttccagttggagtcttatcccgagaacggcattcggcttctgcgcatgcgtgacgtgaccgcatcgagaagcggcgagatctgtctgcaggtgaagcatccccaggcggagttccgtcgaattccgaccacacgcacctacaccagcctcctggtactgcccgccatccgtggcaacagctccagttcctcgctggcggccagaagctgcattttgacacgccccgaggactgcaccgccttgatcggtggacatgttcggctgagcgttcgctacgagccattcccgggcaccaaagtcatctggtacaaggcggtgagtagtggggcataccccctatatatataaatagccacacatctcgatgtggcgatattcggcttaaggtataactggtctggtggtgttgtgcaatcttgacctaatttggataaaacaggcagcaggcagcccagaggattacggatacatattccatataccacattctttatctgccataagcccactcggcggcaccctatctcgatagtagcccccactgtgtcgcttttgggcatttagaccaggtctctctgtactgcgacttctgctccacggtgactgtgtcacgatcagtttgcggtgttgttcgcttgggtttgctgggccagttgggttgctcgggtggtgcttgtgttgcttcgattgcctagactggctacgtaatggttgcaaaccgcaaatggtggtcgagtcgcaccaacgaaggttgactgcgtcgatacacgcgaaacaaatcagcaccaaattgagctatacgtcattccataactttatcttaaagagacagtcgaatttatcttgttttcacacctcatgctaggtaaacaataagatataataccatttgtacttttccaaaaactttaaaagtgtggcaagtattgtggaaacttgggctgatatcttttttccagtgcaccatctatgtctacttctcacacaaatctctcttcggtccacagtgtcatcccattgtggaaagctccaatgtgacgatccggacgacgagccaacagtcgacgctctacatcacggacatctcggcggacgacagcggcaagtatacggttgaggtgatgaacgactatggcgtggaggcagccgctgcctcggtggcagtggaaggtcctccggagccaccaagtggccagcccagtgtatcgctgggtccagatcgcgtggcagtggcctggtgtggtccaccctacgacggtggctgtatgatcacaggttttatgtgagtatcaaccgtttacggtatacttccacacaaattgctaatacaagccccgctttccttcagcattgagatgcagaccattggcgatgagaactgcgatgaggacagctggcagcaggttacccgagtggtggacagcttagcgtacaccgtcaaaaacctccagccggagaggcagtaccgattcagagtgcgtgccgagaatatccatggacgcagtgcacccggccaggccagcgaactggtacagattaccaatacgccacagaggagcacatcatcggatgccagcgatcgtttcggacaagcgacagtgagcgtgcagtctggtggagatttcaaatcccgcttcgagatcatcgaggagctgggcaagggacgatttggcattgtctacaaggtgcaggaacgcggtcagccggagcagctgctggccgccaaggtgatcaagtgcatcaagtcgcaggatcggcagaaggtgctcgaggagatctccatcatgcgcgcactgcagcatcccaagctccttcagctggctgcctccttcgaaagtcccagggagattgtcatggtgatggagtagtgagtataactacacatatctttagagaatcaccactgaccaattttcgaattccctagcatcactggcggagaactgttcgaacgtgtggtggctgacgacttcaccttgaccgaaatggactgcatcctgttcctgcgacaggtttgcgatggcgtggcctacatgcacggccagagtgtggtgcatctcgatctgaagccggagaacataatgtgccatacgcgcactagccaccagatcaagatcattgactttggtctggcccaacgactggatacgaaagcacccgttcgggttctctttggtactcccgagtttataccaccagaaatcattagctacgaacccataggtttccagtccgacatgtggagtgtgggcgtcatttgctacgtgctgtaagtggagcatttggagcatattatctctatgggattaactgtaactttatttttgtagactctcgggtctgtcgcctttcatgggcgataccgatgtggaaaccttctcgaatataactagagcggattacgattacgatgacgaggccttcgactgcgtgtaagttggtatatctttagccaagattctttaatccttaatacacttcatttagttcgcaagaggccaaggatttcatctcgcagctattggtccaccgaaaggaggaccgcctgaccgcccagcaatgcctggcgtccaagtggctgagccaacgaccagacgatagtctcagcaacaacaagatctgcacggataagctgaagaagttcatcattcgacgcaagtggcaggttagtaaatgcttcatgctcgctgctcccaaatattttaaccctgctcctgctgcttctgctgctcctcctgctgctcctgcttccgctaatccagaaaaccggaaacgccatccgtgctcttggtcgcatggccaatctttcggtgtcgcgaaggaactcagccattgccatgggagtactgagcagtccaaggccatcgatatcgggtctgggcatgctgaccaccagtgccattgggagtggaaccagctcccagatgacatcgctccacgaagaggaggacgacttcagcggcgagatgccgccagtggagaagcgcaccgttctcaagctgcgagataaatcccagtgcagtgaacgcagtgattcaggctacagtgagtgttccaattgtagtggagcccaggagacgctgctactctcgctggccaaatccaaactggaggctatagcgaaggcgagcaccttgcccacggtggtgcacgatacggagcaacccgttagcctggagctgcccaccaagggcgaagccatcatgcgctccgactttaccaacaccatcaagatgcgcaagaagtcactggaggacagtgctgcacgggagaaacccaggtccaaaccccaggtcaagccgctcttgtgtgagtccaagctgaaggtgtcccagctgaaggacaggttccaggtgtcccctgctcctgcttctgcatctgcatccgcatccgctgctaacaaacctccgcttgcctatgggcccttcaaaatagccaaagtggcgagtgtgggacgcatcagtagaagtaatcattgcttgtgaccccaaacggatcttgaagtcttgctaggattctttaaactatagttagaaacatcaaaataatctgaaagttacttaaacatggcgaaattaatagaaagtaacctagcctttgcttaactaaaaccaactgattttaactttctaatcaaacgatctctataaatttaactttacttaagctcacctacaagctacctaaaataacacatatttaaacaattaatctaaggttatatttgcatgataggataaccaaagtcttgcaaaataaaacctaactgtccatatatgatcataaatatgacattaagatccgtttagggtttgctcttgaaatcaaacgtatgactaaccgcctgattgttttccactttgcagcagaggagccgggaaggagcggtagaggcgcacccagtgtatccggcaaaggcaagtcaccccaggtgcgttccatgcccagctctccgctgcctcagcgatccgctacgccgacgcggctgatgagccaacgtgtccgtgaggcggccgagcgtcttgcccaacagcacacggtggccagtgctcagcggcatttgggcaatgggagaggcactggcactggcaatggaaatggcaatagcaatagtaatggcaatggtaatgggaacaccgcggagacgaatcgcgaatcacgcgcgcgacgtctcatcaaccgattcaatagcgaaacgcagcatatcacgtcctagtttaagtcggttaaatgccgacgagcataactttattacagataaagcagatatagcattgtttaagtaaaaaatatatatatataccccagagaaactttacgaaacactcgaatatgaatgcgactgcggatcagcatcccacccacccacacacacacgtctacccactcacagtaggatatatgtatgtatgtctgcattcaagcggatgcactccctccgttcagagggaactgtacttaggctagaggaagctaagtgtttaaattattgtatcgatttatatacatatttaccatactaattaaagttaatgtaacgaaaacgcaggatcagtaatcttatttagttcaatggtaatcaatgtgcgattagcggatgatcgcgctccttgagtcgcacccacagtccgccggaggctctcagcgtaatccggaaggtggccgcaatggttgtctttccggttacaggaagcagctggtagctacgcagcaggcgcgacactatggtcttgatctccatgatggcgaatcgattgccaatgcaatatctcggtccagcgctgaagggtaaaaaggcgtagggatgacggttctcggagttctcgggcgaaaatcgctccggctggaacttttccggatcgggataaatgtgggcaagacgatgggtggcataggggcaaatgaaaacgttgctgccggcgggcaatgtgtgctttgccaggcgaacctcttcgcccagtttacgagcaataagcgggacactgggatacagacgcagtgcctccttgatgcacatctccatgtaacgcatctcgtgcagatccgtcatcgtgggagctctattactgtcctcgaatatggtcgccagctccaggacacagcgatcctggcactcgggattctgtgtcagcagaaagagagtgaaagccacggcggcacccaccgaatcctggccagccagcataaaggtacaggcctcgttgacgatatcctcctcggtgaagtcccgattgctctcggagatctcgatcatgtggtcgagcagacactttcgctcgctattgccattattattgttctggatttggcgacgtctctggatcattttgcgtgtgaagtcattgaggcgcttcttctggttaagctcatcgttggccatcttggtccagtggtagatcccgtccagcagcagccagggttgcgtaaaccgcgcgggcatcatgatcttgccctggcggaacggcgagtcctccatcatggccacatcctgacctcttttcttgatcggcacacccaaaacggcctctgcaagtcgttcagggattaa

SEQ ID NO: 15221 - DNA, 3374 bp, DROSOPHILA
ttcgactcccattcgatctgcagcttaatcaacagcggatgcagcgattgcagcagcagcggtgagctgtgcgtcctggagcgtgatcttcgtggccaggatgaagagtgtgttcagctgctgaagacgccacttccggtggtctgcgcatccggcgatgaagctctcttctacgcccgtgttttcccctgcgatgcggaagccgactggtatctcaatggccagcttttagcccaagcggatgactcacttaacatgacgttggagtcttatcccgagaacggcattcggcttctgcgcatgcgtgacgtgaccgcatcgagaagcggcgagatctgtctgcaggtgaagcatccccaggcggagttccgtcgaattccgaccacacgcacctacaccagcctcctggtactgcccgccatccgtggcaacagctccagttcctcgctggcggccagaagctgcattttgacacgccccgaggactgcaccgccttgatcggtggacatgttcggctgagcgttcgctacgagccattcccgggcaccaaagtcatctggtacaaggcgtgtcatcccattgtggaaagctccaatgtgacgatccggacgacgagccaacagtcgacgctctacatcacggacatctcggcggacgacagcggcaagtatacggttgaggtgatgaacgactatggcgtggaggcagccgctgcctcggtggcagtggaaggtcctccggagccaccaagtggccagcccagtgtatcgctgggtccagatcgcgtggcagtggcctggtgtggtccaccctacgacggtggctgtatgatcacaggttttatcattgagatgcagaccattggcgatgagaactgcgatgaggacagctggcagcaggttacccgagtggtggacagcttagcgtacaccgtcaaaaacctccagccggagaggcagtaccgattcagagtgcgtgccgagaatatccatggacgcagtgcacccggccaggccagcgaactggtacagattaccaatacgccacagaggagcacatcatcggatgccagcgatcgtttcggacaagcgacagtgagcgtgcagtctggtggagatttcaaatcccgcttcgagatcatcgaggagctgggcaagggacgatttggcattgtctacaaggtgcaggaacgcggtcagccggagcagctgctggccgccaaggtgatcaagtgcatcaagtcgcaggatcggcagaaggtgctcgaggagatctccatcatgcgcgcactgcagcatcccaagctccttcagctggctgcctccttcgaaagtcccagggagattgtcatggtgatggagtacatcactggcggagaactgttcgaacgtgtggtggctgacgacttcaccttgaccgaaatggactgcatcctgttcctgcgacaggtttgcgatggcgtggcctacatgcacggccagagtgtggtgcatctcgatctgaagccggagaacataatgtgccatacgcgcactagccaccagatcaagatcattgactttggtctggcccaacgactggatacgaaagcacccgttcgggttctctttggtactcccgagtttataccaccagaaatcattagctacgaacccataggtttccagtccgacatgtggagtgtgggcgtcatttgctacgtgctactctcgggtctgtcgcctttcatgggcgataccgatgtggaaaccttctcgaatataactagagcggattacgattacgatgacgaggccttcgactgcgtttcgcaagaggccaaggatttcatctcgcagctattggtccaccgaaaggaggaccgcctgaccgcccagcaatgcctggcgtccaagtggctgagccaacgaccagacgatagtctcagcaacaacaagatctgcacggataagctgaagaagttcatcattcgacgcaagtggcagaaaaccggaaacgccatccgtgctcttggtcgcatggccaatctttcggtgtcgcgaaggaactcagccattgccatgggagtactgagcagtccaaggccatcgatatcgggtctgggcatgctgaccaccagtgccattgggagtggaaccagctcccagatgacatcgctccacgaagaggaggacgacttcagcggcgagatgccgccagtggagaagcgcaccgttctcaagctgcgagataaatcccagtgcagtgaacgcagtgattcaggctacagtgagtgttccaattgtagtggagcccaggagacgctgctactctcgctggccaaatccaaactggaggctatagcgaaggcgagcaccttgcccacggtggtgcacgatacggagcaacccgttagcctggagctgcccaccaagggcgaagccatcatgcgctccgactttaccaacaccatcaagatgcgcaagaagtcactggaggacagtgctgcacgggagaaacccaggtccaaaccccaggtcaagccgctcttgtgtgagtccaagctgaaggtgtcccagctgaaggacaggttccaggtgtcccctgctcctgcttctgcatctgcatccgcatccgctgctaacaaacctccgcttgcctatgggcccttcaaaatagccaaagtggcgagtgtgggacgcatcagtagaacagaggagccgggaaggagcggtagaggcgcacccagtgtatccggcaaaggcaagtcaccccaggtgcgttccatgcccagctctccgctgcctcagcgatccgctacgccgacgcggctgatgagccaacgtgtccgtgaggcggccgagcgtcttgcccaacagcacacggtggccagtgctcagcggcatttgggcaatgggagaggcactggcactggcaatggaaatggcaatagcaatagtaatggcaatggtaatgggaacaccgcggagacgaatcgcgaatcacgcgcgcgacgtctcatcaaccgattcaatagcgaaacgcagcatatcacgtcctagtttaagtcggttaaatgccgacgagcataactttattacagataaagcagatatagcattgtttaagtaaaaaatatatatatataccccagagaaactttacgaaacactcgaatatgaatgcgactgcggatcagcatcccacccacccacacacacacgtctacccactcacagtaggatatatgtatgtatgtctgcattcaagcggatgcactccctccgttcagagggaactgtacttaggctagaggaagctaagtgtttaaattattgtatcgatttatatacatatttaccatactaattaaagttaatgtaacgaaaacgca

SEQ ID NO: 15222 - protein, 913 aa, DROSOPHILA
MRDVTASRSGEICLQVKHPQAEFRRIPTTRTYTSLLVLPAIRGNSSSSSLAARSCILTRPEDCTALIGGHVRLSVRYEPFPGTKVIWYKACHPIVESSNVTIRTTSQQSTLYITDISADDSGKYTVEVMNDYGVEAAAASVAVEGPPEPPSGQPSVSLGPDRVAVAWCGPPYDGGCMITGFIIEMQTIGDENCDEDSWQQVTRVVDSLAYTVKNLQPERQYRFRVRAENIHGRSAPGQASELVQITNTPQRSTSSDASDRFGQATVSVQSGGDFKSRFEIIEELGKGRFGIVYKVQERGQPEQLLAAKVIKCIKSQDRQKVLEEISIMRALQHPKLLQLAASFESPREIVMVMEYITGGELFERVVADDFTLTEMDCILFLRQVCDGVAYMHGQSVVHLDLKPENIMCHTRTSHQIKIIDFGLAQRLDTKAPVRVLFGTPEFIPPEIISYEPIGFQSDMWSVGVICYVLLSGLSPFMGDTDVETFSNITRADYDYDDEAFDCVSQEAKDFISQLLVHRKEDRLTAQQCLASKWLSQRPDDSLSNNKICTDKLKKFIIRRKWQKTGNAIRALGRMANLSVSRRNSAIAMGVLSSPRPSISGLGMLTTSAIGSGTSSQMTSLHEEEDDFSGEMPPVEKRTVLKLRDKSQCSERSDSGYSECSNCSGAQETLLLSLAKSKLEAIAKASTLPTVVHDTEQPVSLELPTKGEAIMRSDFTNTIKMRKKSLEDSAAREKPRSKPQVKPLLCESKLKVSQLKDRFQVSPAPASASASASAANKPPLAYGPFKIAKVASVGRISRTEEPGRSGRGAPSVSGKGKSPQVRSMPSSPLPQRSATPTRLMSQRVREAAERLAQQHTVASAQRHLGNGRGTGTGNGNGNSNSNGNGNGNTAETNRESRARRLINRFNSETQHITS

SEQ ID NO: 15223 - DNA, 3260 bp, DROSOPHILA
gcgtatacgtctgcaattgatgatcatgctgaaagtgcggatgagcataaacaaatctgcctggcgtccactgtttgccaactggcgccagttgaccgttttggccatttcaaaagccttgagagcctgcatatatatgggtttagattttaaagtgctgatggaatcagttttaggttcatacatattccttctggtccagttcaactggttctcccgtgtaccgtcccattatggtgagtagcagggccatagctacatcgttgccaagatggcaggattctaccatggcgggaatcgcggcctgcaggtccagcactctttccaggcgctccatacccacgccagtgataaggttttcgtacaacccactggccatgtagaacatctaaagggaataagatgtaattgatcggaaatgttaggatagcagaaaggggaactacctcctccgagtccagggactctgccaggtgacacaccacatccaccatcatgtagcgctccttcatcagcagaacgttgtccctttggtacgtcatcatcataatggagagggtaaacagatcgagcagctgctgcaaattgagttccagcttcccggctaaggtagccatcatgcgattcagcaactaagttaatataaacaaattagtaatagttattaggaaataaacagaataataacctgtttgccgtctgtggtttctgcagcgtaaggaaacaaatgcttgatggacgacttccggagaaaggacatgatggattcgtggtcatagcctaggcgcatttcatccacttccacgagggaattattcaacgatgaatcagatagattcattttgtattggcggtaaaaaatgcgcaaagcaaataaatagaaataataaactgaaagagtgaccaggcaccaaggggtgggtcaaatagcctaacgcctagttaagcgctgtatcgcatgaacgtaaacggtcataccattattgttgctccacgtgcggcgatttttattcatttactactttaataatcaattttagtgaattgacactaattaaaatgccgcctgttaagaagcccaaggcgcagaagatcgagaagcaaagcacgcccaaaaagcccatcgatgcagccaagaatgtggtttccggacaggtgagcggctaccaaaaacaaatgctcctccgttgggttggataaccgtaaactgcgtccattttagctaaagaaaaaggtgaccaaggccaggccgcagaagccaaagggtccagaacgcggcgtggtcattgtgaagcacctgcctcacggattcttcgagcagcagctgcgccagtacttccgacagttcggtcgggtgctgcgcgtccgtttggcccgttcgctgcgcaccggtaacagcaagggctacgccttcgtggagttcgagtacccggaggtggccaaggtggctgccgacaccatggacaactacctgatgttccagaaggtggtgaaggccacctacattccaccagagaagcagacactcaacttcttcaggacttccttgaagaaggttgtcaataaggtgcgttcaaagggaaatacatctaatgtccgtttgttattcatagttgtacttcacttgcaggccggcaaggaaatctatgtctcggatttaaccaaagccacacagcgcagcgtgaaaaagcagaataactgggatgagtccgcctgccagaagcgcaccgtggccaatctcaacaagatcaagaagctgcaggagaagtacaaggatctgggcatcgacttctccaacttactggtggaaccagtaaagaaagcagcaggctccgctgaggcatctacaagccaggcagccgccaagaaagccggtaagaaacaaaaaacggccgcgaagaaagaaccaacgctggaggatttgctgggcaacaccatcaacgaggactccgatgatgaggactacgttgatgcatccgatgatgagtccgatctggaggctgaggaggagcaagcggacagtgagcagaccagcgatgacagcgacgaagaggaggatttatcaccgccgcccaagcagaaaaagactaagctggctgataaactgaaacgcaagcccggcactggtggtgtgcagaagaagaaaatagctccgccggctaagagcaacaagaatgccgccacccagaagttgcagctggccgcagccaagtcgctggccaaacccttgcccaagggaaaggccaagaaatccaagtagtagcttaaaatacatttactatagttgttaagtaagcgaaaacattttgtaagatgaattgtgttaaaatatgtccttgtacaaactaaaatggcgttttggccgagctgccttgctgctcctccagtttgatgcgcttgcacttcatgcgtcgattttggaaccacaccttcacctggcgttcggtcagctccagcgccactgcgatttcgtagcgacgcaagcgagtcaaatagttggaatagcagaactccgcttccagctgcttgagctgcgtttttgaaaatgctgtgcgttccttgcgattcgagctgattgcccggagtttggacctttggcttggaagttcttgaccagtaggtgcctcattttgtaaccattgatcgttcgcttcgttgcaccaattagtttctagtttattgtaatccgcgtaggaagaagacgcactgtggtcatatacatagctgcagtccgtatagccctccgtttggttcagccacgatttcgtaatatcctcgtagcaataggattcttggtagacgttcgcgtgggagttcttcattgccgatgtctttgcttctaggtctaaactattactgaaatctcagattcggcggagctgctttttaaacaaggcgcagagtgtgccaggccaatctgctttttcacttagtcgcaaatgatgtgctgctgatatgataattgtgcgcaacatctggacctcgggtatgagtggttatgacacccgcagatcggcttgttgtctttgcctacgaactgttgtcacaacaaacccgaatccgattcccagccccttccccaggcgtccggtcagaaacggaagtggacgcatgagtcaagtgctttgtgccaccaactgcggagctataaaattttaatagacaaccgtcggcgagtcgtaagacccagtcggagatttatctgaaagtcgcaattgcacgcgcttttaaagtcgatgcggcggattacgagtgaccat

SEQ ID NO: 15224 - DNA, 1130 bp, DROSOPHILA
gcgatttttattcatttactactttaataatcaattttagtgaattgacactaattaaaatgccgcctgttaagaagcccaaggcgcagaagatcgagaagcaaagcacgcccaaaaagcccatcgatgcagccaagaatgtggtttccggacagctaaagaaaaaggtgaccaaggccaggccgcagaagccaaagggtccagaacgcggcgtggtcattgtgaagcacctgcctcacggattcttcgagcagcagctgcgccagtacttccgacagttcggtcgggtgctgcgcgtccgtttggcccgttcgctgcgcaccggtaacagcaagggctacgccttcgtggagttcgagtacccggaggtggccaaggtggctgccgacaccatggacaactacctgatgttccagaaggtggtgaaggccacctacattccaccagagaagcagacactcaacttcttcaggacttccttgaagaaggttgtcaataaggccggcaaggaaatctatgtctcggatttaaccaaagccacacagcgcagcgtgaaaaagcagaataactgggatgagtccgcctgccagaagcgcaccgtggccaatctcaacaagatcaagaagctgcaggagaagtacaaggatctgggcatcgacttctccaacttactggtggaaccagtaaagaaagcagcaggctccgctgaggcatctacaagccaggcagccgccaagaaagccggtaagaaacaaaaaacggccgcgaagaaagaaccaacgctggaggatttgctgggcaacaccatcaacgaggactccgatgatgaggactacgttgatgcatccgatgatgagtccgatctggaggctgaggaggagcaagcggacagtgagcagaccagcgatgacagcgacgaagaggaggatttatcaccgccgcccaagcagaaaaagactaagctggctgataaactgaaacgcaagcccggcactggtggtgtgcagaagaagaaaatagctccgccggctaagagcaacaagaatgccgccacccagaagttgcagctggccgcagccaagtcgctggccaaacccttgcccaagggaaaggccaagaaatccaagtag

SEQ ID NO: 15225 - protein, 356 aa, DROSOPHILA
MPPVKKPKAQKIEKQSTPKKPIDAAKNVVSGQLKKKVTKARPQKPKGPERGVVIVKHLPHGFFEQQLRQYFRQFGRVLRVRLARSLRTGNSKGYAFVEFEYPEVAKVAADTMDNYLMFQKVVKATYIPPEKQTLNFFRTSLKKVVNKAGKEIYVSDLTKATQRSVKKQNNWDESACQKRTVANLNKIKKLQEKYKDLGIDFSNLLVEPVKKAAGSAEASTSQAAAKKAGKKQKTAAKKEPTLEDLLGNTINEDSDDEDYVDASDDESDLEAEEEQADSEQTSDDSDEEEDLSPPPKQKKTKLADKLKRKPGTGGVQKKKIAPPAKSNKNAATQKLQLAAAKSLAKPLPKGKAKKSK

SEQ ID NO: 15226 - DNA, 6371 bp, DROSOPHILA
attgccccacttgtcttttccggtggcaataggtgctggaagggattgagagctcccggctgctcccacaacatccgagttgctattgggcacagccgtcgaattgctggagtggctcgatgtggtttctatgttctcccgcaaaagggtcacttgcagcaagtgcggaaagtgaatgtgacccacgcgcctaatatcgttggctggaatcaaagcgatatataaaggaaccagaaaactacggagacgaccccactcacgagcatattggtagctccagtttaagataaagccatcagaagataggtagaacttcttcatatcttccgggaggtagacgcagtgcctctgctcccaattcaccaactggcaggcattcagaggttgtcgtcgctccaacgtcacattacatacccttggcacattggctgcatgtttgagaggatccactcttacaggacttcaatcttttgttggtttcatactcacatagcgtccttatcagaccgagggtcaaattttcataaaatgcatcctctggcgagagcttcttgttcatcatcaaataatttatgcctcagaataaattctgttaaatttatacgtcagactgttttccacatgtatagactagctgtcacggtataaacaaagtcacatcgaattggttgttgtggcaacggtgcggattgttgatgccatcgacttcaaagttaggtaaataagtgagcaaagcttatgaaaaaaaaatcaaattcaattttcagacaacatcgaaaataatttatttacattacttatatttgcgataaaccaacaactataaactgtggagctttaacgacaattacacataaaataacatgattacatgaattggttaaaggagacgagtggtattgaatggtatttgttattggtatttgaatgaggacaatctgctgctgccgcctcatcttttgctctgatcctgggcctcactctcggcctcctcctcgtgtcaggaaacctcccaaaccgtggattccacagaccgtcgtggacgggcggccacctccacatgggcgtccagtccatcgctcagccgactgaaacggcgtgcccaactccctcgggtcgtcaccgtgcttccggctatcgacgccctgttgctggtgtcccggaacaggctcataatgtcctggctgtcgccctgagcacgcttgatgccgtgctggtacttggcctccttggccagcagctgctcccgctgcatttgggtcttcacctcggatggaacgtccggaatgatgaactgcatgatgccagttatcacaaacacaacgtgctggaaattcaagattatttgagttcattatcgttatagaactggtatttataagacccacctcgaaaaccaccacaaaagccaagcgggcagcaaagacatgccagtaatggggactcagtccatagggttcgtaatccttggggccatttctaaatggatacaaatgaagtggtgcacaattaaaagtggtgttgtagaaacatacctatagccacgatattggcaggtgtcgggatctttttcgctgaccgatgcaccccactcctccttgtaatccgaggtattgaagatggacagcgagtgctcaatgtagccagccaatgtatgggtttcggaataaacaaacttgtacaccattcgtggtataaaatcacttgtgtatgcaatcacaaaggcgttcgaaacgacggccgtgtacgtgatgatccgaaggataccgtaccaagctccaatgtcttcaacccgctccgccaaaggacgtctggcctgagtgaccatcttgtaggcatccaaacggatctcggccacgttgttcagtagagcaaagagcggtgccagtggaaatgcagccacgaacaaagtaacaaagccatattgaagaactggtgagtttaacaattatatgtatataaatatcagattaaaagataagatcataaggtactcactcatttccagatactcatcgaacagggccagacgcccggggtcctgcatgtgatagtcctgctcccaggccatatgcaaatgcgactcatccttggtggcctgaaatggattatgatcaacatgagtttcaatgtatttcaatctttgattgcactacccacctgtttatgcttccgttgacgccaccagttccaaaatttggggaaaaggtactccatgaagttgttccagcactgtttgccgaccataatgatggccaattggatgcacagttcggataagcaacccgccggatcgcagatatcattcttcagccggaagaactcacttttgcgggcttgatcatctccaggataatcaaagaaccgccccttgaagaatgcaatgtagatgagcgaggagtagaagttcatgaactcgaagaagaatatcttgaaagtataggagtcctcgtattccgtgtgagtgcgtggattctccaggttggtcagcttaatggccatgcggtggtagatctggaaagtaaatgtggtttatatccaagtcttaatatgtattgtacaattcgaaaatgtagccctactcgtgttagtatcataatgaccaccaaattgattaaggcagccgtgacactggtgaaaagtttggcatgctccttaacaaagaatccgcctcctccataaatgacagacaccagggttatgcgataaagaatggtgcccagcacggcagagaggaccacggagatctacgaatagtttgaagctcaataattgtaaaatgaaatattactttgaataactcaccataaaaagcactgcactaccggtgattacaaatcgtatggacctgttccaggtggacatatagggttccttttcccgcgtgacaggattcatgcgaaatgtggtggcattcgtttcaaattccggacggttctcctcgtccatatcgacgttgtgcaagtcccactcccagacaagaaccgattgtttgcgtttccagagctccaggaatgtggtggctaacaaaagatacaaataaaaataaaaaattttgcacgaatttcatgggacctaccccagaaggacatgaagatggcgaagaacaccgtcgagggattgtcaaagagataggtgagtcgcgaaaagaggcacgattccgagagtcgttggtagctgcaggccttatcgcaaagtggacacaaagtaatgttccccgtgccatattcattgcagatctccttgctgggcgtattgtcctccgactccagagtggcaagtccgtaaatgaaacagagcgtgcccaccacggccggatacacgagcatctccgtgtagaatcccagccagcaaaaatacagggcgatcttgtcgccgaagtacttgcgcaccaagcacagcggctgcttcttgtaccactgggagggatgggcccacgtctggtagaggacccgacggtccagcgagattccgctggagtgcggtcgatcgtaccgcccctcgtgcagcgggaaacagcccagataggtgccgtcgttcatcagccgccgaatgccgctgcggtcgctctcgtcgaagggtgtccggatgagcacctgcatcaccatcagtgatcgttgggcactggtgaaggcagttgcgcgatccttgacaataaacctggggtgggggaaaatcaattacattttaaaaacttagttcttttgccaaaactatattattcgacttactgctcctccggatttccattagctgttgcagccttaaatgtagtctctccctccagaagtgtttggtccagctgaatcttcttagtcaagcgctgccacacatccttccaatattgcatattcctaagcacaacattctcctcatcctttgaatatataaccatttagataatttgtaatttataatcatttcgatatgctcacccaagatggtttcacggatatggtgataaatcttttcacgggcagcttcagattcatgacctccgccagtcgtgtttccagccgccagggcagatggatcttcaaaaagaaggtcttctcgttgaaggactgcgacttgtcctccaactcgacctcgagtccctccttgatgaggttctccatgaaggaacgtcggttatcgcgacgcttggcctccgcttcagtcatgacgcccaggtcctcctcctcccaggccagcaccatgtccactttccgcctgccatctcggaacatcagtgactctggatccaatccctccctgtcctgtttgctgacccttctctcgtctccagactcgccgcccaggctgttgcttttgctggcctttcgactgccgtagtaacttccacttacggaactcgctgtgtccgaagcctttctttccgtgggaatcagttgtcgatagccgaattggtcgggtaaaacattggagtgcgaggactccattacctcgtaggactgattcactcggtcggcggaacctagcgtgggactcaagtttagacccaagcttctccgcatggcggtgccaggtatatcctcatcattatttccaactatcttgggcccaaaggcctgcgtgggactcggttccgcggagtcagcttccagatgcgtgggcagtggcctggctatcgcgttggatttggggaacagtggattgccattgctggtccgcatcaccgaggagttgagccacttttccgtgtaggcagccgatccggcccgggcccgactggcacttagcttggatttgggcggaatcggagtggctggcttgctcgggctgtccacaggaacattatggctcgcttggcagctataaacgctatctatcggatccgattcgacgtgtcttggctgcaggtcggagtcaattaaagctccctcctgttgttacatattgaaagttcagtaacctgaaattgttatttcgttttcaaactcaccccgtatcctattaatctgccagccacaatgccactatcctggctaagtctccgtggtcgcagctttgtctgacttcggcggctcatgcgctcgctcttggcgggactggacatcacctgcctagtggtggagggatccggggattgtcgtgggcttcgcagcgttggcaccgaaagaaatcctgagggaaggaatgttccaagccatcgtataaaattaaaattatccacttcatacttctactcactgggaaactgaaagaccgactgctcgctgatcctgtcgccctcctgggctgcactaccaatgagatcctcccgcgagttggcctcagttatgggggcggtgctctcatcttcaacgctgtcgatgcggatctgaaagatgtgtgacctctcgccggaccttccttcttgactgctcatcgtcttctatctatggcgtcatggaattctgtggatggggcggcaggtcatgtggggccactttctaatttggcctagtttggagcacctgctccgttacccatgataaactatttaaagtgacaagttcgaaaacttgcgggggagcgattcggggactgtcattcaagagttgtcgtagctgcgcatacttttatcccccgatattccagtgggtccaatgggtacaatgggtatattaactattcatttatgtttatactactggccccgggcagggcgttaatttatacccctaagagtatttgtatcttcatttgcaagcgcgtttcaatcaaaaggtgaactcgggcacgcatttgacattgacccgtagaaggtgtttgtatagctcgacaagggttttattgggttagcagtgggggacacagctacagccattgggattaatgccttcactttaacgttagtgcactgtgggagcgagtccagttggatcgcaaaatccttagtggggcagaagcaaacttgttgctacgagtggtgaccactttcccaggcggccgaatgacaatagctctaaataattgccctagatttggtattgggatatgtgtgtagtaccatgtgtggatatggcaatgggtggtggtggtcagtggattgccactggacgacagacaaataaatccaactcgtacctggatcactaataagcgagcgatggacgtcctggaaatgtcagcgttcgttggcagttgtgaaaagtcccatgccattgaagtaatcacaacaattgaaggattattgattcgctcccgtcggtttcaagcactactctcatatggataatcgattattgattgccgtttctattcatatgcagttgggggtgcaatagtttaattgtttgctaacgctttagcactttcgccaaaaaaaaaagaagatcgttaaactgcagatctgccggccacttcagtcacttcactataattca

SEQ ID NO: 15227 - DNA, 3660 bp, DROSOPHILA
atgagcagtcaagaaggaaggtccggcgagaggtcacacatctttcagatccgcatcgacagcgttgaagatgagagcaccgcccccataactgaggccaactcgcgggaggatctcattggtagtgcagcccaggagggcgacaggatcagcgagcagtcggtctttcagtttcccagatttctttcggtgccaacgctgcgaagcccacgacaatccccggatccctccaccactaggcaggtgatgtccagtcccgccaagagcgagcgcatgagccgccgaagtcagacaaagctgcgaccacggagacttagccaggatagtggcattgtggctggcagattaataggatacgggccaagacacgtcgaatcggatccgatagatagcgtttatagctgccaagcgagccataatgttcctgtggacagcccgagcaagccagccactccgattccgcccaaatccaagctaagtgccagtcgggcccgggccggatcggctgcctacacggaaaagtggctcaactcctcggtgatgcggaccagcaatggcaatccactgttccccaaatccaacgcgatagccaggccactgcccacgcatctggaagctgactccgcggaaccgagtcccacgcaggcctttgggcccaagatagttggaaataatgatgaggatatacctggcaccgccatgcggagaagcttgggtctaaacttgagtcccacgctaggttccgccgaccgagtgaatcagtcctacgaggtaatggagtcctcgcactccaatgttttacccgaccaattcggctatcgacaactgattcccacggaaagaaaggcttcggacacagcgagttccgtaagtggaagttactacggcagtcgaaaggccagcaaaagcaacagcctgggcggcgagtctggagacgagagaagggtcagcaaacaggacagggagggattggatccagagtcactgatgttccgagatggcaggcggaaagtggacatggtgctggcctgggaggaggaggacctgggcgtcatgactgaagcggaggccaagcgtcgcgataaccgacgttccttcatggagaacctcatcaaggagggactcgaggtcgagttggaggacaagtcgcagtccttcaacgagaagaccttctttttgaagatccatctgccctggcggctggaaacacgactggcggaggtcatgaatctgaagctgcccgtgaaaagatttatcaccatatccgtgaaaccatcttgggatgaggagaatgttgtgcttaggaatatgcaatattggaaggatgtgtggcagcgcttgactaagaagattcagctggaccaaacacttctggagggagagactacatttaaggctgcaacagctaatggaaatccggaggagcagtttattgtcaaggatcgcgcaactgccttcaccagtgcccaacgatcactgatggtgatgcaggtgctcatccggacacccttcgacgagagcgaccgcagcggcattcggcggctgatgaacgacggcacctatctgggctgtttcccgctgcacgaggggcggtacgatcgaccgcactccagcggaatctcgctggaccgtcgggtcctctaccagacgtgggcccatccctcccagtggtacaagaagcagccgctgtgcttggtgcgcaagtacttcggcgacaagatcgccctgtatttttgctggctgggattctacacggagatgctcgtgtatccggccgtggtgggcacgctctgtttcatttacggacttgccactctggagtcggaggacaatacgcccagcaaggagatctgcaatgaatatggcacggggaacattactttgtgtccactttgcgataaggcctgcagctaccaacgactctcggaatcgtgcctcttttcgcgactcacctatctctttgacaatccctcgacggtgttcttcgccatcttcatgtccttctgggccaccacattcctggagctctggaaacgcaaacaatcggttcttgtctgggagtgggacttgcacaacgtcgatatggacgaggagaaccgtccggaatttgaaacgaatgccaccacatttcgcatgaatcctgtcacgcgggaaaaggaaccctatatgtccacctggaacaggtccatacgatttgtaatcaccggtagtgcagtgctttttatgatctccgtggtcctctctgccgtgctgggcaccattctttatcgcataaccctggtgtctgtcatttatggaggaggcggattctttgttaaggagcatgccaaacttttcaccagtgtcacggctgccttaatcaatttggtggtcattatgatactaacacgaatctaccaccgcatggccattaagctgaccaacctggagaatccacgcactcacacggaatacgaggactcctatactttcaagatattcttcttcgagttcatgaacttctactcctcgctcatctacattgcattcttcaaggggcggttctttgattatcctggagatgatcaagcccgcaaaagtgagttcttccggctgaagaatgatatctgcgatccggcgggttgcttatccgaactgtgcatccaattggccatcattatggtcggcaaacagtgctggaacaacttcatggagtaccttttccccaaattttggaactggtggcgtcaacggaagcataaacaggccaccaaggatgagtcgcatttgcatatggcctgggagcaggactatcacatgcaggaccccgggcgtctggccctgttcgatgagtatctggaaatgattcttcaatatggctttgttactttgttcgtggctgcatttccactggcaccgctctttgctctactgaacaacgtggccgagatccgtttggatgcctacaagatggtcactcaggccagacgtcctttggcggagcgggttgaagacattggagcttggtacggtatccttcggatcatcacgtacacggccgtcgtttcgaacgcctttgtgattgcatacacaagtgattttataccacgaatggtgtacaagtttgtttattccgaaacccatacattggctggctacattgagcactcgctgtccatcttcaatacctcggattacaaggaggagtggggtgcatcggtcagcgaaaaagatcccgacacctgccaatatcgtggctatagaaatggccccaaggattacgaaccctatggactgagtccccattactggcatgtctttgctgcccgcttggcttttgtggtggttttcgagcacgttgtgtttgtgataactggcatcatgcagttcatcattccggacgttccatccgaggtgaagacccaaatgcagcgggagcagctgctggccaaggaggccaagtaccagcacggcatcaagcgtgctcagggcgacagccaggacattatgagcctgttccgggacaccagcaacagggcgtcgatagccggaagcacggtgacgacccgagggagttgggcacgccgtttcagtcggctgagcgatggactggacgcccatgtggaggtggccgcccgtccacgacggtctgtggaatccacggtttgggaggtttcctga

SEQ ID NO: 15228 - protein, 1219 aa, DROSOPHILA
MSSQEGRSGERSHIFQIRIDSVEDESTAPITEANSREDLIGSAAQEGDRISEQSVFQFPRFLSVPTLRSPRQSPDPSTTRQVMSSPAKSERMSRRSQTKLRPRRLSQDSGIVAGRLIGYGPRHVESDPIDSVYSCQASHNVPVDSPSKPATPIPPKSKLSASRARAGSAAYTEKWLNSSVMRTSNGNPLFPKSNAIARPLPTHLEADSAEPSPTQAFGPKIVGNNDEDIPGTAMRRSLGLNLSPTLGSADRVNQSYEVMESSHSNVLPDQFGYRQLIPTERKASDTASSVSGSYYGSRKASKSNSLGGESGDERRVSKQDREGLDPESLMFRDGRRKVDMVLAWEEEDLGVMTEAEAKRRDNRRSFMENLIKEGLEVELEDKSQSFNEKTFFLKIHLPWRLETRLAEVMNLKLPVKRFITISVKPSWDEENVVLRNMQYWKDVWQRLTKKIQLDQTLLEGETTFKAATANGNPEEQFIVKDRATAFTSAQRSLMVMQVLIRTPFDESDRSGIRRLMNDGTYLGCFPLHEGRYDRPHSSGISLDRRVLYQTWAHPSQWYKKQPLCLVRKYFGDKIALYFCWLGFYTEMLVYPAVVGTLCFIYGLATLESEDNTPSKEICNEYGTGNITLCPLCDKACSYQRLSESCLFSRLTYLFDNPSTVFFAIFMSFWATTFLELWKRKQSVLVWEWDLHNVDMDEENRPEFETNATTFRMNPVTREKEPYMSTWNRSIRFVITGSAVLFMISVVLSAVLGTILYRITLVSVIYGGGGFFVKEHAKLFTSVTAALINLVVIMILTRIYHRMAIKLTNLENPRTHTEYEDSYTFKIFFFEFMNFYSSLIYIAFFKGRFFDYPGDDQARKSEFFRLKNDICDPAGCLSELCIQLAIIMVGKQCWNNFMEYLFPKFWNWWRQRKHKQATKDESHLHMAWEQDYHMQDPGRLALFDEYLEMILQYGFVTLFVAAFPLAPLFALLNNVAEIRLDAYKMVTQARRPLAERVEDIGAWYGILRIITYTAVVSNAFVIAYTSDFIPRMVYKFVYSETHTLAGYIEHSLSIFNTSDYKEEWGASVSEKDPDTCQYRGYRNGPKDYEPYGLSPHYWHVFAARLAFVVVFEHVVFVITGIMQFIIPDVPSEVKTQMQREQLLAKEAKYQHGIKRAQGDSQDIMSLFRDTSNRASIAGSTVTTRGSWARRFSRLSDGLDAHVEVAARPRRSVESTVWEVS

SEQ ID NO: 15229 - DNA, 3931 bp, DROSOPHILA
gctgcctgtagaagcatcatctgcggtcttctagttgtaggagattgcgccggtgaggccacagattccgaatcactttcgctctgggagaaatcggtgcccagagcttgcaagtcactcagcagctgactaaagccatttagtttcctttgcggtctcgggctggaagtgctgcacagacttggctttcgcttgggcgtagctggagtcggaggagcagatgtggagactggagcagactcgggaatggcgttcagtccctgggttatgccactcaactcgtggttaatggtctccgccaatagcgtcaaggaatcgctgtgtttcagaggatgtcctggcggaatgatagcgcctggtcccagaatcgttccaccctgcgacccttccgtcgatgaaaccttactgctgttgaggctatcgcaatccgaatcgaattccagcatggccacgcctcctccgccgccgccctgctcctgttcactcagatattgctcagaggtctgaactaggtgctgcagttcctgaacccttctcagaacttgctcgttcttagcctccagttgatggctgcccaaatggctgcgtccttcgcagtagttgctgccactactgtcactcagtcccgaatccttggctgcctcctccagcagctcggtggccatcacgctgtgcaaatcgaggtccatgacgtagggcagtgaggagggcgcctgaatggaggactgctgctggagctgacccctttggactagcggatggtagggtggcgccatcaggaagttaacgctgtgcgctcgagtgtggaagggaagcaggtagctccatcccgctgggagcactgtgtgctgggacaggaatccgggcgcattgtcctcgtcgttcggttcccgttctcgcagaatattcaacacattacctgaaatagaaaagatataataatggcattgcaaatatagatccttgaattcctcacctgtcagcagtcggtagtagccacctaggacaaggctaaactcgcagccatcccgatcctccattatgaacttcacagctcgatctccgagcatgaatatggatacgctgcaggtgacatcgtcctcgcgattcaccaccacatgggtgaagtcctcgatggcggaaataggctggggctgcttggaatggggcaataagttatagaagttatccaccatcaacagaatcgagatagacttaccaccgaattgcgggcactggatatctggctgagtccaaagcgtggactcaccagcaggacgcgttcgacgccctctctttggtttgtgctgaaacatttggctccatagcttggtaagctagcgattatatctagataatggagtttggcctgcaaatgatgaacgattttagttctgatttgatgttcttatttctctctattccatttttgtatgccttaagctacgttaagtgccttttgctcacctgcagctgtgtgagaaccttgctggaggagccagtcatctccgcgttgagcttaaggaagtgagaaatcagccggcgcagttccttccgcttcatgccctcgaacagactcactggcacaaagcgctccagaccgaactcgcgtctgaaagaagtgagaatgttgtattcatagaaaggcggtgtctcaaggattcgtctgaacctactcgactagtttgacagtgagcttggcgggcgcaaagttgttggccagggcgtgctggtgcatgtggagggcggccaaacgcagggccaattccggctgcagctctggggcgaatctctcctggttgacgtcattgcagcactgcaagtacaggtagtcaagggcatgcagatcccgctgcgccagttccgcggccgagatgggcacgaaggtgatgcggaataggcacctcaatttgtgcgctcccggacgcgcagcaatctagttaagaaaataagcggaaattcaaaaataaatgtaatttcgccttgagcaaatgtatattaagttatcctcaccctggccagcgattcctgcggatccagcagggtcagcttgttgcgcttgaggctcttcacgtgctccagcaccaggctgaagagctcgccacagcacaggcacagcttgtccagcagcgagctgaccacgtcctgcaccgtggtggtggcatcgtacttgaacgacttggtctgcccgttctcgaggaacaccttcagcacattggccattgggggtacgcagatgtcgccaagggagaaggccgaaggcttaaatgggaagaagacaaattaaaatcaatgtaaaaagtgagcttaatatattacttaccggaaacagtggagctccgttaacgcagacactctcggcgaatcgaactcgactaggacgcgatctcagcttggctcgcttgcccgctgaaagaagtgtggattttctgccaggcagcacgcagtgcgccataggttggcacaccaggagatttacctgcgactcacaggctcgcaccagctggatgacatgatcgcgcggcgcatccttcacatcctcgccattcaccgccaggatctgatcgcccggctgcagttttccgatgctgggaccaccttccgtcacaaatcgcacgattacgggacgttcactcccggccacgaatccaaaacccaggctggcattccgctggagttgaacctgtcgtggctccggaggatgctcatcccagcgtatgcactcgggtgcctcgtatgtggtcgttttattcaggtggctatttaggaaatacaatttataaggccatataagacgatattatgctgggatactcactttatgtaataggaacgacccttggagtctatggcacgctcccagccatacgagagctcctcgtgtttgctccaatcctcgcaagctggcagccaacccgcagattgtgtcatgtgactgaagaaaaattataaataaatatttcaaactattatattcgggcttagaccttttccacagttactaactcatgagtaagtcaattaccactacgtcatacgataaattgcaattgctatcatttcgcattcctcaatatgagacattagtaattcaacaaggcaaatataaaagagctgaccaaatattgtcttttctataagaatgcgtcggtaaacactgttaccatagctcagtcagctgaaatctgtcgataaatacagcggaaaagtatcttgtatctttatttacttattttgttagcagaaaatgaaaaaaaaaaatataatccataaatgtgtttaatgtaatgatgaactccaattaagaacacaagtccgttttaagttgaaggcagccgtcgggctgacatatatttattcaatttcttcttttgattttagagtaggcagaaatggttctgtcagctcaacgtctacagagtctctccgattttacagtttttaatatatttggacttaggctaatccgcgtagctgcgctgccgggtacgccagcagcggagcggcgttcttatgtatatcttatatatctaggcttatcgggagagcgagatatgtatgtacgtatgtaatatgtatttggtcggcgtgtgaatgctgaccatgcacttatactttttgccttcgagtgggtgatcatgttacatccgccctggcctaactgcgtgcataaacataaacataaacatagcaccaaagtgctgccataagttaatatgctattttatttaattgttcttaatattgcataggcaccatactacatctccctccttttgaaaaataacggtaacctagtgaagttattttgattattaaatgcaaattattttatttttatttttattttgtttgtgtttttgtttgaacaacaatagttgattttataatgcaaagataaaaatatacgtagtgtatggaaaatttgtat

SEQ ID NO: 15230 - DNA, 1507 bp, DROSOPHILA
atgacacaatctgcgggttggctgccagcttgcgaggattggagcaaacacgaggagctctcgtatggctgggagcgtgccatagactccaagggtcgttcctattacataaaccacctgaataaaacgaccacatacgaggcacccgagtgcatacgctgggatgagcatcctccggagccacgacaggttcaactccagcggaatgccagcctgggttttggattcgtggccgggagtgaacgtcccgtaatcgtgcgatttgtgacggaaggtggtcccagcatcggaaaactgcagccgggcgatcagatcctggcggtgaatggcgaggatgtgaaggatgcgccgcgcgatcatgtcatccagctggtgcgagcctgtgagtcgcaggtaaatctcctggtgtgccaacctatggcgcactgcgtgctgcctggcagaaaatccacacttctttcagcgggcaagcgagccaagctgagatcgcgtcctagtcgagttcgattcgccgagagtgtctgcgttaacggagctccactgtttccgccttcggccttctcccttggcgacatctgcgtacccccaatggccaatgtgctgaaggtgttcctcgagaacgggcagaccaagtcgttcaagtacgatgccaccaccacggtgcaggacgtggtcagctcgctgctggacaagctgtgcctgtgctgtggcgagctcttcagcctggtgctggagcacgtgaagagcctcaagcgcaacaagctgaccctgctggatccgcaggaatcgctggccaggattgctgcgcgtccgggagcgcacaaattgaggtgcctattccgcatcaccttcgtgcccatctcggccgcggaactggcgcagcgggatctgcatgcccttgactacctgtacttgcagtgctgcaatgacgtcaaccaggagagattcgccccagagctgcagccggaattggccctgcgtttggccgccctccacatgcaccagcacgccctggccaacaactttgcgcccgccaagctcactgtcaaactagtcgaacgcgagttcggtctggagcgctttgtgccagtgagtctgttcgagggcatgaagcggaaggaactgcgccggctgatttctcacttccttaagctcaacgcggagatgactggctcctccagcaaggttctcacacagctgcaggccaaactccattatctagatataatcgctagcttaccaagctatggagccaaatgtttcagcacaaaccaaagagagggcgtcgaacgcgtcctgctggtgagtccacgctttggactcagccagatatccagtgcccgcaattcggtgccccagcctatttccgccatcgaggacttcacccatgtggtggtgaatcgcgaggacgatgtcacctgcagcgtatccatattcatgctcggagatcgagctgtgaagttcataatggaggatcgggatggctgcgagtttagccttgtcctag

SEQ ID NO: 15231 - protein, 502 aa, DROSOPHILA
MTQSAGWLPACEDWSKHEELSYGWERAIDSKGRSYYINHLNKTTTYEAPECIRWDEHPPEPRQVQLQRNASLGFGFVAGSERPVIVRFVTEGGPSIGKLQPGDQILAVNGEDVKDAPRDHVIQLVRACESQVNLLVCQPMAHCVLPGRKSTLLSAGKRAKLRSRPSRVRFAESVCVNGAPLFPPSAFSLGDICVPPMANVLKVFLENGQTKSFKYDATTTVQDVVSSLLDKLCLCCGELFSLVLEHVKSLKRNKLTLLDPQESLARIAARPGAHKLRCLFRITFVPISAAELAQRDLHALDYLYLQCCNDVNQERFAPELQPELALRLAALHMHQHALANNFAPAKLTVKLVEREFGLERFVPVSLFEGMKRKELRRLISHFLKLNAEMTGSSSKVLTQLQAKLHYLDIIASLPSYGAKCFSTNQREGVERVLLVSPRFGLSQISSARNSVPQPISAIEDFTHVVVNREDDVTCSVSIFMLGDRAVKFIMEDRDGCEFSLVL

SEQ ID NO: 15232 - DNA, 9139 bp, DROSOPHILA
atgatcggccatcataatagttaatacgatacgtatacgtaatatgtttgtaaagatcagctaaacacatctatcttaagttacgtcttacacgagttagtcatcaatgttattatgtatttatatctcgttagttcataatgtgaaaaatatcgtgatttatatttaagttgaaaagaaaatcaagtcaccaacgaaggctgcgtttgatttttatttatatactggggagtattaatgtagtatacaagtttcctatttttccaacagattaattatattataatttccccaaaattgtttaatgaatatttaaggctaagtggaaattaattttgccattttccaattgatcttttaagttcgcgccgattaatttgtagcgcagtccgaaactatcgatacattcaaagcgccaatcaaatatcgacacattcaatcagctgatgcagaaagtgttggataattcgtgaaaattattgtgtattgcatctatctttttctatgcgaacttaaaaataattattatagccccgaattctttgagatttgctggcagttagcggggatttcggctgcagccggctgcgaggtgtgtgcgcggatatatatatatagattggccagtccgattcccggcgaacgatcccactttgcgtggcggggtgtggttaaagaaaaaagagtgaagaccaagactcgtaaagcctgaaaaacgcctccgggcgctatagacaatacaataacaattcggcccctcgatctccgtggagctaatcatttatgccgagcgcagagacggagcctaattagcatatcaaattggatgacggcactggcgaatagaatccatctgccgctgtcccctgctacaagaacgcaacagaacaaaaacaaaaaaaaaatcaaaataaaacatcttcaactctttgttctcctagatttggctagtaaagagccgtaggatcctagacgactggccggctatgtggtgggcaagatgtcccggctcgctgattacttcgtaatagtcggctacgacagtgataaggagagtgagtacatccacatgcccatcagccataattagcaattctctgacattcaacaatttcccttttcccagaaactgccagcaatgtgggcggccagccgacgtgcggcaagatcgttcagcgctttcccgagaaagattggccggacactccgtttatcgagggcattgaatgggtgggtgcgcttgaaacattcctcacttaattcgaagcatatctgaattttaacttatcattccgacagttctgccagccgctcggctggagtttatcgtacgagaagcaggagcccaagttcttcgtctctgtgctgacggacatcgatgccaacaagcactactgcgcctgcctcagctttcatgagacggtggccatcacacagacgcgcagcgtcgacgacgaggatgagaccatcggcagcagcaggctgctgggagccacaccctcatcgatggatggcatcacaacgacatccacgccggcttccattacgcaccacagcgtcatgtatgcaccaaagtgtctggtgcttatatcgcgtttggactgtgccgagacctttaaagtgagtttaaaagtcagaccacctaagatactaaattaagccattatcttaatttacagaattgtctcggcaccatatacacggtgtacattgagaacctggcgtatggattggagacactcataggaaacattctgggctgcatccaagttcctccagcgggtggaccgcaggtgcgcttctctataggagcaggagacaagcagtcgctccagcctccgcagagctcctccctgcccacgactggaagtggagtccacttcctcttcaagcagctgggcatcaagaatgtgctgatactgctttgctccgtgatgacagagaacaagatactgtttctttctaagtgttattggcacctgacggacagctgcagagctttggtggcattgatgtatccctttcggtatactcatgtttatataccaattctgccggctccactcacggaagtgttatccacacctacgccatttattatgggcatacatagctcactgcaaactgagattacggatttactggatgttattgtggtggatttggatggcggcctcgttaccattcccgagtcgctgacgccgcctgttcctattcttccatcaccgctgtgggaacagacccaggacctgctcagcatgatcctgtttccaaacctggcgcaggccgatctggcgtttcccacattagagcggccttcagctattgctaagactgacgcccagattgataaggaacttcgcgccatattcatgcgccttttcgctcagctgctgcagggatatcgctcctgcctgactatcattcggatccacccaaagccggtgatcaccttccataaggcaggatttctcggcgcccgcgatctgatagagagcgaattcctgtttagggtgctggacagcatgtttttcacgacgtttgtcaacgaacgaggccctccctggcgatcctccgatgcctgggatgagctctacagctcaatgaacgaactgctcaaatcggaggcgcagaatcgaaatctcgtaggtagaactcaaagattcaagggatattttaattttacctttccttcctactttcagatactcacacatatccaggaattgggacgagttctatatgaaaatgagggcactctggctcacatcagctatgcccaaaaagtactgcgtccgccggaaggcgcattccagcgtattcatcaaccagcctttccgcgcataagttcggaaaaggttgagcttatcatacaggaagggatacgaaagaacggagtgccacaacgctttcatgtaacacgtaatcagcaccgtatcattccgatgggacccaggttacccgaggcattagatgtgcgtcccaatgtccaaaactcggctaggcgactggaggtgctgcggatctgtgtgtcatacatctttgagaatcgaattacagatgccagaaaactgctgccggctgtgatgcgcaccctaatgcatcgggatgcgcgcttgatcttgtgccgcgagttctttggatatgtgcacggcaacaaggcagttctggaccatcaacagtttgaattagttgtgcgattcatgaacaaggcgctgcaaaaatcatccggcattgatgagtacacagtggctgcggctctgctgcccatgtccacaatcttctgccgtaagctctcgactggagtagtgcaatttgcgtacacagagatacaggatcacgccatctggaaaaacctgcaattttgggagtctactttctttcaggatgtccaaggtcaaataaaggcgttgtatctgcttcaccgacgtcagaacgagcatcaaaaggaggccaactgtgtgctggacgaagttcctctagaggagcccacggcgcttgaaattacagccgagcagctgcgcaaaagtcccaacatcgaggaggagaaaaaagccgagctggccaaatcggaggagtcaactttgtacagccaggcaattcactttgcgaaccgtatggtttccctgctaattccactggatgtcaatgtggatgcagccagtaagccgaaaccggcgtttcgtctagaggaaaatcagagtgtttccaataggtaatacgagataagtttctaactttgattttatatttatatatgatttcaattattaaattacagtattatgggctcacacagcctaagcgaacattccgacgaaggattcgaggagaacaatgctttggaaataggtgtcacggttgggaaaaccatttcacgcttcattgactgcgtttgtaccgaaggtggagtgacctccgagcatatacgcaatttgcatgacatggtaccgggagttgtgcatatgcacatcgagtccctggaaccggtatatctggaggctaagcgtcatccgcacgtgcagaagcccaaaattcaaacgccatgcctgctgccaggggaggacctggtgacagaccacctgcgttgcttccttatgccggatggacgcgaagatgaaacccagtgcctgatacccgccgagggagctcttttcctcaccaactaccgtgtgatttttaagggttcaccttgcgatcccctcttctgtgagcaggtgattgttcgcacttttccgattgcctccctgctaaaggagaaaaagatatcggtgctgtacctggctcatctggatcaaacgctgacagaaggactgcagctgcgttccagtagctttcaactgatcaaggtcgcttttgatcctgaagtaactcccgagcagattgagagctttagaaagatattgagcaaagcgcggcatccgtttgatgagtttgagtacttcgcgtttcaatcatacggcaccatgctccagggagtggctccgttgaaaaccaaggagaaatattccaccttaaagggctttgccaaaaaaacactgctccgcggggccaaaaaggctggattcaagcagaagcagcagaccaagcgcaaactagtttctgattatgattacggaagtgcagatgcgcaggaaacacagtccatcgacgatgaactggaagatggagatgagtttgaaacccaaaacaatgccatgcccagattgctaacaacaaaggatgtcgaacggatgcgagaaaggagctatgtgcaggactggaagcgactcgggttcgatgcggaatcacagcgtggtttccgtataagcaatgccaataccagttacgccacctgccgctcctatccggctataattgtggcccctgtgcagtgcagtgacgcggcaataatgcatttgggtcggtgctttaagggccagcgcattccactgcccacatggcggcatgcgaacggagcgctgctcattcgaggtggtcaacccaatagcaaatcggtcattggaatgcttaaaaacacgacggggagcaccacgaacgcccatcacgatgtcacgcattatcccgagcaggataaatacttcctagctctgatcaacacgatgcctaagctaacgcccctggctctcaatcagtattcgggcatgaatctctcgatgagttcgttgatgggccacagctcctccgacgatcgacagcctcttaccccggaattgtcgcgcaaacataagaacaacctggatattagtgatggtaacaagtccagtcaaggaggtaaaggcggaacgatgaagggaaatcctaaaaactcattggcacatcccttccgcaaaatgcggctttatgcattgggtaagcaaaatggattaatcttttacactggcaatttctaatatttaattttacatttataggagagaaatcccaagcaaagtccaacatgaatgttgacttttgcgcggacttcattcccgtagactatcccgacatcaggcaatcgagaccagccttcaaaaagcttatacgcgcctgcatgccatcacataataccaacgaggccgatggacagagctttgccaagatggtggaacagtcagactggctgcaacagatctcctcactgatgcagttgtctggtgccgtggttgaccttatcgatttgcaggagagcagcgtaatgctatctctggaagatggctccgatgtgaccgcccagctcagttcaatagcccagctgtgcttggatccctactaccgaagtctggacggttttcgtgtgctggttgagaaggagtggttggcttttggtcaccgctttgcgcatcgcagtaatctcaagccgtcgcatgcaaacacaaatatcgcgtttgctcccacctttctgcagttcctcgatgtggtacatcaactgcaacgccagtttcccatggccttcgaatttaatgatttctatttgagattcctggcatatcactcagtgtcgtgccggttccgcaccttcctctttgactgtgagcttgagcgatcggattcgggtattgctgcgatggaggacaaacgaggatcgctgaatgcaaagcatatgtttggagccggtggtatggcgaccaatggatcagacgatgagtgcagcgtgtaccccctggatatcaggagtcaaagggcacccgctcccctgaatcgcattggtcactctatcttcgattatatcgaacggcagcataacaagacgcccatattttataatttcctgtattctggcgataaaagcgtgactctgcgaccgcaaaataatgtggctgctttggatctatggtgttattataccaacgaagagttggcccagggagcgccgtacgatttagaagtgaccactgtggacgacgaaatcgatctgtccgagacgaagggaaagcgcatggtcattaccgccggatacgacaacatggagaagtgtaatcccagtgcctatgtttgcctgctaagcgaggtgaagcaagcggagacggagcgaggccaccttccccaaaagtggctgcaggtgtggaatagcttggaagtgccccaactggagccagttgctcggaatacatcgctgggaaacatcttcgtgcagacgcatcagcacaaacgctctacactggagatcatcatgaagggtcgtctggcaggttaccaggacaagtacttccacccgcatcgtttcgagaagcatccatacactacgcccaccaactgtaatcactgcaccaagcttctctggggaccggttggctaccggtgcatggactgcggaaactcctatcacgagaagtgcacggagcactccatgaagaactgcacaaagtacaaggccatagatggagctgttggaccgccgaatgtgaatatgtcgcagggcgacacggcaagcatcgcttccagcgcggccacaacggcgcgcacctcaagccatcacttctataaccaatttagcagtaacgttgccgaaaatagaacgcatgaggggtgagttttgtgtgtcatattagggataatataatgaaattttctaaacatttatgattgatttttattacttcctttagacatttgtacaaacgtggcgcattactcaagggctggaaacagcgatggttcgttttggactctattaagcatcaacttcgttactatgacacctccgaagataccgctccgaagggcatcattggtaaatacatttattatggctttaggaactttgaagtaattgcttaacttctttttcagaactggctgaagtccaatctgtaactgccgcacaacctgcacaaattggcgccaagggcgtagatgaaaagggattttttgatgtgagtataatagacaaatacgagctcaataataactataatcattgttttttttttagcttaaaacatcaaagcgcatctataatttctacgcaatcaatgcaaatctggcacaggaatggatcgaaaaattgcaggcatgtttgcaatagacagacaatgcaaatcgacgcttttttcacaccctgaatttcgtaaaatttcctttctgtttggttcggcgatctgaagttttgttataggataaatcagtatgtttccagttttacgtattaatattttgaatctgtggcgctgccatcatatcatagctaaactatcactttagaattcccttagttgatttgagaaatcgctcgcacccattaacataaatgttagcaacaattatgccaagcaacaagcgaaactttagttaaacaatgaaatccatttgtaaatgtgaatgtaaagaaactataaaattatgtgattatataaacaaacaaaaatcagactatgataaatttacgataaaatggaaaagccacgcccgcaaattttttgatataattttttatatatatacatatatccttatgcctaaactatataggtttatagtgaatttaccaaagaatattccacctttgttgcgcaattgaaatgcatttcttgattgcttcctttaaactaaaccctattattaaacgctttcctttatttatacactacatggtaatcaatatataatacatactttaatgcaattatttgtggcttacaaacgataatatacatttttaaacaaatgcgcttggtattattattgtttacgctctattccttcggagaaacttttccatccatcataggaacgttgtccaatagacaatattgagtataaagaacgaaaacgggaagaaaaagcgcgagaatttgtctatataaatggctgtggcatggccatggcagaaagtgtcgtactggggctcaataatcgattcccgatgatgctgtagtgcagactaggaatcgtcagcttgggcgatatatcccatcatatttcttccaactcacctttaggtcgtccagatcactgatgttctcgtccgaataccccttcattgcctttgtggccaccggtcccataaaattgttgaccactgcaaattccatcagagaaaggaatacaaacaccgaacaggacgacatccagacgtctatagccttgacatacgaaaccggcggcagcgattgttgcgactgggtattctgggtggccagggttagcagtgaggtcactcccagagttacacgggcgggtatcgcttctggttttatccaaaacgatatccaagacatgaccacaatcagagccgaggggatgtaggtgtggaacaaatggtaacccaggcgtcggcgcaggttgaacacaatggccaggcaggtgaagttacctagagataaaataaatataaattatattgaaaaaaatggcttttaatagtttagtcttacctgttgagtactctatagtacagtcggttgtgtagttatttgatatgtctagctgcggcaactcaatctccgtgttaaccacaagtgggtcggtcatgttccaaatgaaaaccaaatcttccaccgtatgggatactgccaatcaaaactcggttcaacacagattatttgtaattcgagaagcggaatggaaagttccaagcgatacgggatttgcagggtgtagataaccattacatttccacctacaactctcgatcatcatggagcagatttgcgtgtca

SEQ ID NO: 15233 - DNA, 6576 bp, DROSOPHILA
atgtcccggctcgctgattacttcgtaatagtcggctacgacagtgataaggagaaaactgccagcaatgtgggcggccagccgacgtgcggcaagatcgttcagcgctttcccgagaaagattggccggacactccgtttatcgagggcattgaatggttctgccagccgctcggctggagtttatcgtacgagaagcaggagcccaagttcttcgtctctgtgctgacggacatcgatgccaacaagcactactgcgcctgcctcagctttcatgagacggtggccatcacacagacgcgcagcgtcgacgacgaggatgagaccatcggcagcagcaggctgctgggagccacaccctcatcgatggatggcatcacaacgacatccacgccggcttccattacgcaccacagcgtcatgtatgcaccaaagtgtctggtgcttatatcgcgtttggactgtgccgagacctttaaaaattgtctcggcaccatatacacggtgtacattgagaacctggcgtatggattggagacactcataggaaacattctgggctgcatccaagttcctccagcgggtggaccgcaggtgcgcttctctataggagcaggagacaagcagtcgctccagcctccgcagagctcctccctgcccacgactggaagtggagtccacttcctcttcaagcagctgggcatcaagaatgtgctgatactgctttgctccgtgatgacagagaacaagatactgtttctttctaagtgttattggcacctgacggacagctgcagagctttggtggcattgatgtatccctttcggtatactcatgtttatataccaattctgccggctccactcacggaagtgttatccacacctacgccatttattatgggcatacatagctcactgcaaactgagattacggatttactggatgttattgtggtggatttggatggcggcctcgttaccattcccgagtcgctgacgccgcctgttcctattcttccatcaccgctgtgggaacagacccaggacctgctcagcatgatcctgtttccaaacctggcgcaggccgatctggcgtttcccacattagagcggccttcagctattgctaagactgacgcccagattgataaggaacttcgcgccatattcatgcgccttttcgctcagctgctgcagggatatcgctcctgcctgactatcattcggatccacccaaagccggtgatcaccttccataaggcaggatttctcggcgcccgcgatctgatagagagcgaattcctgtttagggtgctggacagcatgtttttcacgacgtttgtcaacgaacgaggccctccctggcgatcctccgatgcctgggatgagctctacagctcaatgaacgaactgctcaaatcggaggcgcagaatcgaaatctcgtaggtagaactcaaagattcaagggatattttaattttacctttccttcctactttcagatactcacacatatccaggaattgggacgagttctatatgaaaatgagggcactctggctcacatcagctatgcccaaaaagtactgcgtccgccggaaggcgcattccagcgtattcatcaaccagcctttccgcgcataagttcggaaaaggttgagcttatcatacaggaagggatacgaaagaacggagtgccacaacgctttcatgtaacacgtaatcagcaccgtatcattccgatgggacccaggttacccgaggcattagatgtgcgtcccaatgtccaaaactcggctaggcgactggaggtgctgcggatctgtgtgtcatacatctttgagaatcgaattacagatgccagaaaactgctgccggctgtgatgcgcaccctaatgcatcgggatgcgcgcttgatcttgtgccgcgagttctttggatatgtgcacggcaacaaggcagttctggaccatcaacagtttgaattagttgtgcgattcatgaacaaggcgctgcaaaaatcatccggcattgatgagtacacagtggctgcggctctgctgcccatgtccacaatcttctgccgtaagctctcgactggagtagtgcaatttgcgtacacagagatacaggatcacgccatctggaaaaacctgcaattttgggagtctactttctttcaggatgtccaaggtcaaataaaggcgttgtatctgcttcaccgacgtcagaacgagcatcaaaaggaggccaactgtgtgctggacgaagttcctctagaggagcccacggcgcttgaaattacagccgagcagctgcgcaaaagtcccaacatcgaggaggagaaaaaagccgagctggccaaatcggaggagtcaactttgtacagccaggcaattcactttgcgaaccgtatggtttccctgctaattccactggatgtcaatgtggatgcagccagtaagccgaaaccggcgtttcgtctagaggaaaatcagagtgtttccaatagtattatgggctcacacagcctaagcgaacattccgacgaaggattcgaggagaacaatgctttggaaataggtgtcacggttgggaaaaccatttcacgcttcattgactgcgtttgtaccgaaggtggagtgacctccgagcatatacgcaatttgcatgacatggtaccgggagttgtgcatatgcacatcgagtccctggaaccggtatatctggaggctaagcgtcatccgcacgtgcagaagcccaaaattcaaacgccatgcctgctgccaggggaggacctggtgacagaccacctgcgttgcttccttatgccggatggacgcgaagatgaaacccagtgcctgatacccgccgagggagctcttttcctcaccaactaccgtgtgatttttaagggttcaccttgcgatcccctcttctgtgagcaggtgattgttcgcacttttccgattgcctccctgctaaaggagaaaaagatatcggtgctgtacctggctcatctggatcaaacgctgacagaaggactgcagctgcgttccagtagctttcaactgatcaaggtcgcttttgatcctgaagtaactcccgagcagattgagagctttagaaagatattgagcaaagcgcggcatccgtttgatgagtttgagtacttcgcgtttcaatcatacggcaccatgctccagggagtggctccgttgaaaaccaaggagaaatattccaccttaaagggctttgccaaaaaaacactgctccgcggggccaaaaaggctggattcaagcagaagcagcagaccaagcgcaaactagtttctgattatgattacggaagtgcagatgcgcaggaaacacagtccatcgacgatgaactggaagatggagatgagtttgaaacccaaaacaatgccatgcccagattgctaacaacaaaggatgtcgaacggatgcgagaaaggagctatgtgcaggactggaagcgactcgggttcgatgcggaatcacagcgtggtttccgtataagcaatgccaataccagttacgccacctgccgctcctatccggctataattgtggcccctgtgcagtgcagtgacgcggcaataatgcatttgggtcggtgctttaagggccagcgcattccactgcccacatggcggcatgcgaacggagcgctgctcattcgaggtggtcaacccaatagcaaatcggtcattggaatgcttaaaaacacgacggggagcaccacgaacgcccatcacgatgtcacgcattatcccgagcaggataaatacttcctagctctgatcaacacgatgcctaagctaacgcccctggctctcaatcagtattcgggcatgaatctctcgatgagttcgttgatgggccacagctcctccgacgatcgacagcctcttaccccggaattgtcgcgcaaacataagaacaacctggatattagtgatggtaacaagtccagtcaaggaggtaaaggcggaacgatgaagggaaatcctaaaaactcattggcacatcccttccgcaaaatgcggctttatgcattgggagagaaatcccaagcaaagtccaacatgaatgttgacttttgcgcggacttcattcccgtagactatcccgacatcaggcaatcgagaccagccttcaaaaagcttatacgcgcctgcatgccatcacataataccaacgaggccgatggacagagctttgccaagatggtggaacagtcagactggctgcaacagatctcctcactgatgcagttgtctggtgccgtggttgaccttatcgatttgcaggagagcagcgtaatgctatctctggaagatggctccgatgtgaccgcccagctcagttcaatagcccagctgtgcttggatccctactaccgaagtctggacggttttcgtgtgctggttgagaaggagtggttggcttttggtcaccgctttgcgcatcgcagtaatctcaagccgtcgcatgcaaacacaaatatcgcgtttgctcccacctttctgcagttcctcgatgtggtacatcaactgcaacgccagtttcccatggccttcgaatttaatgatttctatttgagattcctggcatatcactcagtgtcgtgccggttccgcaccttcctctttgactgtgagcttgagcgatcggattcgggtattgctgcgatggaggacaaacgaggatcgctgaatgcaaagcatatgtttggagccggtggtatggcgaccaatggatcagacgatgagtgcagcgtgtaccccctggatatcaggagtcaaagggcacccgctcccctgaatcgcattggtcactctatcttcgattatatcgaacggcagcataacaagacgcccatattttataatttcctgtattctggcgataaaagcgtgactctgcgaccgcaaaataatgtggctgctttggatctatggtgttattataccaacgaagagttggcccagggagcgccgtacgatttagaagtgaccactgtggacgacgaaatcgatctgtccgagacgaagggaaagcgcatggtcattaccgccggatacgacaacatggagaagtgtaatcccagtgcctatgtttgcctgctaagcgaggtgaagcaagcggagacggagcgaggccaccttccccaaaagtggctgcaggtgtggaatagcttggaagtgccccaactggagccagttgctcggaatacatcgctgggaaacatcttcgtgcagacgcatcagcacaaacgctctacactggagatcatcatgaagggtcgtctggcaggttaccaggacaagtacttccacccgcatcgtttcgagaagcatccatacactacgcccaccaactgtaatcactgcaccaagcttctctggggaccggttggctaccggtgcatggactgcggaaactcctatcacgagaagtgcacggagcactccatgaagaactgcacaaagtacaaggccatagatggagctgttggaccgccgaatgtgaatatgtcgcagggcgacacggcaagcatcgcttccagcgcggccacaacggcgcgcacctcaagccatcacttctataaccaatttagcagtaacgttgccgaaaatagaacgcatgagggacatttgtacaaacgtggcgcattactcaagggctggaaacagcgatggttcgttttggactctattaagcatcaacttcgttactatgacacctccgaagataccgctccgaagggcatcattgaactggctgaagtccaatctgtaactgccgcacaacctgcacaaattggcgccaagggcgtagatgaaaagggattttttgatcttaaaacatcaaagcgcatctataatttctacgcaatcaatgcaaatctggcacaggaatggatcgaaaaattgcaggcatgtttgcaatagacagacaatgcaaatcgacgcttttttcacaccctgaatttcgtaaaatttcctttctgtttggttcggcgatctgaagttttgttataggataaatcagtatgtttccagttttacgtattaatattttgaatctgtggcgctgccatcatatcatagctaaactatcactttagaattcccttagttgatttgagaaatcgctcgcacccattaacataaatgttagcaacaattatgccaagcaacaagcgaaactttagttaaacaatgaaatccatttgtaaatgtgaatgtaaagaaactataaaattatgtgattatataaacaaacaaaaatcagactatgataaatttacgataaaatggaaaagccacgcccgtccttatgcctaaactatataggtttatagtgaatttaccaaagaatattccacctttgttgcgcaattgaaatgcatttcttgattgcttcctttaaactaaaccctattattaaacgctttcctttatttatacactacatggtaatcaatatataatacatactttaatgcaattatttgtggcttacaaacgataatatacattttt

SEQ ID NO: 15234 - protein, 1993 aa, DROSOPHILA
MSRLADYFVIVGYDSDKEKTASNVGGQPTCGKIVQRFPEKDWPDTPFIEGIEWFCQPLGWSLSYEKQEPKFFVSVLTDIDANKHYCACLSFHETVAITQTRSVDDEDETIGSSRLLGATPSSMDGITTTSTPASITHHSVMYAPKCLVLISRLDCAETFKNCLGTIYTVYIENLAYGLETLIGNILGCIQVPPAGGPQVRFSIGAGDKQSLQPPQSSSLPTTGSGVHFLFKQLGIKNVLILLCSVMTENKILFLSKCYWHLTDSCRALVALMYPFRYTHVYIPILPAPLTEVLSTPTPFIMGIHSSLQTEITDLLDVIVVDLDGGLVTIPESLTPPVPILPSPLWEQTQDLLSMILFPNLAQADLAFPTLERPSAIAKTDAQIDKELRAIFMRLFAQLLQGYRSCLTIIRIHPKPVITFHKAGFLGARDLIESEFLFRVLDSMFFTTFVNERGPPWRSSDAWDELYSSMNELLKSEAQNRNLVGRTQRFKGYFNFTFPSYFQILTHIQELGRVLYENEGTLAHISYAQKVLRPPEGAFQRIHQPAFPRISSEKVELIIQEGIRKNGVPQRFHVTRNQHRIIPMGPRLPEALDVRPNVQNSARRLEVLRICVSYIFENRITDARKLLPAVMRTLMHRDARLILCREFFGYVHGNKAVLDHQQFELVVRFMNKALQKSSGIDEYTVAAALLPMSTIFCRKLSTGVVQFAYTEIQDHAIWKNLQFWESTFFQDVQGQIKALYLLHRRQNEHQKEANCVLDEVPLEEPTALEITAEQLRKSPNIEEEKKAELAKSEESTLYSQAIHFANRMVSLLIPLDVNVDAASKPKPAFRLEENQSVSNSIMGSHSLSEHSDEGFEENNALEIGVTVGKTISRFIDCVCTEGGVTSEHIRNLHDMVPGVVHMHIESLEPVYLEAKRHPHVQKPKIQTPCLLPGEDLVTDHLRCFLMPDGREDETQCLIPAEGALFLTNYRVIFKGSPCDPLFCEQVIVRTFPIASLLKEKKISVLYLAHLDQTLTEGLQLRSSSFQLIKVAFDPEVTPEQIESFRKILSKARHPFDEFEYFAFQSYGTMLQGVAPLKTKEKYSTLKGFAKKTLLRGAKKAGFKQKQQTKRKLVSDYDYGSADAQETQSIDDELEDGDEFETQNNAMPRLLTTKDVERMRERSYVQDWKRLGFDAESQRGFRISNANTSYATCRSYPAIIVAPVQCSDAAIMHLGRCFKGQRIPLPTWRHANGALLIRGGQPNSKSVIGMLKNTTGSTTNAHHDVTHYPEQDKYFLALINTMPKLTPLALNQYSGMNLSMSSLMGHSSSDDRQPLTPELSRKHKNNLDISDGNKSSQGGKGGTMKGNPKNSLAHPFRKMRLYALGEKSQAKSNMNVDFCADFIPVDYPDIRQSRPAFKKLIRACMPSHNTNEADGQSFAKMVEQSDWLQQISSLMQLSGAVVDLIDLQESSVMLSLEDGSDVTAQLSSIAQLCLDPYYRSLDGFRVLVEKEWLAFGHRFAHRSNLKPSHANTNIAFAPTFLQFLDVVHQLQRQFPMAFEFNDFYLRFLAYHSVSCRFRTFLFDCELERSDSGIAAMEDKRGSLNAKHMFGAGGMATNGSDDECSVYPLDIRSQRAPAPLNRIGHSIFDYIERQHNKTPIFYNFLYSGDKSVTLRPQNNVAALDLWCYYTNEELAQGAPYDLEVTTVDDEIDLSETKGKRMVITAGYDNMEKCNPSAYVCLLSEVKQAETERGHLPQKWLQVWNSLEVPQLEPVARNTSLGNIFVQTHQHKRSTLEIIMKGRLAGYQDKYFHPHRFEKHPYTTPTNCNHCTKLLWGPVGYRCMDCGNSYHEKCTEHSMKNCTKYKAIDGAVGPPNVNMSQGDTASIASSAATTARTSSHHFYNQFSSNVAENRTHEGHLYKRGALLKGWKQRWFVLDSIKHQLRYYDTSEDTAPKGIIELAEVQSVTAAQPAQIGAKGVDEKGFFDLKTSKRIYNFYAINANLAQEWIEKLQACLQ

SEQ ID NO: 15235 - DNA, 7273 bp, DROSOPHILA
taaccagctgtcgctgcagaagaaggtgctccgcaagtcggcttctgtggcccaagccgtggcctttggccagcgctacaaggagttacgatctgccggccatgagttagcagattgcgccgcacagcaggagatcttttacaacatcggacgtatctatcaccaagccaacatccttcacctggccgtggactactatgaaaaggcactggccgtgcccgtgcatccacttatcgcagagcatgaatctacgcttggtctgcagcatgaagtggcattcaacctgcacctcatctaccgagccaatggaaacaagtggaaggcacggcaatatttaatgcgatactgtgtggtttaatcagcggcgtgaattatttgttactcgactgttagttttaattattgtaaatatatttctttattttcacgttaaacacaagtgccatttcgctttcgacagctaaatttttttctaaaacagaaagcacaaattgattttattgaaattttacattcttgtaaatcccgcgatcccatttccatgaatttaggaaacacaatcgattttaaaaactggacgcgatgtacgcgactaaagtgactgtttagtaatgaaatcaagcggtggtcatgtgccatatttataacgctaacaatataatgaaggggaattccattatattattatatttcaattgcagccgatttcaagcttgtaaaagttgtcattacattgacttctgttaaggtatataaccaatagattaacgatgatagtagtacattaccacttatctaatggctagaatggagcttactcatcccaaggtgtttgttgatctttgggaagcggactagaaagctttaagtgatcaaggggaaattcatcgaaagatccctaatcaattattgaagtaagcacaatgtgttgtaatttcttgtttaagtacttacatatgaataattataaatatacagtctcaaaaaaaaaaaaacatgattacagtttctcaaacgaactttattaagaaagaggagtaagattgtagtaaggagtaaggattgtgatgaacaattgtaacagcaccttagcaagccggcatggcgcaagagcgtgatttgaccaggcgcttggagcacggctgtccaccattctggggctcggtgacaacgtagcgccggctttcagagactccgacaccacagctaacgctgcagggcgaccagacggaccaatctgacaggacgcaggccctgggctgatccactcttgaggaatacggcgacctaagcacattgcacgtattcaggcagtcgttctccgtgaggaagttgtttcggttgccacggcatcctccgtaggtaaaggagtagcaatgctggttctgcggatcgtaggcataccgcatataggtgccacgacagggacctgggtccggtgcctgtacacagatgtccttggcctgctccgcgttaatgtggcagtcaatgggattgacgcactccttttgctgatgcagctccatgcgttgcgtacagctctccttatcgggtccattctccaacagaagcagccgagtccgaatggtaactccccggccgcaggtcgaggagcacggactccagtcgctccactggctggtgggacattgcggatcaggaagctccacctgctcgtatgtacagtccggccgcatgcacttgttcttttccactatggtgatatggggacatcgcttgcgtcccaaatgattgacaaaggtgcgcgtgcgcatggtaatgccaatgccacagctggccgaacactcggaccacacgctccagggagaagttttgcagagaccggctccctcgccattgctgcccaccagggactgcgagttggccaggttctcgccctcatcatcgtcacgatccttggactgggctgggccatcggcacattcgggtatggcagccacgcacatttccttggccaccagttggcgagcgcatttgttctgatccgccgccgcgggatacagatattgcctgctgcgcatgcggattcccttgccgcagctcacggaacacggactccaggcggagtagtcgcccactcgacattcggctgcaaaacgattgattagatgggcatgttagtttcaagttgaccaaacccacctctggtgtcctgctcctcagcatcgtcggacacctccaactgaagagcctgcaggaactcatcgtcgcagttccgggagacaatcttctcacgtcttaggtatagcttggcaagtggtgtcatctcacggctcttgggattataaaagggagccctaggatcctcaggatacattgtagtgatgcgatacatcctttccggaggttgtgtctccgagttgggtgactaccaaggaaggtccatttaatatttaggttaccatgaaatatcagttgaatatatattaccatataagagatgccgctatcagtgcccgcatcccatggaaacaaatcaaagtccattgactccttccagctgcaatcctcagtgcagagatccagaccactaatgcccaccacccaatcgggagaaggaccaaacatggacaccagcgataccttagggtgcttgcgatccacccggaacttggatgaggtgttctggttgacattcgggtaccacaacccagcggccttaatcagggtgcgcaacttgggcccgttcgcgcgcagctccgtttctagagcagccggagaaccccactccgccagagagcggaatccggcggtggctatgtggttctcgccccagaaggagaagttggactcgtgcgaagcaccaatcacgtcagagaagtgtgttaaccagatggcgaacggataatccttgggatgggtttcgtttgaccagattccctcgaaaacgaactgaaattggaatgacagtaaggtggagctcggaaaaatacgcggtcttctctgacttacgctgtatttggcttcatcgcaggcgcagcattccttttgagcagcagctgcatcaggctttcgttcgcaaatcacagtggataggttgccatcgtcggcgaaccaggctctcggaccctcgtagaccattgctgacaaagagacacagccagaacccgactccggagccacccacattacctggacttctgttttgggcaggtcgtccgcctcggaaaccgtgttcacgcatctgtcgttgaactgggtcagggagtcactaaacagctggaagcggcccactcgccggggactagctgcctgtggacgacgggcgccagtgtgtgcctccgcagtaatggtaaagtgggtgaaatgctgaactttcaagtgagtccgggatccaagtagaagtactaccaaatttttttaaattcaaaattcgattaaaaaaactacgtatcgattaaagggaatcgatgccatcactggcactagcactgttatcgacaaatttatgtacctatagttgtctcgctctttcagccctctttttaagacgacgcgcgattgtaatttgttaatattattaagtctttagtcctgtgatttttataatgtctaagtttctggacatgctatcggggagccagtgcgtcagcctggaaaagtgcggcgatgtggtggtctcaaccaacgactgtatgattgcactttactgccacttctgccgtgacctcttcacacaactgccggagttcttaagacacctccaaagcaaccattcggatgtgctgcacttcaccaaggagcacaacgtttacagcgtggaggagctgttgtccggtgagcagggtaaagcccacgaggacgcccagtcggcggggcacaacagcagcagcggtgactctagttcactgatgaattcagaggattctagggccatcgaaggctcagaagataactcagacaatagcccaatgaaacgtaagaatgtgatggcatatcgttataaagtattattattaatattatcattattatcccacagctgaacaaatagggaaacagagtgaaataaacctgctagcggaagtgacaaacattttattgcaaaccaacgacaaggaattaaaacccgaaaatggcgtattcaacagaccacgcaaaaaggctaataacgagagcagttctttgaagatatgcgatctgaagagtcacactattgcaaggacttcgcgaaagcgaatgagcatggtaaagaaccgcatcctgcgagtccttgacagcgatttgtctgcaaagcttgaaattaaacctccagagcccaactccaaactttctataactgagcccatccaagaagacaacatacctggaacatgttttgacactcctacaaagcccataccgagctcatctcaattaagtgtaagaaagtcttctttaacagaggcaaaccaaatatgtaccaaatatgccgagaagaaaacggcgcctaccatgcctaagctactgaactgtgtaccaaagcccatattaactagtcaacaagctcatactaatgccgagataagtgagataaatgaaacctatcacctagcagctagtcaagtgacaaaaaccacgaaaacatttcccgtaaaaataacacaaatagatattttacaaccagttaagttacctaaaactttaataacaccaatcaatgaagagggtgtcagtgaccaagtggagaatagcacgaataatataaacaatgcccaaagtctgccgaaagaaaacacaaaaaagttttttaaaaagcgtagcgaattagggataaaagctcaaggcagtcccaacaaattttttaaaataataaagtccaaggcaaaccccattattgtaaaacgggtgcagaccaccagtgccaaagctagtacaaacaaaatccaaatacgatctaatgacaaaactaattgttttgcttctgagtttaacagcacaaagatccgcaagttaaagatggaaaattgcgtcgacctaaaatcggaagatccctgcgccaatacaaatacgcgtttaaacaaattggcaacaataagcagttgcgaaatattaaaagcggttggagtaagcacttgatacgaatcattgcacatttcacatctcatatcttaatccattttagttgccggcaatcacagataacccgatcgaggatacattattgccagacgagttagaaacgatccgaaaaaaggcagatcaattcatcaaaatctacaggaagtacgattctatttggaattatagaaaaatttgtccgccagcgaaaccggactttatttctcaacagatatttgctttaaccagagaagttaacaagacaatgttatgcaacctggcgaacagcgatataaaaggcattattaatcagatttcagtttggcattacaatatatatacccaatatattgacttggataccatttcggaaaatgcccgatatactttaaagctattctcgtttttacctgttagttttgcttacttttgcaaatgttgcgacgatattttcatcttaaagaaagagtacttaaagcatttgatttctcaccaagttcggtttcagtgcacaaaatgcattaaagtattcaagtacaagggatactatgaaaagcatttgcgaaacgctcattcttaagccacaatgtgtcatttagtcatggttacatatattttttctaaccctacataaagttatgtatttattaaataaaaaggaattccgaaaagctaatgctaaccaatttgtcaataaatgttatattttgattttaataaatttttctaataaatcaaaacgttttataaactaaatgctttaaagtttctttatcactacaaaaagattaggtacaaattaacacagaaagcgttatcaaaatagcaactggactgacaagatggacaacatcaccatctgctctggattctcttatcatttcgatggcttttgtttttagttctcgaatgaccccgatgattacaaaaccaactagctaccttcccgacttacaattatacgtcttgccgggcacatagccgttgggtccatcggccacaattaatttgtatccattgtcgccgcgtgtgcgtcgaccgtggttcaagtgggtgggcgcccggggacatgcggtgaccatactaattgtcagccagatcacaacgatgaggcggatgagcagcggcagcgattgccccatctccagtgctttatttcccgcgttatcacttgactcgattacaaagctcaactgcagcaacgaccgtttccagcgaggctcaaaaacagactaatcaagccggagaggcgatagagctatcttcaagtcgagcgaccgacccgatgccggatgcttcgggaactctgattacaagcattactcgcgagatggtcttgactttcatccattggctcctccaataattcctctttactctcgtgtcttttctattccgtatatatttcatggtataaattttgccgtacaatttacaaataatattacaattatatatttccatatcatcggtaacagagctcactatcgtagtttgtagttcataaatttgtaggtttgctttccgctcccgaaatagtgtgaatcgtgaggattcgccttaggaaactcaacattggtcgagaacatagcatatatactgataaatcaaactgggactgatcacacagactggtcacacattcgatcgataaatagggaatacatgtgagaactataaagcatataaatcacaattgccagataaagttaatactaaaaggtcagaataggcgtttcccggtgatccaagagatctgaaaaaaaaagtattttacatcagaatggcgaatatttttgaggtaggtcttcaagtagctcaccttttgcaatgctccaccagggcagtgtcacatatgtgaggaatgcatttagcggcgttgactgctgtcttctattctccttccagaaatgaaaagattgcgtaaagcctcgactggtccataggggattataagcgccatcgtcgagctctaaaagtagataagaggctcacggaattagtttatgttagtcggaattattgaaatgtaagtacacgaaaatcgaagtacaaaaaaattaaatatagttgaagtaaaaagcctaggaaataaccttttattgcctttttgggcacatcgcaccaatagtagatgttagtgccatcgggtgttctgcgcttgggaaccaaatgcagcatcttgctgacatgagcttgcttggctgttctc

SEQ ID NO: 15236 - DNA, 2450 bp, DROSOPHILA
gaaacggtcgttgctgcagttgagctttgtaatcgagtcaagtgataacgcgggaaataaagcactggagatggggcaatcgctgccgctgctcatccgcctcatcgttgtgatctggctgacaattagtatggtcaccgcatgtccccgggcgcccacccacttgaaccacggtcgacgcacacgcggcgacaatggatacaaattaattgtggccgatggacccaacggctatgtgcccggcaagacgtataatttacttctacttggatcccggactcacttgaaagttcagcatttcacccactttaccattactgcggaggcacacactggcgcccgtcgtccacaggcagctagtccccggcgagtgggccgcttccagctgtttagtgactccctgacccagttcaacgacagatgcgtgaacacggtttccgaggcggacgacctgcccaaaacagaagtccaggtaatgtgggtggctccggagtcgggttctggctgtgtctctttgtcagcaatggtctacgagggtccgagagcctggttcgccgacgatggcaacctatccactgtgatttgcgaacgaaagcctgatgcagctgctgctcaaaaggaatgctgcgcctgcgatgaagccaaatacagcttcgttttcgagggaatctggtcaaacgaaacccatcccaaggattatccgttcgccatctggttaacacacttctctgacgtgattggtgcttcgcacgagtccaacttctccttctggggcgagaaccacatagccaccgccggattccgctctctggcggagtggggttctccggctgctctagaaacggagctgcgcgcgaacgggcccaagttgcgcaccctgattaaggccgctgggttgtggtacccgaatgtcaaccagaacacctcatccaagttccgggtggatcgcaagcaccctaaggtatcgctggtgtccatgtttggtccttctcccgattgggtggtgggcattagtggtctggatctctgcactgaggattgcagctggaaggagtcaatggactttgatttgtttccatgggatgcgggcactgatagcggcatctcttatatgtcacccaactcggagacacaacctccggaaaggatgtatcgcatcactacaatgtatcctgaggatcctagggctcccttttataatcccaagagccgtgagatgacaccacttgccaagctatacctaagacgtgagaagattgtctcccggaactgcgacgatgagttcctgcaggctcttcagttggaggtgtccgacgatgctgaggagcaggacaccagagccgaatgtcgagtgggcgactactccgcctggagtccgtgttccgtgagctgcggcaagggaatccgcatgcgcagcaggcaatatctgtatcccgcggcggcggatcagaacaaatgcgctcgccaactggtggccaaggaaatgtgcgtggctgccatacccgaatgtgccgatggcccagcccagtccaaggatcgtgacgatgatgagggcgagaacctggccaactcgcagtccctggtgggcagcaatggcgagggagccggtctctgcaaaacttctccctggagcgtgtggtccgagtgttcggccagctgtggcattggcattaccatgcgcacgcgcacctttgtcaatcatttgggacgcaagcgatgtccccatatcaccatagtggaaaagaacaagtgcatgcggccggactgtacatacgagcaggtggagcttcctgatccgcaatgtcccaccagccagtggagcgactggagtccgtgctcctcgacctgcggccggggagttaccattcggactcggctgcttctgttggagaatggacccgataaggagagctgtacgcaacgcatggagctgcatcagcaaaaggagtgcgtcaatcccattgactgccacattaacgcggagcaggccaaggacatctgtgtacaggcaccggacccaggtccctgtcgtggcacctatatgcggtatgcctacgatccgcagaaccagcattgctactcctttacctacggaggatgccgtggcaaccgaaacaacttcctcacggagaacgactgcctgaatacgtgcaatgtgcttaggtcgccgtattcctcaagagtggatcagcccagggcctgcgtcctgtcagattggtccgtctggtcgccctgcagcgttagctgtggtgtcggagtctctgaaagccggcgctacgttgtcaccgagccccagaatggtggacagccgtgctccaagcgcctggtcaaatcacgctcttgcgccatgccggcttgctaaggtgctgttacaattgttcatcacaatccttactccttactacaatcttactcctctttcttaataaagttcgtttgagaaactgtaa

SEQ ID NO: 15237 - protein, 763 aa, DROSOPHILA
MGQSLPLLIRLIVVIWLTISMVTACPRAPTHLNHGRRTRGDNGYKLIVADGPNGYVPGKTYNLLLLGSRTHLKVQHFTHFTITAEAHTGARRPQAASPRRVGRFQLFSDSLTQFNDRCVNTVSEADDLPKTEVQVMWVAPESGSGCVSLSAMVYEGPRAWFADDGNLSTVICERKPDAAAAQKECCACDEAKYSFVFEGIWSNETHPKDYPFAIWLTHFSDVIGASHESNFSFWGENHIATAGFRSLAEWGSPAALETELRANGPKLRTLIKAAGLWYPNVNQNTSSKFRVDRKHPKVSLVSMFGPSPDWVVGISGLDLCTEDCSWKESMDFDLFPWDAGTDSGISYMSPNSETQPPERMYRITTMYPEDPRAPFYNPKSREMTPLAKLYLRREKIVSRNCDDEFLQALQLEVSDDAEEQDTRAECRVGDYSAWSPCSVSCGKGIRMRSRQYLYPAAADQNKCARQLVAKEMCVAAIPECADGPAQSKDRDDDEGENLANSQSLVGSNGEGAGLCKTSPWSVWSECSASCGIGITMRTRTFVNHLGRKRCPHITIVEKNKCMRPDCTYEQVELPDPQCPTSQWSDWSPCSSTCGRGVTIRTRLLLLENGPDKESCTQRMELHQQKECVNPIDCHINAEQAKDICVQAPDPGPCRGTYMRYAYDPQNQHCYSFTYGGCRGNRNNFLTENDCLNTCNVLRSPYSSRVDQPRACVLSDWSVWSPCSVSCGVGVSESRRYVVTEPQNGGQPCSKRLVKSRSCAMPAC

SEQ ID NO: 15238 - DNA, 5895 bp, DROSOPHILA
gtgttgttgtccgacggctccagctgctgcagcgtggccagaacgaagacggcggtcttacccatgccggacttggcctgacagaggatgtccatgcccagtacggcctgcggaatgcactcgtgctgaactgcaagcggagagcatcgttagtgactgtacctttcgtcactccaggtggagtgcaagtactcaccctccgagggatgctcgaagccgcagtccacgatggcgcgcaggatctccggtttcaggaggaaatcgcggaagccggaactgtgaatggacacataggtgcccttgacatccttcttgggggcctcctggttttcgaccgcagtggtctcggtctgctcctcatcctcgtagtccaaaagatcgtcattgtcggccatttctgcggctttcttacctttaactagttatcggctataaattcgcaactaaatgctgggaaataaaatgggtgcgactagataagttacatgtgtttgttaaagaaaatgccgcttttttttgcggaaccggtgccggcgttccctccgccattttgttttttcaccgcaccgcattacatgtatttcgaaataaaacgaaatacccattacaagcgacgattttatttagtgcagtgtgattttcagtgtcaaactcaccttttgtgcacgtttatcactttaaaatacagcttttaaagtgaaattaactattttaaaatctttaacgtgatgcggaggaaaaaacagcgcagagcagtgtgaccgaagtacgtttaagaactcatgcgagctgagccgggtgatatcgttaagttatcgatagttgtgcacaacaaatccatttgtaagcttcaactaaaaagtttttataaaatatatgccttctaacgctttaaattaaaatggcttgttgagcttaaatttaattttttttttatcattttggggtcaagcggttcttagtcttttatctagcgcggcgtttggtcacaccaggcatgccggaaagttatcgattagtctctgaaaccatcgcaacaaattcgattacacgttccagcgtcggccgcgttttcctgctgcaagatacttcattttcaaatttgtgcattttccgttcgttataaaaagtcaggtgagttgcgctgctatctacgagcattaggaaaacttgtagaaaaagttgaaataactgattaagtgccgaacaatagaggcggcactgtttcactcaaaatcgaaataacccccctgcctgtattagtgtaaagtcgctgtaaatattgaattaaaatcgccatattgtgcaatttttggctccttatcaaatcgtttaaagtgcgtcgactggattagctaagcgttgcgattgattaaactagtattagccgcgccatttgcctccacgcccataaacaaacgccgacaaactcacttcgttttcctcgtccgctttagtacagtcgcttgagtggaaagcgatgtgcgtgtgtgtgagtgagacgtagaggagactgcgagagagagagagagcgcgttagagaaactcgtttagcttctgtttttgagcgttttgtgcgtttcccctctttcgtgttcggttctgtttggaattttatcagggcgcaaaaataacataccctacaccgaacgaaaaagttcaaatataagtattgcatataaaacgcgtttagaaggcacgcaattgtgttattcaacttttcttcaagtgttgtgtcctaaagaggtcagtcacaaaaatctcacgtgttattctgcacatttcatttgtcttgcagcgtgaacatgtcgagcaaatcccgacgtgctggcaccgccacgccgcagcccggcaacacctccaccccccggccgccatcggcgggtccgcagccgccgccgccgtccactcactcgcagacggcctccagccccctcagccccacccggcactcgcgcgtggccgagaaggtggagctgcagaacctgaacgatcgcctggccacctacattgaccgggtgcgcaacctggagacggagaactcccgcctcaccatcgaggtgcagaccaccagggacacggtcacacgcgagaccaccaacatcaagaacatcttcgaggccgagctgctggagacgcgccgtctgctcgatgacacagctagggatcgcgctcgtgccgagatcgatatcaagcgtctctgggaggagaacgaggagctcaagaacaagctggacaagaagaccaaggagtgcaccactgctgagggtaagtgcgtggaaactgaatcgataagaaaaccttataattgtagggcaaagaaagtagagtaatgataaaattaaaagtaagaagagacaaaaggcgtggtttcaagcaagaacgaaacattcatttagttgctgaactgtatataatgattatcccatgatattcctcactttctgtgacaaaatcatccctattctggcatttaacgaacattaattgattgattatcccaacccgcaggcaatgtccgcatgtacgagtcgcgcgccaacgagctgaacaacaaatacaaccaggccaacgccgatcggaagaagcttaacgaagacctgaatgaggcgctaaaggagctggagagactgcgtaagcagttcgaggaaacgcggaagaacctggaacaggagacactgtcgcgcgttgacctggagaacaccattcagagtctgcgcgaggagctctcgttcaaggatcagatccattcgcaggagatcaatgagtcgcgccgcatcaaacagacagagtatagcgagatcgacggtcgcctcagctccgagtacgatgccaagttgaagcagtcgctgcaggagctgcgcgcccagtacgaggagcagatgcagattaatcgcgatgaaatccagtccctctacgaggacaagatccaacgactgcaagaggccgccgcacgcacatccaattccacgcacaagtccatcgaggagctgcgctccactcgtgtgcgtatcgatgcgctcaacgccaatatcaacgaactggagcaagccaatgccgacctcaatgcgcggatccgtgatctggagcgccagctggacaacgatcgcgaacgccacggtcaagagatagaccttctcgagaaggagctcattcggctgcgcgaagagatgacgcaacagctcaaggagtaccaggaccttatggacatcaaggttagctttaatacttgtctaaaatcgtgtacgtattaatacataaatctaattatcctgcttaggtctccctggatttggaaatcgccgcatacgacaagctgctggtgggcgaggaggctcgtttgaacatcaccccagccaccaacacggccacagtgcagtcctttagccagtcgctgcgcaactccacgcgagccacgccatcgcgtcgcactccctctgctgccgtgaagcgcaaacgcgccgtggtcgacgagtcggaggatcacagcgtcgccgattactatgtgtccgccagtgccaagggcaacgtggagatcaaggagatcgatcccgagggcaagttcgtaaggctgttcaacaagggcagcgaggaggtggccatcggtggctggcagctgcagcggctaatcaacgagaaaggtccttcgaccacttacaagttccatcgatcggtgaggatcgagccaaatggcgtgatcaccgtttggtcggcggacaccaaggcctcgcacgagccgccatcgagccttgtgatgaagtcacagaagtgggtctccgccgacaacactaggacgattttgctgaactccgagggcgaggccgtggccaatctggatcgcatcaagcgcattgtgtcccaacacacatcctcctcccggctgagtcgtcgtcgcagcgtgaccgccgtggacggcaatgagcagctctaccaccagcagggcgatcctcagcagtcaaacgagaagtgcgccattatgtaaaatcaaacgcagcacaacacaactctttcctctttgctgaacaagacaaacaaaataagcacacacgaagatcataatttagaacccaaaaacacacacaccgaggtacagagatttattattcagctaagttattttttgtggccgcagcgccaattatttaatcaaaaacatttgtgtagaagacatcctgaatcttcgtttcgtttgtacactttcgttttccctttcttaacaaattctatagtttattgtttcgatgtttttgtatttccgcgttaactaatctattgtaaactttatttggtataaactggagaggcatgttgcctcttttttatgccacatagaatttacgtaagacgttcacttcttgtattcgcggcggcaagaactttgaaaatattgcaagaaaaacaatattttcgatgtacttacgctccacctacatatttagtaaattagtttttaagctatatcccagataaaccagtcgacgtcagcaaacaacaacaaaaaaaaaacaacgagcacgtagtgagtgatttataagatacaggtcaagaggattaactaaagaaaacaaacgctcctgacaacagacatatttatttaagtattttttgtacaatcaacataaaatacattatacattatacatacatatacatacatacattatatatatagactcatgcctacggaagtgacaaccagccagcaatatatatttttagccatggccatagggtttacgatccaccaaaacggctttctcccggtttagaccggttcttgagcttcctgcagacattttaccggacgagcaacaataagaacagcaacaacaacaacagcattaacagcaacaacacaaatgtacaacaattacaaaagcaacaaagaagaaaaacgaaagaaaatggaagtacacgtagcggctcagcgatccgtcgcattttttatgggtgggcgtggtcgcgttttacgccggccaaacaaatgcaacgcccacacagactattatacaaaaactgatgaatacaactaaattttaagtacatctacgtttatgtatgtaattgctaataatttgataattaaaaaataaagaaaccatgtttaataaaaattaaaaacaaactttgatttagcaatagagagaaagacataaaaaagtattaaatagttttaaagcgtatactgaaaccaataagctcctacgaatttcgtaatagtagggtacgcatttcactttcgacgcctggtggcccttttttcgtcactcgctttgcgtttctattcgtcgccatgagttatttttggaattttaatttttctgcgtctgtattagttgcctacatgctttttcaatgcgtgtgttcgctcataaactttatttttgagtgacttatcgattatttttgagtgcaggacgtttcaaaaccaacgtgctttcgcatttataaatataatttctcttcttcttccgaccatgattgtttcttttaaaaatgttaggtgtcaaccctgtcgatagagaagagagcaaaatccactcaaacgaaacgcactcaacgcgagagatgcggttaaagttcgttcaactggcaaatgcagtgaccgtttaacccgcgataacgataacaaaagtatctcaaggttgcttgcaattgcatttctgattattctctctctttttctctctcttattccaaccgcagccgcaaaaacaaactcaaactcgagctaatcgctgcataaatttgctgttcgaattgaacaattgaacagtctcagttagcagctgaaatcggaaataagcgacaaaagcagcagtgcgagcaaaaatcaagtaataataatcatcaataagcagctgtttgcattcgcgtgttttgaaggtgagtagc

SEQ ID NO: 15239 - DNA, 2923 bp, DROSOPHILA
ccggaaagttatcgattagtctctgaaaccatcgcaacaaattcgattacacgttccagcgtcggccgcgttttcctgctgcaagatacttcattttcaaatttgtgcattttccgttcgttataaaaagtcagcgtgaacatgtcgagcaaatcccgacgtgctggcaccgccacgccgcagcccggcaacacctccaccccccggccgccatcggcgggtccgcagccgccgccgccgtccactcactcgcagacggcctccagccccctcagccccacccggcactcgcgcgtggccgagaaggtggagctgcagaacctgaacgatcgcctggccacctacattgaccgggtgcgcaacctggagacggagaactcccgcctcaccatcgaggtgcagaccaccagggacacggtcacacgcgagaccaccaacatcaagaacatcttcgaggccgagctgctggagacgcgccgtctgctcgatgacacagctagggatcgcgctcgtgccgagatcgatatcaagcgtctctgggaggagaacgaggagctcaagaacaagctggacaagaagaccaaggagtgcaccactgctgagggcaatgtccgcatgtacgagtcgcgcgccaacgagctgaacaacaaatacaaccaggccaacgccgatcggaagaagcttaacgaagacctgaatgaggcgctaaaggagctggagagactgcgtaagcagttcgaggaaacgcggaagaacctggaacaggagacactgtcgcgcgttgacctggagaacaccattcagagtctgcgcgaggagctctcgttcaaggatcagatccattcgcaggagatcaatgagtcgcgccgcatcaaacagacagagtatagcgagatcgacggtcgcctcagctccgagtacgatgccaagttgaagcagtcgctgcaggagctgcgcgcccagtacgaggagcagatgcagattaatcgcgatgaaatccagtccctctacgaggacaagatccaacgactgcaagaggccgccgcacgcacatccaattccacgcacaagtccatcgaggagctgcgctccactcgtgtgcgtatcgatgcgctcaacgccaatatcaacgaactggagcaagccaatgccgacctcaatgcgcggatccgtgatctggagcgccagctggacaacgatcgcgaacgccacggtcaagagatagaccttctcgagaaggagctcattcggctgcgcgaagagatgacgcaacagctcaaggagtaccaggaccttatggacatcaaggtctccctggatttggaaatcgccgcatacgacaagctgctggtgggcgaggaggctcgtttgaacatcaccccagccaccaacacggccacagtgcagtcctttagccagtcgctgcgcaactccacgcgagccacgccatcgcgtcgcactccctctgctgccgtgaagcgcaaacgcgccgtggtcgacgagtcggaggatcacagcgtcgccgattactatgtgtccgccagtgccaagggcaacgtggagatcaaggagatcgatcccgagggcaagttcgtaaggctgttcaacaagggcagcgaggaggtggccatcggtggctggcagctgcagcggctaatcaacgagaaaggtccttcgaccacttacaagttccatcgatcggtgaggatcgagccaaatggcgtgatcaccgtttggtcggcggacaccaaggcctcgcacgagccgccatcgagccttgtgatgaagtcacagaagtgggtctccgccgacaacactaggacgattttgctgaactccgagggcgaggccgtggccaatctggatcgcatcaagcgcattgtgtcccaacacacatcctcctcccggctgagtcgtcgtcgcagcgtgaccgccgtggacggcaatgagcagctctaccaccagcagggcgatcctcagcagtcaaacgagaagtgcgccattatgtaaaatcaaacgcagcacaacacaactctttcctctttgctgaacaagacaaacaaaataagcacacacgaagatcataatttagaacccaaaaacacacacaccgaggtacagagatttattattcagctaagttattttttgtggccgcagcgccaattatttaatcaaaaacatttgtgtagaagacatcctgaatcttcgtttcgtttgtacactttcgttttccctttcttaacaaattctatagtttattgtttcgatgtttttgtatttccgcgttaactaatctattgtaaactttatttggtataaactggagaggcatgttgcctcttttttatgccacatagaatttacgtaagacgttcacttcttgtattcgcggcggcaagaactttgaaaatattgcaagaaaaacaatattttcgatgtacttacgctccacctacatatttagtaaattagtttttaagctatatcccagataaaccagtcgacgtcagcaaacaacaacaaaaaaaaaacaacgagcacgtagtgagtgatttataagatacaggtcaagaggattaactaaagaaaacaaacgctcctgacaacagacatatttatttaagtattttttgtacaatcaacataaaatacattatacattatacatacatatacatacatacattatatatatagactcatgcctacggaagtgacaaccagccagcaatatatatttttagccatggccatagggtttacgatccaccaaaacggctttctcccggtttagaccggttcttgagcttcctgcagacattttaccggacgagcaacaataagaacagcaacaacaacaacagcattaacagcaacaacacaaatgtacaacaattacaaaagcaacaaagaagaaaaa

SEQ ID NO: 15240 - protein, 622 aa, DROSOPHILA
MSSKSRRAGTATPQPGNTSTPRPPSAGPQPPPPSTHSQTASSPLSPTRHSRVAEKVELQNLNDRLATYIDRVRNLETENSRLTIEVQTTRDTVTRETTNIKNIFEAELLETRRLLDDTARDRARAEIDIKRLWEENEELKNKLDKKTKECTTAEGNVRMYESRANELNNKYNQANADRKKLNEDLNEALKELERLRKQFEETRKNLEQETLSRVDLENTIQSLREELSFKDQIHSQEINESRRIKQTEYSEIDGRLSSEYDAKLKQSLQELRAQYEEQMQINRDEIQSLYEDKIQRLQEAAARTSNSTHKSIEELRSTRVRIDALNANINELEQANADLNARIRDLERQLDNDRERHGQEIDLLEKELIRLREEMTQQLKEYQDLMDIKVSLDLEIAAYDKLLVGEEARLNITPATNTATVQSFSQSLRNSTRATPSRRTPSAAVKRKRAVVDESEDHSVADYYVSASAKGNVEIKEIDPEGKFVRLFNKGSEEVAIGGWQLQRLINEKGPSTTYKFHRSVRIEPNGVITVWSADTKASHEPPSSLVMKSQKWVSADNTRTILLNSEGEAVANLDRIKRIVSQHTSSSRLSRRRSVTAVDGNEQLYHQQGDPQQSNEKCAIM

SEQ ID NO: 15241 - DNA, 5448 bp, DROSOPHILA
cgggcgttgaaacagcgcactgccacccgccagcagcagcgaaatcgggatgccgtcgactgtgcaggacgctccggatcgggatcatcatctaccacggtcaagagcgaggctggcggcctgggcctagatgaaacctccttctcagtgccaacctctccgatctcgctgtcgacgccgctgatcgacaaggagacggccaactcggtgcccacgagcccggagcccagttcgcttgttccggagtcgagcagtggcgctggcgccggagccgtggtggtgcgccggcataacggacatgtggtgcggaagtgtgatgccgccggtttccgcaccagcaagtctgaggaccatttgcagcagatccagcgcgagggcatcgccgctgtgatacccatcgacattgatgaggatgtgaatagttcgctgaacacgctgctggacacgcgtcaggactccgaggactcgcaggtgaggcgtcgacgcgcttaggcactccccatccacgcaggatagtccgccggatagagctagacagcgaacagtcgaattttccttccgccagatctccccaagaacactcgacactcgtagttgatgagttacaaaccccgctctccgttttaaagtgcttatgtagagttcggttttcgttaactggtttctgtagtagtctgttgaccatatatgtatttgtgtatgcgtgtgtgttagccattgcattgtactgtaagccattcatatcatccaatcatccctagacctagacccaaatcaaaaaacccactgtttttcttgctcacttgttaacttgttacctcgttactttgaagttgcctacctaacttaacttacttactactaaacaactctctgtctatcttactctcttgtttcgcgtttctttcttctttcgttttctcgtttctctgtttcctactttgactcttctcgaatcgatttgatatgcgcaatttattgtcccccgtgagctttctagtcgatggccactgtaattgtaaacaactcgtcattggcctcgaacaacaacgagggcgaacagaccgacaaccgcagcagcagcagcagcagcaactccagcgacaacaataactgcagcagcaacaccggcgaaccagcaacgagtgaaactgcaacagcaactgcaacaatcataactgcaacatcaacgagaacgatgaactgcagcagcaaattaaactatattttatgcaaaaaggttgccatttgcatagttggcatgctgattaatgtgacttttgattttgatttcgtttcgattttgccgactttgattttctgcctgcgcttgaaaaagttttgtatgtagaagatgagaacctttcgacaccaaacgcttgtccacaacgtacatacatacgtacatccacaccgcaacacccgaaccaaatgcataccacctaagtttctgacactcacacacagaacagacaccgaacgctttcagcactcggaaaattgtttaggactccacagagagattgggcaacggcaatggaaattcgagatctgacaaaaaaaatccatagagcataaatcgattaacgacaactttgaaaaccttgttaattccgtattactaatctctggtttgttgcaaatcctaggcatcggatcgcgatcggatcgtgtggacttataatgcgccactccagccgcatcagttggcggctcttcagcgacagcagcaacagcaagagcagcaattccaacagcagcagcagcagcttcaccagcaacatctgcagcaacagcagcagcttcagcagcaacatcagcagcagcaacaacagcagcagcagcaacagcagcagcaactctacggtcagcaatcgcattcaaattcacattcaagttccattagttcgtcgccccagcactcggctgtgggcagtccggcctcgcccacgtcggtttcctcgtcggtgatgtcctcgtcgggctccaagggcgccctgggcctgggcagcagcagcaatggtcccatggccgccgtgcagcaacaacagctgagagagagggagcagggcggccaggtcgcgcaaccgcccagcgggattcctggcttgcttagctgcccaggtggtgggtgcggaaacaatggtggtggtggaggcattggtggtggtggcaacaacgatcagagcgtctcagaggccatttcgaatatatctagtcccgactaccaagacgacgataatttattgagttctcgcgatattctaggcggcatggtacttagcgatcccagtgattcggactccaccatcctcgtctcggacgcggccgcccatcagcgccagcagctcaagcagcagttgcgcgcccagcagcaacagcagagagaaagggaacgggatagggatcgagacagggaacagtccgagcacaaagtggtcatacaagtgcgcggtctggacagtaacagcagcggcggcaacggaactaacggccgctccgaggaggatgtggtcacgctgacggacgagccgctgggcacgatgaccgttggcatgcgggacgcctcgccgccagtctctgacgatggcagcgatgtggagtccctgcactcgtatcactactcgcccaaggccgtggacatgccctcggccatacgcctggccaaaagactgcactccctcgacggtttcaagaagagcgatgtgtcgcgacacctcagcaagaagtgagaatgcagatcttaaatataaattatcaaaaacatttactaacaaatctctgatttttgcagcaatgactttagtcgagcggtggccgatgagtatctcaaacattttacctttgagaagaagtcacttgaccaagcgctgcgtgagttcttgcagcaattctcgctgtccggcgaaacgcaggaacgggaacgagtgctggtgcacttttccaagcgcttcctcgactgcaatcctggcacctttaactcgcaggacgccgtgcacacgctgacctgtgccataatgttgctgaatacggacttgcacggccagaacataaatcgtaagatgagctgtgcggaattcgtcgacaacctggcagatctcaacgatggcgagaactttcccaaggatgtgctcaagtcgctttaccaggccattaagaccaagccgcttgagtgggcactgtaagtggcgaaatgtaagatcattactttttacttatcacgtgttctttcagagatgaagaggcaggtgatctgcagcagcaaagagccaacaatagtgccctgggcaatgtgggtctcaatcccttcctcgatcccccagaactggccacagctgtggaatacaaaaaaggctatgtgatgcgtaaatgctgctatgacagcagctttaagaagagtaagacctatatataagtgaaatggagggaagtgtaatttaccataatattttacagctccctttggcaaacgctcctggaagatgttctactgcacgctgcgtgatcttgtgctgtatttgcataaggatgagcacggttttcgtaaaagtcaagtgagtattaactcaccatgagtgtggtagcagctagcatgctataactttcaaattattcaacagatgtccgacaatctgcacaatgcaatacgcatacatcacgcactggccaccaaggccaacgactacaccaagaagcaacatgtgttccggctgcagacggccgaccaggccgagtatctgttccagaccagcgactccaaggagctgcagtcgtgggtggagacgataaattacgtgtgcgccgctatatcagcgcctccgctcgagggaggggtgggcagtcagaaacgattccaacgtccgctcctgcccagcaaacaatccaagctgatgctggtgagtgcaagaaggtagtcacttcatgtgcggttcgttaatattattattcgtgcattacagaaagagcagttggactcgcacgaggtgcagctggcgcagttggatcaggagcttaacgagcacaagaagggtcctattcccagcaagggcttggctctgcagaactacaaggaaaaggagagctacttgcagtatgaagtaagcttttaccacatccctttcctaatgaatcgaacctataatacctattatttttagcttcgtcgctaccgcacttatgtgagcattttgagcgccaagatgctggctgatcagcagcagctggagctgcaggcgcagcagccctctccagcgtcgcacgaggaagaggccgacacattcccagtgggcaccaccgcctgcacgccacccacgccgcaaagtattaaccagaaggatcagcagaaggagcagcagcagcaacagccaacgaacaggtacagtcagcagcaacgccctagcggcagcagctcctcgtcctccgcccatgtgcagcaggacattggctgacgcgtaatgggagttttctcagcttgtgtggtttaagcgatcgctccgatcgattcgttacattctattcttgtccttagctatatgtttttctgttcttcccgctttcgttgttaattttttgttgagctgctttcccaatatttcattactgttgtgttgttcgttccgcagtccgcccagaatctcggtgtcaaccaatttggcctggcgcaagatcttctgggactcagtttgctgcggtgttctgttgtgttgctggcattattgtactgtgctcactgttattccttaatcctttctatgtgtaaatatatttcgtgtgcgttctttttgtttggcattttgctggcatcatattaccacatccccacatatacaagctttaattttgaatagttttaactacgatacgtataacaataactgaattcagacttaagtgttgcgcgtaggcaattaaaaggaaaaaaggagacggagacccctaatgtaattagttcttatgtgaaaatggttttattttggatgcaaccacaaccacacaacatgctgtgaaaactcaatgaacaattcgtaattgatataattaggaatttagaaaaccaaacggtcgaccgtttcatacgatttagagtcaagattgaaatggttaactatagaaagcagttttttgtagcactagtatccaaagttttggcgttaaatgtatacaaaccaaagaatatatttagaaacgaaattaaacaaagaaatgtagaaaacacaaatgtggttcactagtagcaaacgtttacgtttaagcctaagctaccggcattccaaatatacatgcaacaacataataactcacaaagaaaaaaggattataccagttttacaaaccagcacacatccaacggatagatataaaatttaagtagacgaatcaattaagccatcccacacccacacactgtacacaagttgctgatgatttcaccgatgtacccatatatga

SEQ ID NO: 15242 - DNA, 2706 bp, DROSOPHILA
tcgatggccactgtaattgtaaacaactcgtcattggcctcgaacaacaacgagggcgaacagaccgacaaccgcagcagcagcagcagcagcaactccagcgacaacaataactgcagcagcaacaccggcgaaccagcaacgagtgaaactgcaacagcaactgcaacaatcataactgcaacatcaacgagaacgatgaactgcagcagcaaattaaactatattttatgcaaaaaggttgccatttgcatagttggcatgctgattaatgcatcggatcgcgatcggatcgtgtggacttataatgcgccactccagccgcatcagttggcggctcttcagcgacagcagcaacagcaagagcagcaattccaacagcagcagcagcagcttcaccagcaacatctgcagcaacagcagcagcttcagcagcaacatcagcagcagcaacaacagcagcagcagcaacagcagcagcaactctacggtcagcaatcgcattcaaattcacattcaagttccattagttcgtcgccccagcactcggctgtgggcagtccggcctcgcccacgtcggtttcctcgtcggtgatgtcctcgtcgggctccaagggcgccctgggcctgggcagcagcagcaatggtcccatggccgccgtgcagcaacaacagctgagagagagggagcagggcggccaggtcgcgcaaccgcccagcgggattcctggcttgcttagctgcccaggtggtgggtgcggaaacaatggtggtggtggaggcattggtggtggtggcaacaacgatcagagcgtctcagaggccatttcgaatatatctagtcccgactaccaagacgacgataatttattgagttctcgcgatattctaggcggcatggtacttagcgatcccagtgattcggactccaccatcctcgtctcggacgcggccgcccatcagcgccagcagctcaagcagcagttgcgcgcccagcagcaacagcagagagaaagggaacgggatagggatcgagacagggaacagtccgagcacaaagtggtcatacaagtgcgcggtctggacagtaacagcagcggcggcaacggaactaacggccgctccgaggaggatgtggtcacgctgacggacgagccgctgggcacgatgaccgttggcatgcgggacgcctcgccgccagtctctgacgatggcagcgatgtggagtccctgcactcgtatcactactcgcccaaggccgtggacatgccctcggccatacgcctggccaaaagactgcactccctcgacggtttcaagaagagcgatgtgtcgcgacacctcagcaagaacaatgactttagtcgagcggtggccgatgagtatctcaaacattttacctttgagaagaagtcacttgaccaagcgctgcgtgagttcttgcagcaattctcgctgtccggcgaaacgcaggaacgggaacgagtgctggtgcacttttccaagcgcttcctcgactgcaatcctggcacctttaactcgcaggacgccgtgcacacgctgacctgtgccataatgttgctgaatacggacttgcacggccagaacataaatcgtaagatgagctgtgcggaattcgtcgacaacctggcagatctcaacgatggcgagaactttcccaaggatgtgctcaagtcgctttaccaggccattaagaccaagccgcttgagtgggcactagatgaagaggcaggtgatctgcagcagcaaagagccaacaatagtgccctgggcaatgtgggtctcaatcccttcctcgatcccccagaactggccacagctgtggaatacaaaaaaggctatgtgatgcgtaaatgctgctatgacagcagctttaagaagactccctttggcaaacgctcctggaagatgttctactgcacgctgcgtgatcttgtgctgtatttgcataaggatgagcacggttttcgtaaaagtcaaatgtccgacaatctgcacaatgcaatacgcatacatcacgcactggccaccaaggccaacgactacaccaagaagcaacatgtgttccggctgcagacggccgaccaggccgagtatctgttccagaccagcgactccaaggagctgcagtcgtgggtggagacgataaattacgtgtgcgccgctatatcagcgcctccgctcgagggaggggtgggcagtcagaaacgattccaacgtccgctcctgcccagcaaacaatccaagctgatgctgaaagagcagttggactcgcacgaggtgcagctggcgcagttggatcaggagcttaacgagcacaagaagggtcctattcccagcaagggcttggctctgcagaactacaaggaaaaggagagctacttgcagtatgaacttcgtcgctaccgcacttatgtgagcattttgagcgccaagatgctggctgatcagcagcagctggagctgcaggcgcagcagccctctccagcgtcgcacgaggaagaggccgacacattcccagtgggcaccaccgcctgcacgccacccacgccgcaaagtattaaccagaaggatcagcagaaggagcagcagcagcaacagccaacgaacaggtacagtcagcagcaacgccctagcggcagcagctcctcgtcctccgcccatgtgcagcaggacattggctga

SEQ ID NO: 15243 - protein, 900 aa, DROSOPHILA
MATVIVNNSSLASNNNEGEQTDNRSSSSSSNSSDNNNCSSNTGEPATSETATATATIITATSTRTMNCSSKLNYILCKKVAICIVGMLINASDRDRIVWTYNAPLQPHQLAALQRQQQQQEQQFQQQQQQLHQQHLQQQQQLQQQHQQQQQQQQQQQQQQLYGQQSHSNSHSSSISSSPQHSAVGSPASPTSVSSSVMSSSGSKGALGLGSSSNGPMAAVQQQQLREREQGGQVAQPPSGIPGLLSCPGGGCGNNGGGGGIGGGGNNDQSVSEAISNISSPDYQDDDNLLSSRDILGGMVLSDPSDSDSTILVSDAAAHQRQQLKQQLRAQQQQQRERERDRDRDREQSEHKVVIQVRGLDSNSSGGNGTNGRSEEDVVTLTDEPLGTMTVGMRDASPPVSDDGSDVESLHSYHYSPKAVDMPSAIRLAKRLHSLDGFKKSDVSRHLSKNNDFSRAVADEYLKHFTFEKKSLDQALREFLQQFSLSGETQERERVLVHFSKRFLDCNPGTFNSQDAVHTLTCAIMLLNTDLHGQNINRKMSCAEFVDNLADLNDGENFPKDVLKSLYQAIKTKPLEWALDEEAGDLQQQRANNSALGNVGLNPFLDPPELATAVEYKKGYVMRKCCYDSSFKKTPFGKRSWKMFYCTLRDLVLYLHKDEHGFRKSQMSDNLHNAIRIHHALATKANDYTKKQHVFRLQTADQAEYLFQTSDSKELQSWVETINYVCAAISAPPLEGGVGSQKRFQRPLLPSKQSKLMLKEQLDSHEVQLAQLDQELNEHKKGPIPSKGLALQNYKEKESYLQYELRRYRTYVSILSAKMLADQQQLELQAQQPSPASHEEEADTFPVGTTACTPPTPQSINQKDQQKEQQQQQPTNRYSQQQRPSGSSSSSSAHVQQDIG

SEQ ID NO: 15244 - DNA, 6781 bp, DROSOPHILA
tgttcccgaactgagcctggagttccccctcccggcagatgcgacgcattccattgtcttgacagcttccatcactgggcacgcagcccagcatgggctcaaactgttccctttcctggcagcgcctccttatccactggccattatccgagcacacttcgtagctgtggcaactgcccaccacggatctactctctccgttggagcagtttccactccgctccgccggcaggatacactgccccgcatcattgggcagacaatagttatgctcccgactgaagtacatgcccaagggacactggtgcagccaccaagagttgtccagacacattaggtagctctgacagccgcccgccaaggaaggacgcactgccaggtgctggcagtcgtctgaggaattaccagccaatttgctcatcgcccaactgcaaatagtttgattcctgtcctgctcatgaccccgcgggaaaggcaaacaggatcctatcaacggggagtagtagtgctgcttcggacagttgcgcagacgccatttgccaccggagcagcggaagtactgcatacaattgccacttttggcgggaatagtcatggattcgctgatggcggtgcaggtcggtatattcgatacccttgcgtaggcgcataccaagtcatctcgcggctccaggcatctttgctgctccggattgtagtatcgctggtcggagcaagtgcgtcgtcgccaacgaccatcgatgcacatctcgtactgggaacagttcgctggtaccgagcgcatttcattcgagatacaaatctggaacggaagaaaggaggtacattaaaggttttatttttaaccaaaataatctgtcccacacatcacatcacactttacatttggttagccgactaaataatatgccctttgaaccatagttctatcttcatttctgaaagaagcccatatccacatgttccattctataggcacacataataaaaagccgaaatgtttgtaattcatctattttgaatttattgtagcgcttatatggttagagtacattattgggtatttaatacgtatagaagtggaacaagcggaacattcacataaatcataactcataaataacaactaaggtcgtaggatagtgcatataagagtatatagaaagctagctcaaggctggcctagaagagttttgggaagaatttcttgaacaagttcagggaccttacgttttcctccgcctccacggaacgcttctggatgctatggctggtgcacatgccgaattccggagcgaagatctcgccctcaccgcacggatgataggtaacactaacgcgctgcagatcgtcacaggagcagaaaccggaattggtgttctcggcggcaaatggctcgaattggcttcgcttcaggcattccctcaggttgcacgatatcatggccatggtgtccttcagcaaacatataccctgggccttgtcaaagacgtgtcccgtctggcattgatggaaatagggcacaccgtcgcaggagcagaatccttctgtggtgttcttcgcctcgaagggttcgaaggcaactcggttcaaacagcttgtgtaatcacaggccgctaccacacaagttcctgcactctcctcgtaaacatgttcatccgcacaattgatgaaggtggaaacgccgacatcctggcagctgcaatatccactggtcgtattcactgccgcaaaagtggcatccacaacggcgcgactgtggcatcgtctgtcatcgcacaggccggaggcaatgatcttggcggtgctagaaaagcaggcacccaggatactgttataggtctcgccatttaagcactccgtgaacacaggagttccgctcacgcacaggcagaagccctcattcgtatttagagcctcatatgtggtgtagccatcggagctgccgcacttaccgggcgcgcaaacgcactcgggtgcctgcgaaacaatcagaaattgagcattatatcttcagaagatatatccttctacttacagcctgaactgtgcatcgtcccagatccgcactgaacaccatttcggggctgcactgctccaagatcacctccccatccttgcagtagcagaaggcgccatcgtcatcgctggccgtgtttgttgggaagggcacgtaattgtccaaggtggcgcattgattagcatcgcacaaggcggtcacacaggagtcctgataatattacgacattaacccgaaatcaatttatgtttcacggtaatttcttaccacaaccgttctgcaaaatcccacggccggatcgaattcctggttttcctcacattcccgaaaaacgggcaacccgccattacaatagcagaagccatccgttccattgatggaaggatatggtgtaaaatccggaatgctgtcacatttttcagcatcgcaccgggagacaacagaaggatcctggaatggaaatttcaattattgaggaaaatttttatattgcacattcccaactggcaccaccaacctctggttccgtgcacctctttagatcttcgttatagaccagatcatcgagacaggtttcatagatggggcaagagtcgaggcagtagcaaaaaccggagggatcactcgaaacagggaaggtattgaagtccagagcgctctcgcaaatgccaacagtgcaagcgttcacagggcatgtggtttcctcctgcaaatatcaattagatatggttggaacacagctctaactatagcctacctcagtggcggtgcaggcacctagctccaaatcgtattgggagttttccggacagctaatgtacttgggaacatcgtccacgcagagacagaagccgtcggtaccttcaatagttggaaaagtagagaagtccgtctttcctgagcatccattggcgcaacagcggggctgtaaaagaattttgaataaatcatcaactcatgttcaatgtacttcaggacggatttaaatgccttacatctggcagtggaataagaacacactcgagctcctcggtattgaaagtgtagccaattggacaggaaacagtgatgggttcgccagcgcggcacaagcagaaactgttcgggtcttcgtagtccggagagacgaagtactctgactggtcattgcagacctgaggatcgcagtttccggactgtaatagcgaaataaaaggatagttattggaaacgcgttacgtatttttcctggcgactacttacgaatgtgcagacttgatccgttgcgtcgtagaacaatccggttggacacgattgaatataagcaccactatcccggcacaggcagaaggtcgacgaatcgttgtcgttagatggatacgtcgagtccacagcggcactgttacaaatggtctggtcgcaatcgggctaaatttgatgaaaacaacgaggtattttggataaacttaatatagaaagagtaaaacttatcgatcttttttcacttcttaattaatttgtttaacttacgctgggttggtccaggcatatacccagggcggcggagtaaccagtgttaaccgggcagggttgaatggtggcctcgttgctgaggcagacgtagaactggccagtttctccagcgacagggtaggtggtgccatcactggcggttgcgcagtttttggcggagcactctacggtagtggagcactgaccagttgctgaatcaaaggcctctccaacgacgcattgcttcacttggggcactccgtccgtgcactggaagtaattggtacagatgggatgggccacgttgccattgccgcaggagcatgggttgatgcacttggcattcacatcgatgacgcaattaccatcgccgttgtaccactcgccggagccgcatgtgtgctttgtggccaggccattccagcaggtcaaatagctggtgcagtcggtcggatcggccatctggtagccattcggcttgttggagcacacccagcaggtggccttggtgtctggaacacagatgccgctggacttctgaaagacattgcccaccccgcacacaccctctaccaactgaccattctcgcagatcaggtacttatcgcagtctgtcgagtgacctataatggttccctgcgcgatgcctccctcgcaggtgcagtcctccacacttcgcttttggcgcgatccgctcgatctgttttccgggcagacattttcggtgtcctcgcggcaaatgccaacggaggcgtcgaagtaggtgttattggggcaagtgccatcctcccactggccactgatgcagtgctggtatgtccagcagttctttccacttgctggaggatccttggcattgcacttgtcaacggaactagtttcaacggttgaggtagtgggaatctgtgttgagttgctcttggcatcaatgcacacattattcacatccacttggcagcagtttagagtttcattaaaataactgccactatcacaggaaacggaagtccagtcgccactttgacacttgaagtacttggtgcagtcctggggatccacttttgcttcgccatctgtacaatccgccacacagcaagtgttgtcagcatcaacttcacaaacactgaggttagcattgaacacgttacccttgccgcaatccgcggccaccaggacaccatcaatgcagatgaagtacttgcgacagttttcttcatcgggaatgaagtctgcgttcttaatatcaccgcaatcgcaggatgccggaggttccgttgtctcctcagcacaagattcagtggtagtggttgtggaatcatcgcatggtgactctgtggtgcaagtgccgggaacacaaccccagttattactctcaaaatagcttccttcgggacattcttgagcagtagccgtattgttggagcacacatagaacaaggagcagttggacttgtcggccacagcggacccatcatcctgtccaatgcagtagttaacccagcattgtgagtttccttgatcgacagtacaggcggcaactgaggtgttgaaaaagctgccttggggacaagtctgaagagtggcttctccattggagcacacgtagtagctaccgcagttcgcctcattttcgacaaagacaccattggtcttattgatgcacaggttctgccagcacgtggagtttgcatccggtatgcaggcggccagggtttcattgaagaagcttcctaaatcgcacttctgtggataggcaatctgctcgtcgcagatgtagaactcgccacaagaaccactattggctatgtacgctccgttcacctcggtggagcacacattggtggcctacagaagttcggatagaagttaagggttgggataaatgggtctttatctaactctaaaagcgaatctagaacctacctcagcgagtggagctaaaagactcagcttgcagagacttcgtcctgccattgtgcacttgccattcttggggttgtactccttgccgggtgcacacgtcaccgtgcgaacggcgttcttggcggtgcaacggtagtaggaggaacagttcaggggtttcggccagtgcatcggaaggttcctagtcctccggtatatgcattcaggatcggcggctccaactagggcaaccactgcagtgagtgccaccacagtgagcagagtagctggatacgagaaaagtaactagagtccatgttactatttgggtacttcacactctcacctttcatcttgttcacttctattattccacttgtgatgatcgagatgtactccacataattgccaaaaagttagtgccttttatataccacattattttcgactgactctaattgtcccttatctctatcaattatgccgatcatgttagacatggccctttcatgtcagtctaattgaggtgtgaactttgggaattgtaattcctggaagtcatcacctatttcagtgtagacactccccaaagtttggtgtttggaattcgcaaagttatgaatgaatgtcacgagcaaggtcttgttccacctcaagatcactcaaaagttaaaagaaaagccagataggtaaaataacgttttttgagagcatgctatttatttgtactttatgtacattactttactttatttgcttaggcacaggtcttgtcgcaagtctggtttaccgagttccagtacagatcacttggacaatccttgatgaatccaatatctccatcgcaatgtatgtataaatgacaatcgtacggatgtggcagaaattgcacaccttgatgagctctacaggaggcgttcgcatccacgttgggaattgtctgggtggtcgcacttgtcggatctgatggatcgcccgaggattcttctggctcatgcgtgggaattgatggttctccagtgggctcttcagtggaatccgaagtaccttcattggtggtttcccccgccggtattttagtctcttcagttgtttcttgagtcggttgacctgtgggactgtcagtgggttgatctgatggattagacgtttctccagtgggctgtcctgtgggatccgatggattttcagtggattcttcggttggctccgatggttcgtcgttggtgggacttcccgtgggattcaatggattttcagttggctccgatggattttcagtagatgtaatgttcgagggcggttcagttggtactactgtgggcttagcagtgggcttccatggttcatcggtcgaatcggatgggt

SEQ ID NO: 15245 - DNA, 4172 bp, DROSOPHILA
atagaagtgaacaagatgaaagctactctgctcactgtggtggcactcactgcagtggttgccctagttggagccgccgatcctgaatgcatataccggaggactaggaaccttccgatgcactggccgaaacccctgaactgttcctcctactaccgttgcaccgccaagaacgccgttcgcacggtgacgtgtgcacccggcaaggagtacaaccccaagaatggcaagtgcacaatggcaggacgaagtctctgcaagctgagtcttttagctccactcgctgaggccaccaatgtgtgctccaccgaggtgaacggagcgtacatagccaatagtggttcttgtggcgagttctacatctgcgacgagcagattgcctatccacagaagtgcgatttaggaagcttcttcaatgaaaccctggccgcctgcataccggatgcaaactccacgtgctggcagaacctgtgcatcaataagaccaatggtgtctttgtcgaaaatgaggcgaactgcggtagctactacgtgtgctccaatggagaagccactcttcagacttgtccccaaggcagctttttcaacacctcagttgccgcctgtactgtcgatcaaggaaactcacaatgctgggttaactactgcattggacaggatgatgggtccgctgtggccgacaagtccaactgctccttgttctatgtgtgctccaacaatacggctactgctcaagaatgtcccgaaggaagctattttgagagtaataactggggttgtgttcccggcacttgcaccacagagtcaccatgcgatgattccacaaccactaccactgaatcttgtgctgaggagacaacggaacctccggcatcctgcgattgcggtgatattaagaacgcagacttcattcccgatgaagaaaactgtcgcaagtacttcatctgcattgatggtgtcctggtggccgcggattgcggcaagggtaacgtgttcaatgctaacctcagtgtttgtgaagttgatgctgacaacacttgctgtgtggcggattgtacagatggcgaagcaaaagtggatccccaggactgcaccaagtacttcaagtgtcaaagtggcgactggacttccgtttcctgtgatagtggcagttattttaatgaaactctaaactgctgccaagtggatgtgaataatgtgtgcattgatgccaagagcaactcaacacagattcccactacctcaaccgttgaaactagttccgttgacaagtgcaatgccaaggatcctccagcaagtggaaagaactgctggacataccagcactgcatcagtggccagtgggaggatggcacttgccccaataacacctacttcgacgcctccgttggcatttgccgcgaggacaccgaaaatgtctgcccggaaaacagatcgagcggatcgcgccaaaagcgaagtgtggaggactgcacctgcgagggaggcatcgcgcagggaaccattataggtcactcgacagactgcgataagtacctgatctgcgagaatggtcagttggtagagggtgtgtgcggggtgggcaatgtctttcagaagtccagcggcatctgtgttccagacaccaaggccacctgctgggtgtgctccaacaagccgaatggctaccagatggccgatccgaccgactgcaccagctatttgacctgctggaatggcctggccacaaagcacacatgcggctccggcgagtggtacaacggcgatggtaattgcgtcatcgatgtgaatgccaagtgcatcaacccatgctcctgcggcaatggcaacgtggcccatcccatctgtaccaattacttccagtgcacggacggagtgccccaagtgaagcaatgcgtcgttggagaggcctttgattcagcaactggtcagtgctccactaccgtagagtgctccgccaaaaactgcgcaaccgccagtgatggcaccacctaccctgtcgctggagaaactggccagttctacgtctgcctcagcaacgaggccaccattcaaccctgcccggttaacactggttactccgccgccctgggtatatgcctggaccaacccagccccgattgcgaccagaccatttgtaacagtgccgctgtggactcgacgtatccatctaacgacaacgattcgtcgaccttctgcctgtgccgggatagtggtgcttatattcaatcgtgtccaaccggattgttctacgacgcaacggatcaagtctgcacattctccggaaactgcgatcctcaggtctgcaatgaccagtcagagtacttcgtctctccggactacgaagacccgaacagtttctgcttgtgccgcgctggcgaacccatcactgtttcctgtccaattggctacactttcaataccgaggagctcgagtgtgttcttattccactgccagatccccgctgttgcgccaatggatgctcaggaaagacggacttctctacttttccaactattgaaggtaccgacggcttctgtctctgcgtggacgatgttcccaagtacattagctgtccggaaaactcccaatacgatttggagctaggtgcctgcaccgccactgaggaggaaaccacatgccctgtgaacgcttgcactgttggcatttgcgagagcgctctggacttcaataccttccctgtttcgagtgatccctccggtttttgctactgcctcgactcttgccccatctatgaaacctgtctcgatgatctggtctataacgaagatctaaagaggtgcacggaaccagaggatccttctgttgtctcccggtgcgatgctgaaaaatgtgacagcattccggattttacaccatatccttccatcaatggaacggatggcttctgctattgtaatggcgggttgcccgtttttcgggaatgtgaggaaaaccaggaattcgatccggccgtgggattttgcagaacggttgtggactcctgtgtgaccgccttgtgcgatgctaatcaatgcgccaccttggacaattacgtgcccttcccaacaaacacggccagcgatgacgatggcgccttctgctactgcaaggatggggaggtgatcttggagcagtgcagccccgaaatggtgttcagtgcggatctgggacgatgcacagttcaggctgcacccgagtgcgtttgcgcgcccggtaagtgcggcagctccgatggctacaccacatatgaggctctaaatacgaatgagggcttctgcctgtgcgtgagcggaactcctgtgttcacggagtgcttaaatggcgagacctataacagtatcctgggtgcctgcttttctagcaccgccaagatcattgcctccggcctgtgcgatgacagacgatgccacagtcgcgccgttgtggatgccacttttgcggcagtgaatacgaccagtggatattgcagctgccaggatgtcggcgtttccaccttcatcaattgtgcggatgaacatgtttacgaggagagtgcaggaacttgtgtggtagcggcctgtgattacacaagctgtttgaaccgagttgccttcgaacccttcgaggcgaagaacaccacagaaggattctgctcctgcgacggtgtgccctatttccatcaatgccagacgggacacgtctttgacaaggcccagggtatatgtttgctgaaggacaccatggccatgatatcgtgcaacctgagggaatgcctgaagcgaagccaattcgagccatttgccgccgagaacaccaattccggtttctgctcctgtgacgatctgcagcgcgttagtgttacctatcatccgtgcggtgagggcgagatcttcgctccggaattcggcatgtgcaccagccatagcatccagaagcgttccgtggaggcggaggaaaacgtaaggtccctgaacttgttcaagaaattcttcccaaaactcttctaggccagccttgagctagctttctatatactcttatatgcactatcctacgaccttagttgttatttatgagttatgatttatgtgaatgttccgcttgttccacttctatacgtattaaatacccaataatgtactctaaccatataagcgctacaataaattcaaaatagatgaattacaaa

SEQ ID NO: 15246 - protein, 1290 aa, DROSOPHILA
MHWPKPLNCSSYYRCTAKNAVRTVTCAPGKEYNPKNGKCTMAGRSLCKLSLLAPLAEATNVCSTEVNGAYIANSGSCGEFYICDEQIAYPQKCDLGSFFNETLAACIPDANSTCWQNLCINKTNGVFVENEANCGSYYVCSNGEATLQTCPQGSFFNTSVAACTVDQGNSQCWVNYCIGQDDGSAVADKSNCSLFYVCSNNTATAQECPEGSYFESNNWGCVPGTCTTESPCDDSTTTTTESCAEETTEPPASCDCGDIKNADFIPDEENCRKYFICIDGVLVAADCGKGNVFNANLSVCEVDADNTCCVADCTDGEAKVDPQDCTKYFKCQSGDWTSVSCDSGSYFNETLNCCQVDVNNVCIDAKSNSTQIPTTSTVETSSVDKCNAKDPPASGKNCWTYQHCISGQWEDGTCPNNTYFDASVGICREDTENVCPENRSSGSRQKRSVEDCTCEGGIAQGTIIGHSTDCDKYLICENGQLVEGVCGVGNVFQKSSGICVPDTKATCWVCSNKPNGYQMADPTDCTSYLTCWNGLATKHTCGSGEWYNGDGNCVIDVNAKCINPCSCGNGNVAHPICTNYFQCTDGVPQVKQCVVGEAFDSATGQCSTTVECSAKNCATASDGTTYPVAGETGQFYVCLSNEATIQPCPVNTGYSAALGICLDQPSPDCDQTICNSAAVDSTYPSNDNDSSTFCLCRDSGAYIQSCPTGLFYDATDQVCTFSGNCDPQVCNDQSEYFVSPDYEDPNSFCLCRAGEPITVSCPIGYTFNTEELECVLIPLPDPRCCANGCSGKTDFSTFPTIEGTDGFCLCVDDVPKYISCPENSQYDLELGACTATEEETTCPVNACTVGICESALDFNTFPVSSDPSGFCYCLDSCPIYETCLDDLVYNEDLKRCTEPEDPSVVSRCDAEKCDSIPDFTPYPSINGTDGFCYCNGGLPVFRECEENQEFDPAVGFCRTVVDSCVTALCDANQCATLDNYVPFPTNTASDDDGAFCYCKDGEVILEQCSPEMVFSADLGRCTVQAAPECVCAPGKCGSSDGYTTYEALNTNEGFCLCVSGTPVFTECLNGETYNSILGACFSSTAKIIASGLCDDRRCHSRAVVDATFAAVNTTSGYCSCQDVGVSTFINCADEHVYEESAGTCVVAACDYTSCLNRVAFEPFEAKNTTEGFCSCDGVPYFHQCQTGHVFDKAQGICLLKDTMAMISCNLRECLKRSQFEPFAAENTNSGFCSCDDLQRVSVTYHPCGEGEIFAPEFGMCTSHSIQKRSVEAEENVRSLNLFKKFFPKLF

SEQ ID NO: 15247 - DNA, 11812 bp, DROSOPHILA
atagaatatgacttagcaaaaataaactgttatactgaatatccgcaaatgaaaatgttgttttattttaaaagaattccgctcgaatcacttttcgatatcccacttagtaaccttttccattaaatttattaaacgaaaaaaagaaattaccgatgcgtgtgaaagcagagaaggttttctgggatttggtaactaatgtaactaattttattttgttttacttagtttttacaggttttaataatttatcttttcagtatgatctttttgttttataatttatttagtaatatagctgcaataatatagctgcatttgttttgtttttttttgtatatatatataaatatgtatggatctttactttacacttcttaaatgttaactacgccaaatcttgtattattttttttgttttttgtcgtttgtgtgccattgaatatgcttgcgagactcctacgataaactttcataattagtatatagctacaatatatttatatcaatgtgtatattcaaaatgtgaaataaaaaaccgtatttaaaaatatttttactttgtggattctcattttgtttagtataattcacacttttgtttaccattgaatccatccaccttagcggtttgttggccttacatactaaatcttttgaaatattgtgtgaattcaatgcattttttagcgtataataattgtataaattactaatataaattaagcactcaaaattgcagctgcttcaaatgctggcacgtcacaagcatcgaaagccgtgctgtgcttttgggtttgagagcagcatcaaatcattcacataatacccatataattatttcgttattttttatgcactttttacaaaactttcatatcccaacccctataatactctagtcatagcaaaataataaataatgagtagcagttagttggtaggcaaagctgctggctaggctaacacaaacaaggactacatacaaaaagcgaaatctaggcattggcgtgattcgtttaccattttattttagctaaaaagtcgaaagcagcaagcatatataaaccttatatagttcaattgtggctggaagtaaatacatttaaataatattaggcgtatctctaatgcgcagagtgccaaactgtgttgtaaaaagaaaactatctccgaatccatttgtacaatactctcgaatatatatatgagcgctcgattcgtctatccttaatcgtttgtctatactaatttatgtaccttgcctcctgcagcaagtgctggtgagtttgtgttttggttttgcttagttatcatcgtgtctaaatcaattgatttgtgaagcttactagatagtttttgtcgaagtgtagcacattcatatacatataatatataagctgtttgaaaacctccataaaaatttgtgtgccaagttcgattttgttccattgccttaataagtctaaaccgtatttaacatgctccatatctcgcttacgtttaagaatttaacactatacactatgaagaggatacttaagatattgcgaccatcgtgtcctgttttgtttagtttagttttgtagttggtttctgctttttgattctggatgccttggtcagtgagtgtctggtgtgaagtgtgctgtatgcagccggaacaatcgacgaaccactcccgattaacgcagctgattcctatttaccaaaatacaatattagatcaagtacaacacaatcttgagattaaatgttaaccaagatgatatcaggcctacggatgaattaaatcaaaaaaaggcttactaactttttacataaaaacgtgacaaggcgttgcgcaacttaaagtcgcttggttttctggtttctggattcttgagccatacgctgacgtcgtctctgcagatgatgttgatgttttgatgtttgttttgtgagtatgttgggtggttgtgcgtgtggaaaacaaaatgtaaacgcttgaacacaaaaatcacacaaagcagttcctcacggccgcggcccgagtattgtctttgttcagttgcttgctctctacaattgctgtctgtccacttatctgggccgttgtctgtggggatgagaagagcgggcgatgatcaaacggaaacggaaacggaaacagaaacataatggcaacataagcaacaaaaaaaaaacgatgtaaaaactatattataatggggtggatgagcctatcttgaattttgatacccttgtcagattcgtatttatgtattttagattgaagatcacatcttttagtaaaatacataagattttgaagatcacccaccgtcgagtcgtagaccctctattcgtatggctaagagaacactcacctaaagtactgatcatgcagggactgtcgctgaaactcggcggcctgtaaatactgtatatatgtaattaatgagttaggatgtggataagggaattgggaaacctgtagttggtcggcataggacatgcgcagcaggacatccgagtgcggctccctaggtataagcatatttggccgcggatactggccaacattcgctgaaatgtgatcgaagagaagaaatgaatcagttattaatgtggcctctgtggtctataaaatatggcgaaaacctcaagggctatacaaactcacgtggcagttggaaaccggcctccggtggttgcggctgtggatgcaaaggcaaatgtaaatgagtatgagagtgtgcatgatattctctcgtcaatcgtatctgaaaattatcgaatatcgtagaaagtttcaaaagagccagtgctgcgtgggcgttggcgccaatagaagatatagaaagttttatgtaactatgcgtaatgcgggttaaatggcgacacatgtcggtttcgattcgattttgttttggtttttggttagatgccccatcgagatgggcaaaaagcatggcatggcaaataatggttagcacagaacatgaacggcatgacgggacacgtgcttgggttttatgcgggtactggactggttaacaggtgagctgacaagtggacatagtgattggttcggttttgcggttcgatcgcttgacgttccaaatacgattgattttgtgaatatgagtcgagtggaataataaagaagtgtagcctaccatacgcaccatgtgctcgcccgggtccaaccccacatggtgcggaggtggaattcccagacgctccctctccatctgcgatatcgccggattcgcatacagcgggaactgcgaggggtggatgccgctattggaaaaagaagaaagtaatctgtaacattaaaatcatcttcaattaattaacaagccttaaccaaccgtcgatagtattccatccagtgcggatctagtcgggattgactcgccgcagcagcttgtgcgtttttaatctcctccagttccctgcaaataataaaatgttaatatgaacctggaatctggatcgaatgctggttatattgggatctttgtgtttttggtaagggttattcaaagcgtggagtaaacgaaattgcaaatgataaatagttgaagcataattttggacgtgcgcacaagataccgaattctttaaaagctgggggatatgtattaaagcaggaaaatgaagatgctctttagaatccctttgacataacaccgctaatcattgattaatttttgttacatctcaatatattcaatataaatattagatttttgtaaaagattagaggttagtccagagatccccaatggtattgtatatgtaagggagaaatgggggagtgatgaatattgagttgtggttggaattgatgaggcatgagagggttaatggttttgtgttgggatatgtgagatggctttcgcattgaagacagggcttgtcaggctttggtactgtacctctctctgtacatggggcccattggatgatgatatggcaccatctgttcaacaggactgaaattgaatcgaatggaaataattacaatcatcaaacgcgacttggtggactcccatgtggagttgggagaaggcaaacggcagaagagaactgaacaaaatcctagcaccagacgtaaaactcggcggagagtggttcctccttctcctgaaactcacctgaaggcgacgtggggacgagcgtactcggacagttgacgcagtgccggcgtatccgcatacggtggcttcagctcagccttcatcttggcttgctgtgccgcctgttgcgcggccgctgcttgctgttgttgctgctgctgttgttgttgctgctgctgctgtgtaggattacaaatgatatcagctttggtaaacatgtaaataacatcatcactaacctgtcgccgctcacgctccttttcggccagcttgcggtcgcgttcttcacgcttgcgggccaactttgagtcggccaccggcttgaagatcaaatctgttctcgtgcacgaattgtaatccccacgatcgatgtggcgcacaaatctataaaattatcaaattatattattatttgtataacaccttaaaagcagaaatgctagatggcttggcatagcacttacatggcagactgagagcgatggcattcggtgtcgtccggttttgcttcgggactgggaccacgtggtatattgtgcgttggactgggaatctctggctctggatccggttcaatatcaatgggcactgaaataagtcatattattagatacaccttcatactcatttcatgagtgcctatcttacatggctccgtcggatggtgtccaccgcccatacccgccgagttggctgagtgtgcatgcgctcgcagggcgtccatgtgcgatgtgggcttcaagccgtgaggctgaccatcttgtggcgcaaagggtgacccatgaggcggcccttgtggatatcccggcatatggctgccaggataggcacctggcggcagtcccgtcggtgttcccggtccacccattcctgggggcatcccaccgcccggaccctgtggcgtctttggcgtcggcggtttgttgggtggcattccgccaggctgttgttgttgcggcgccttgtgctgctgggctgccgctgctgcagccgcttggtgttgtttctcagcagctgcttgtgcagcggcggccgctgcattctgctcgtcctggcgcatctgctggggcggcggtccttgcaatccggcatggtgggccgccatcacggctgccggatcgagctgtcccggctgtggtggcggcttcatgtatgccgggaatccaggaccatagggcgcatagccatatggcgaattaaatggatggtgatgcggcgagtagaataccgagggatgcagaagcgggtgcggatacggtgactgacccggatgcactccaatctgcgggattcctccgccaggcgcaatcagtggcaacggtagaggcatctgcgggtgacgaatgaccggcggcgatgctcctggccgcaaatgcggtggcggtgatgttcccaagcctctctgacccggttgaggagcgtacatcttgctcagaggactcgccattaaagaggcgttggacaccgggggtggagtcatgtgtggcgattgctgacgcatcagcgcatgtcgatcccgctccgccacagcagctgctgcggcggataacgcagaggacgagggatgatggctgagcggcgactgcggcaccggatgcagcggactctgccgacttaggctgcttacgctggatgccggtgaggctgcccgatgagcagctgccgcagcagccgctgctgccgacgagtttggcattcctccaggtccaacgcttccgggccctgaaggtcctcctccactgctcgagatctgtacgctgggactggcgcggctaaaggcggacgatggcaccgtgctggtggtcagcgacatactggtagacgtcatactggccaccgagtgagccgtcagtggggccgaagaggcatgcgagtgtggcagatgtgagggcggggtgcggcgacttagagcggactctggaataccaccaagaccgccgggaccggccagcaacgcgatgggtccaccaccaggacccaagcccgctatcgagtgcgacagcagatggtgtccaggatgggccagcgctgcgtgagcgggatgtccgggcggcaagtgggctaggtgcgggtgtatggccatcggatgaccgatgagtcccgggggtggaggaccactacccgcgagccctggcaacggtgatgtgcgatgcgcatgcggcgactgttgcggcggtggtccacccggaccactcgatcctgccatagtggtcgaaggctgcgatgtgggcggctctcgagacgattgcggatcgtgcatggatctcggcggctgctgggctggtgacggagttcgcaccgtaccagctggtccgccgggctgttgttgttgttgctgctgctgctgttgctgagaagtgtgcgagggcggcaatccatgtccgtgctgcggatgtccctgcaacgacagcggcatgggtgcatgtggatgcatactgggcggcagatcgtgcggccgatggagaccctgcagatgcgcatgtggatgaaggtgcgggtgcatgtgcgagggcgccatagtcgagagcgtgggaggaattccaatcgagctcggcggtatcgatgatgccacagacagctgtgagtgttgatggccaggatgtagtccatgttgcagactgggtggacctgcagacgtgggcgttggctggtgtagcgatgtgggcggtggaggtggctggggaccactgccacccgctgcacctggtggcgggccgtggatgagattttgcggatgcattcccggtggtagaccacctcctgctggcgaaggcatatgcggcgagggatgcggcgactggaactgctgcggttgcgggggcattgagggcggctgtgaattgctattgctgccctggctgtcctgaccaggtgtagagcgcgcagaggcatcgataggactctccggcggcggtccgtacggtgaggacttgatcagattctcgccgccatagggctttacgtccgctggtcccgcctgagagaccggaggcatcgggtacttgagatcctggggcgggccgtatttggctgccaatggatcgccatacttgagcataagtccggtcggctcgaagggccgtcccaacggtggtgtttgcacatcgtgttgatagtgcggcttgggcatggcgataccaggtggtggagttgctcccggcggtacctgatgtgccggcggctggggttgctgttgctgggactcttgcgacgtcggaggcggtccgtatttatgggcggcgtccagcggagagcccacgttgtgcggcaggtggccgaaaccgggcttaatatcgggtatcttaagcgagtcctggtagcctggcttgcttggcggctgatgggcagctgacaactccacattgtacttgccctgctgttccatcatatacttcatatcgtatttgccagcagcagccgctgccgccgccgcagcttgcatctcctggctgtacttgagtgcatctagaggcggcggtgggggatacttgagatcctgaggagcgaacttcatctccatctcgggcggatacttctggggcgtggttggcgctccaggtggtgctccgctgactcctccagccgcatcgctgtgcagttgtggtggctgtggaggcacgccttgtcccgatggtccatactttagctggccatcaattaggtagccagggggcggttgcgtcgttacttgcccatgaggcatgtgttgcaggtgcagtggctcctggccgctctctaccggagctccggaaagcggatgtagagctgaaggcggtgcacacggacctgaaggcggcagacctccagcactatgcttcaatgcatcctcgtttttaatctcgatcttcaccttcaggtcctgcggttcgttgctgttctgattgcaggtggcgtccatcgagtcctccatgggctcttttttgatatagactgattccgatggcgggcaagacggaggttgcggtatgccaactggagcgagttgctgctgcatctgctgctgtgattgctgttgcatgtgctgttgctgctgcggagatacttcctgcttaatggttgccagttttttaagcatctccggatcgctgtcgcacgactccatcttctcgatggcctccttgcggtcgacggacgcgttcagcgcctcaacggtggcaattgttggtaccttcattgtgattggtgcggctaccggactgggcagggcattgggattaggaccatccaccaaactagtgtctgcactgctaggcgcctggatgtttgtctcctcgtccatgttcttgatggcgctatccttgctgtcttcggccaaagcctctgccttgatggccttttcctcggccttggcctccagatcgttggtgaccatttcgcgctcctccttgcagctgaccgtctccttgctgtcctttgtggactgctgctcggcggtggtggtgtccgtggtattcgattccccatcgtcgagcactgaatccggtctgctatccgagttcatactctcaaccgggctgtccggtcgcttgcgcttctccttgatggcattctcctcatgggcgcttggctcgttggactcctgctccgttcgcttcttcttgttgggcgtatcctgcttgccacccttgcgcttattggctgaactctcggccacagccttcgtcggtgtcttgggactatcgaccgaggctccgccggaaacgtccggtgtttcggagcccctcttgggtcgcttgccattagccacggcgttggctgattgatccttagacgaactattgccgccagcggcaccgccgccggttgatccgctgcttatggatgtggcgttaccgccaccgttgccggccgtgttgttaccgctgctggtgctgctgttgttgttctgttgcttgttacgcgtcctcatccttgagggtgattcatcccttttgtgggtcagactcgaatcactgtcgcactcgctggcgtcgtcctcggtgagcgagctgttctcctccttggagacagcgggcgaggagcgactcgccgtctcggacgccgcggttgccgccgccgtcgccgtcgtcgcagtttgtggttctggagtgtcctccttcttcggaggagtgttgctgttgctgttgttggcccgcgtgacacggttgcgtcgcagggcgctttggcggcgtcgcctgtgtggccgattattgttcgcgccgggcgtcttcttccacagatagtagaactcgaccagctccggcgtgtccttgtgcggcagcaagtccttatggatgcggaagaagttcttcccaaactgacgcagacccttgatgaatttctttgtttcgtcctcggtccacttcttgtcgatgcccttcgaaacggggcactttacgagcgcttgtagagctttgcctggatcgtagccagaatcgtggagctgaaatgggcattgcggattaaagagtgctgccatatgcatatatcatctcgggcaactcaccacgtcgagtgcgtttattgtagtgtcgtcgcgactagcagccaaacaaccgtcttctaaaccaccatcacacattccttgaaatgcagccatggatcgagccgcacgcaagaacattaacaagtcgccatcggccacaacgcctggactccatcttgattcctctagttcacgttcatcggtttccttgtcgatggggaagcttgagattggattataatcgggcagttttgccttcagtcgtcacaggagacaaacgaaaagttttgggattagttcaaaaactccaggagaacgattgatgggttagtcacacaaccacaccacgcacactacacaccacaggcaagacagctagtgccggcaatccggggggattaccagcacccacgagatgatacacaaacttaagtctaatgcatgattatgaatgaataatgtataatgtgtgctacgaatttcctcgaacggatttcggtagggaagcaggaaaagaaggttgggatttggaactgggtcaacttctactcatcgaggattcgaactattaatagccaattgcataaacgctagaactacaaattatttacaggaattaggcgttatatacaagattatgctaagtgtaaccgatatatgtatatgtttaaagaaatgcatttcgctgtagccttatcagaaggaacaatagaatcttatgacatggaatattaatcagttcaggttgcaaagatttgtatacagaaaggaagaacatcggtaatacatgaacttgtagaagtttatcttgtttcctaagggaattgtttaaagtttccgaaatatggcagaaaagtaattttttacacattctcttgactgatattagaaacggaaactgaaccattattttcgttattaattattttctgttccttcaaaggctacacgcttaaaaacagttggtaaacgaacttttttgttgaagacatccaagaggaagaacaaaggaatataaagtacaacttttgcaataaacaaaagaaatatagggtctacattttcgttttgcataattgttaaattttgtagttctttgatttcatttttgttaccgtgagctgaatttctgatttgtgagagttatgtacgtacatagacatcgtttacctggtggccgggacccactcgaatttctccttgagtggaggccgccatcaccctttaaaaacacgcttccggtccagtgttaagcctttttatgccctctacgatatgaaaattcaactgcaaataaatccaagcacacagagaaaattcgttaaaaaaaaaatgattcaaacatatagagagacaacggcgataggggcggtgttgtaaaaagcattttcaataaagcgatgaagttcatatcaacatgcataaataaataatccataaaaataatgccgtgtaatgtgcgaacgatggagtggcgatgagtgagtgctggagctgatggagtggatggagtggccgggggacacggctgacggggccgggaaattaggggtttacgctgtcggacgattgagctctctgccacttaatcgcctgcatatgttaatgtgcccgccacgtacagagcccaagggattcggagaaggatcggaggcttggactggcggcactgacagacgaatggttttgctttcggtacggtacgctttatgttcattctaccctataaactactcggttttatagctgggatcaattgtttgttttataatcttcttgttattcctgacaacgattttatcgttttgttttgtgtccaattccatatgtttagaactgttattatgattttgtacttaaaaaaaaaaaaccttgcattatataatcatatatatagttggtgtagctatcacaagggtactaccagcttcgactccctacagagctctcttttttcccggtttcactcattttttccggccatcacaagctggtgttttttcattttatttatatatattttttttcttcgccttgtctgggcctgtctctcgagtgtgcgtgcagctgtaaacagattttccgctcaaataagtccgcgaataactgtaacgaggcggttaagtaagccttctccagttccaagccaacccatccagctctacatactacataccccaactcccataaccatagccatgccatgtcagccccacca

SEQ ID NO: 15248 - DNA, 6862 bp, DROSOPHILA
atggcggcctccactcaaggagaaattcgagtgggtcccggccaccaggaaaccgatgaacgtgaactagaggaatcaagatggagtccaggcgttgtggccgatggcgacttgttaatgttcttgcgtgcggctcgatccatggctgcatttcaaggaatgtgtgatggtggtttagaagacggttgtttggctgctagtcgcgacgacactacaataaacgcactcgacgtgctccacgattctggctacgatccaggcaaagctctacaagcgctcgtaaagtgccccgtttcgaagggcatcgacaagaagtggaccgaggacgaaacaaagaaattcatcaagggtctgcgtcagtttgggaagaacttcttccgcatccataaggacttgctgccgcacaaggacacgccggagctggtcgagttctactatctgtggaagaagacgcccggcgcgaacaataatcggccacacaggcgacgccgccaaagcgccctgcgacgcaaccgtgtcacgcgggccaacaacagcaacagcaacactcctccgaagaaggaggacactccagaaccacaaactgcgacgacggcgacggcggcggcaaccgcggcgtccgagacggcgagtcgctcctcgcccgctgtctccaaggaggagaacagctcgctcaccgaggacgacgccagcgagtgcgacagtgattcgagtctgacccacaaaagggatgaatcaccctcaaggatgaggacgcgtaacaagcaacagaacaacaacagcagcaccagcagcggtaacaacacggccggcaacggtggcggtaacgccacatccataagcagcggatcaaccggcggcggtgccgctggcggcaatagttcgtctaaggatcaatcagccaacgccgtggctaatggcaagcgacccaagaggggctccgaaacaccggacgtttccggcggagcctcggtcgatagtcccaagacaccgacgaaggctgtggccgagagttcagccaataagcgcaagggtggcaagcaggatacgcccaacaagaagaagcgaacggagcaggagtccaacgagccaagcgcccatgaggagaatgccatcaaggagaagcgcaagcgaccggacagcccggttgagagtatgaactcggatagcagaccggattcagtgctcgacgatggggaatcgaataccacggacaccaccaccgccgagcagcagtccacaaaggacagcaaggagacggtcagctgcaaggaggagcgcgaaatggtcaccaacgatctggaggccaaggccgaggaaaaggccatcaaggcagaggctttggccgaagacagcaaggatagcgccatcaagaacatggacgaggagacaaacatccaggcgcctagcagtgcagacactagtttggtggatggtcctaatcccaatgccctgcccagtccggtagccgcaccaatcacaatgaaggtaccaacaattgccaccgttgaggcgctgaacgcgtccgtcgaccgcaaggaggccatcgagaagatggagtcgtgcgacagcgatccggagatgcttaaaaaactggcaaccattaagcaggaagtatctccgcagcagcaacagcacatgcaacagcaatcacagcagcagatgcagcagcaactcgctccagttggcataccgcaacctccgtcttgcccgccatcggaatcagtctatatcaaaaaagagcccatggaggactcgatggacgccacctgcaatcagaacagcaacgaaccgcaggacctgaaggtgaagatcgagattaaaaacgaggatgcattgaagcatagtgctggaggtctgccgccttcaggtccgtgtgcaccgccttcagctctacatccgctttccggagctccggtagagagcggccaggagccactgcacctgcaacacatgcctcatgggcaagtaacgacgcaaccgccccctggctacctaattgatggccagctaaagtatggaccatcgggacaaggcgtgcctccacagccaccacaactgcacagcgatgcggctggaggagtcagcggagcaccacctggagcgccaaccacgccccagaagtatccgcccgagatggagatgaagttcgctcctcaggatctcaagtatcccccaccgccgcctctagatgcactcaagtacagccaggagatgcaagctgcggcggcggcagcggctgctgctggcaaatacgatatgaagtatatgatggaacagcagggcaagtacaatgtggagttgtcagctgcccatcagccgccaagcaagccaggctaccaggactcgcttaagatacccgatattaagcccggtttcggccacctgccgcacaacgtgggctctccgctggacgccgcccataaatacggaccgcctccgacgtcgcaagagtcccagcaacagcaaccccagccgccggcacatcaggtaccgccgggagcaactccaccacctggtatcgccatgcccaagccgcactatcaacacgatgtgcaaacaccaccgttgggacggcccttcgagccgaccggacttatgctcaagtatggcgatccattggcagccaaatacggcccgccccaggatctcaagtacccgatgcctccggtctctcaggcgggaccagcggacgtaaagccctatggcggcgagaatctgatcaagtcctcaccgtacggaccgccgccggagagtcctatcgatgcctctgcgcgctctacacctggtcaggacagccagggcagcaatagcaattcacagccgccctcaatgcccccgcaaccgcagcagttccagtcgccgcatccctcgccgcatatgccttcgccagcaggaggtggtctaccaccgggaatgcatccgcaaaatctcatccacggcccgccaccaggtgcagcgggtggcagtggtccccagccacctccaccgcccacatcgctacaccagccaacgcccacgtctgcaggtccacccagtctgcaacatggactacatcctggccatcaacactcacagctgtctgtggcatcatcgataccgccgagctcgattggaattcctcccacgctctcgactatggcgccctcgcacatgcacccgcaccttcatccacatgcgcatctgcagggtctccatcggccgcacgatctgccgcccagtatgcatccacatgcacccatgccgctgtcgttgcagggacatccgcagcacggacatggattgccgccctcgcacacttctcagcaacagcagcagcagcaacaacaacaacagcccggcggaccagctggtacggtgcgaactccgtcaccagcccagcagccgccgagatccatgcacgatccgcaatcgtctcgagagccgcccacatcgcagccttcgaccactatggcaggatcgagtggtccgggtggaccaccgccgcaacagtcgccgcatgcgcatcgcacatcaccgttgccagggctcgcgggtagtggtcctccacccccgggactcatcggtcatccgatggccatacacccgcacctagcccacttgccgcccggacatcccgctcacgcagcgctggcccatcctggacaccatctgctgtcgcactcgatagcgggcttgggtcctggtggtggacccatcgcgttgctggccggtcccggcggtcttggtggtattccagagtccgctctaagtcgccgcaccccgccctcacatctgccacactcgcatgcctcttcggccccactgacggctcactcggtggccagtatgacgtctaccagtatgtcgctgaccaccagcacggtgccatcgtccgcctttagccgcgccagtcccagcgtacagatctcgagcagtggaggaggaccttcagggcccggaagcgttggacctggaggaatgccaaactcgtcggcagcagcggctgctgcggcagctgctcatcgggcagcctcaccggcatccagcgtaagcagcctaagtcggcagagtccgctgcatccggtgccgcagtcgccgctcagccatcatccctcgtcctctgcgttatccgccgcagcagctgctgtggcggagcgggatcgacatgcgctgatgcgtcagcaatcgccacacatgactccacccccggtgtccaacgcctctttaatggcgagtcctctgagcaagatgtacgctcctcaaccgggtcagagaggcttgggaacatcaccgccaccgcatttgcggccaggagcatcgccgccggtcattcgtcacccgcagatgcctctaccgttgccactgattgcgcctggcggaggaatcccgcagattggagtgcatccgggtcagtcaccgtatccgcacccgcttctgcatccctcggtattctactcgccgcatcaccatccatttaattcgccatatggctatgcgccctatggtcctggattcccggcatacatgaagccgccaccacagccgggacagctcgatccggcagccgtgatggcggcccaccatgccggattgcaaggaccgccgccccagcagatgcgccaggacgagcagaatgcagcggccgccgctgcacaagcagctgctgagaaacaacaccaagcggctgcagcagcggcagcccagcagcacaaggcgccgcaacaacaacagcctggcggaatgccacccaacaaaccgccgacgccaaagacgccacagggtccgggcggtgggatgcccccaggaatgggtggaccgggaacaccgacgggactgccgccaggtgcctatcctggcagccatatgccgggatatccacaagggccgcctcatgggtcaccctttgcgccacaagatggtcagcctcacggcttgaagcccacatcgcacatggacgccctgcgagcgcatgcacactcagccaactcggcgggtatgggcggtggacaccatccgacggagccattgcccattgatattgaaccggatccagagccagagattcccagtccaacgcacaatataccacgtggtcccagtcccgaagcaaaaccggacgacaccgaatgccatcgctctcagtctgccatatttgtgcgccacatcgatcgtggggattacaattcgtgcacgagaacagatttgatcttcaagccggtggccgactcaaagttggcccgcaagcgtgaagaacgcgaccgcaagctggccgaaaaggagcgtgagcggcgacagcagcagcaacaacaacagcagcagcaacaacagcaagcagcggccgcgcaacaggcggcacagcaagccaagatgaaggctgagctgaagccaccgtatgcggatacgccggcactgcgtcaactgtccgagtacgctcgtccccacgtcgccttcagtcctgttgaacagatggtgccatatcatcatccaatgggccccatgtacagagagagggaactggaggagattaaaaacgcacaagctgctgcggcgagtcaatcccgactagatccgcactggatggaatactatcgacgcggcatccacccctcgcagttcccgctgtatgcgaatccggcgatatcgcagatggagagggagcgtctgggaattccacctccgcaccatgtggggttggacccgggcgagcacatggtgcgtatgccgcaaccaccggaggccggtttccaactgccaccgaatgttggccagtatccgcggccaaatatgcttatacctagggagccgcactcggatgtcctgctgcgcatgtcctatgccgaccaactacaggccgccgagtttcagcgacagtccctgcatgatcagtactttagacaacggcccagataagtggacagacagcaattgtagagagcaagcaactgaacaaagacaatactcgggccgcggccgtgaggaactgctttgtgtgatttttgtgttcaagcgtttacattttgttttccacacgcacaaccacccaacatactcacaaaacaaacatcaaaacatcaacatcatctgcagagacgacgtcagcgtatggctcaagaatccagaaaccagaaaaccaagcgactttaagttgcgcaacgccttgtcacgtttttatgtaaaaagaatcagctgcgttaatcgggagtggttcgtcgattgttccggctgcatacagcacacttcacaccagacactcactgaccaaggcatccagaatcaaaaagcagaaaccaactacaaaactaaactaaacaaaacaggacacgatggtcgcaatatcttaagtatcctcttcatagtgtatagtgttaaattcttaaacgtaagcgagatatggagcatgttaaatacggtttagacttattaaggcaatggaacaaaatcgaacttggcacacaaatttttatggaggttttcaaacagcttatatattatatgtatatgaatgtgctacacttcgacaaaaactatctagtaagcttcacaaatcaattgatttagacacgatgataactaagcaaaaccaaaacacaaactcaccagcacttgctgcaggaggcaaggtacataaattagtatagacaaacgattaaggatagacgaatcgagcgctcatatatatattcgagagtattgtacaaatggattcggagatagttttctttttacaacacagtttggcactctgcgcattagagatacgcctaatattatttaaatgtatttacttccagccacaattgaactatataaggtttatatatgcttgctgctttcgactttttagctaaaataaaatggtaaacgaatcacgccaatgcct

SEQ ID NO: 15249 - protein, 1963 aa, DROSOPHILA
MAASTQGEIRVGPGHQETDERELEESRWSPGVVADGDLLMFLRAARSMAAFQGMCDGGLEDGCLAASRDDTTINALDVLHDSGYDPGKALQALVKCPVSKGIDKKWTEDETKKFIKGLRQFGKNFFRIHKDLLPHKDTPELVEFYYLWKKTPGANNNRPHRRRRQSALRRNRVTRANNSNSNTPPKKEDTPEPQTATTATAAATAASETASRSSPAVSKEENSSLTEDDASECDSDSSLTHKRDESPSRMRTRNKQQNNNSSTSSGNNTAGNGGGNATSISSGSTGGGAAGGNSSSKDQSANAVANGKRPKRGSETPDVSGGASVDSPKTPTKAVAESSANKRKGGKQDTPNKKKRTEQESNEPSAHEENAIKEKRKRPDSPVESMNSDSRPDSVLDDGESNTTDTTTAEQQSTKDSKETVSCKEEREMVTNDLEAKAEEKAIKAEALAEDSKDSAIKNMDEETNIQAPSSADTSLVDGPNPNALPSPVAAPITMKVPTIATVEALNASVDRKEAIEKMESCDSDPEMLKKLATIKQEVSPQQQQHMQQQSQQQMQQQLAPVGIPQPPSCPPSESVYIKKEPMEDSMDATCNQNSNEPQDLKVKIEIKNEDALKHSAGGLPPSGPCAPPSALHPLSGAPVESGQEPLHLQHMPHGQVTTQPPPGYLIDGQLKYGPSGQGVPPQPPQLHSDAAGGVSGAPPGAPTTPQKYPPEMEMKFAPQDLKYPPPPPLDALKYSQEMQAAAAAAAAAGKYDMKYMMEQQGKYNVELSAAHQPPSKPGYQDSLKIPDIKPGFGHLPHNVGSPLDAAHKYGPPPTSQESQQQQPQPPAHQVPPGATPPPGIAMPKPHYQHDVQTPPLGRPFEPTGLMLKYGDPLAAKYGPPQDLKYPMPPVSQAGPADVKPYGGENLIKSSPYGPPPESPIDASARSTPGQDSQGSNSNSQPPSMPPQPQQFQSPHPSPHMPSPAGGGLPPGMHPQNLIHGPPPGAAGGSGPQPPPPPTSLHQPTPTSAGPPSLQHGLHPGHQHSQLSVASSIPPSSIGIPPTLSTMAPSHMHPHLHPHAHLQGLHRPHDLPPSMHPHAPMPLSLQGHPQHGHGLPPSHTSQQQQQQQQQQQPGGPAGTVRTPSPAQQPPRSMHDPQSSREPPTSQPSTTMAGSSGPGGPPPQQSPHAHRTSPLPGLAGSGPPPPGLIGHPMAIHPHLAHLPPGHPAHAALAHPGHHLLSHSIAGLGPGGGPIALLAGPGGLGGIPESALSRRTPPSHLPHSHASSAPLTAHSVASMTSTSMSLTTSTVPSSAFSRASPSVQISSSGGGPSGPGSVGPGGMPNSSAAAAAAAAAHRAASPASSVSSLSRQSPLHPVPQSPLSHHPSSSALSAAAAAVAERDRHALMRQQSPHMTPPPVSNASLMASPLSKMYAPQPGQRGLGTSPPPHLRPGASPPVIRHPQMPLPLPLIAPGGGIPQIGVHPGQSPYPHPLLHPSVFYSPHHHPFNSPYGYAPYGPGFPAYMKPPPQPGQLDPAAVMAAHHAGLQGPPPQQMRQDEQNAAAAAAQAAAEKQHQAAAAAAAQQHKAPQQQQPGGMPPNKPPTPKTPQGPGGGMPPGMGGPGTPTGLPPGAYPGSHMPGYPQGPPHGSPFAPQDGQPHGLKPTSHMDALRAHAHSANSAGMGGGHHPTEPLPIDIEPDPEPEIPSPTHNIPRGPSPEAKPDDTECHRSQSAIFVRHIDRGDYNSCTRTDLIFKPVADSKLARKREERDRKLAEKERERRQQQQQQQQQQQQQAAAAQQAAQQAKMKAELKPPYADTPALRQLSEYARPHVAFSPVEQMVPYHHPMGPMYRERELEEIKNAQAAAASQSRLDPHWMEYYRRGIHPSQFPLYANPAISQMERERLGIPPPHHVGLDPGEHMVRMPQPPEAGFQLPPNVGQYPRPNMLIPREPHSDVLLRMSYADQLQAAEFQRQSLHDQYFRQRPR

SEQ ID NO: 15250 - DNA, 9140 bp, DROSOPHILA
tgattatccgactttcttattattattacccctttttgatgacgcaaagagcgtcgaaattttttccattgctcacgtagaggcagtagtaaaatatttgaattacatctatgaaattatacaagctcaaatacaatatctcaaatattgtaaaacaatcactagattaaaaatggaaaaatcactgccaccttataagatatccaatcaatcgatacgttcgcattgtttattattgcaaatttaacaatgttgaaaagtctgctttatttatttaagcatttttcgtcacgcccgtttcgtacatctgccgtgaaaccatcgatcaaaacaaaaactttttagatttctgaatggttttccaagctttcgctcgccgcttttcctgccagttgccactggcgattttccccacttctattcgcatctgggcctttgtaaaagcaatgcaaaaacagtgtacaaatgacaaaacaggcaaaaacattagctatttttaatccgattataacgaaaagtgtttattatatttaaaaaaaaaaaagaaagcaacaaagattccattgctaaaggtagtagggtggcgaaaaagagtgaccgtatcgggaagtcgtaggtgagatttgaatactttcgtatacccattactcgaattgaaaactcccgagcacttaaatcacacacgtgtagttcatttcatgagcacatcttaaattgataatcccatatcgtgcaattaagtttatgaaccatttcgaaataccaaagaatttggctttgattgccaaacgagcggatttggaaaacaatgctaagattcatattttgtttacacatcgctcggccagtttttcattttatttctggccattttttaatatcggcacagcgtgctaccctgccgcagcgtctagccaaaagaaatttcaataattttccacacaaagagcgccgaaagctcgacaagtcagtttagtttcaaaaaagtttgggtcaaaacaagaacgctcggtggctcggtcggtaaatcaaaaaaggaaaaatcaatagataatgaaaatcattaaaaagtgccaataatttgcaaaatatatgggcaaatactgaggtgttttgtgtgcattttccgatcgaatcgcagcgataaatcaaatttattcgaatacggcaaagccgtaaaccgaccacgacccagtgtagaaatgttaaaaataaatggcaatgcattttagaatacccgtgtttcctagacggggactcaagggcagtggcgtccacctctaattacgtctggcagtgggactcaattcaattcgaatcgaatcgagtcgagtcaaaaacttgcactgcatccgcgagataaccgaaaacctaaaaataattgccaaacaagatgcgacacaaatatttggccaacagccgcgggcatgtcaaaggccgccacccagatccgtgcgactgcagtgctcactgtgaattttgattaaaatttgattacgattctgagtgcgcgattccgattccgattccgattcctatttcgaatctgatcgtgattttgagtacgggacattgttcgtgtgcatcgcttgcttcatgtttaacaacagccactcgcaccaggatgagtacattcgcgaatacgccttcgagccggagctgctgatcaatcgcgaggactaccagcgcaaggaggagcgctcgcagaagtccacagccgcatcctccgcctccacgcctgtccgccagcgctgggatgaggtcattgccaagcagaaggagcagcaacgcaagcagagcatcgagatcgatccgcccggcgatgataagaaccagatcgagatcgagatcgaggcgttctactatgtgagtggcctacgagccacctgcccatttcatccgcgttggaccaacggccatcgtcaacccttttaagcactggaaaaaaataaccctgaagtagttccatcatatcgaaaataatccatgacacggttcccattccaaaagtgaagtggaaaataagcgaaagtaaccaagtgaacttaattggcgatgggaaaatcataaaaagctaaatttaaataaattaagattttattaaggcctagttgtctgcaaaaattgctaaaagagaatcttgatagcgcattaaatccgcacattattacacagtatttattcagttatttattttgttttcaacgtctgcagcgacgtacctcttgcattgaccctcatagcatacacccaaagaaaatcaccctgagtcttgcccttcaattcgcaaataaatcagattcggcggcggaattcataccatttcacttatgccgaaaataatcttgattttcactttctcagatattttcatgaaccaaataatgacgtatgtaaatgtatgtgccagactttttagacaaaaagttgcagctgtctcagagtttttaaaattcttagacgaaaaatacctatttactttaaaattacacttttaacgtgtaatccgttccgaaaaaatatatataaataaataaattgtgtgttaatcgcaactcttgaaaacactatgaatgaaaagaggacacaattatttcttatttgttgtattttacttcaatattttcgtttttcaagttcaattttttctctgagtgcaattgtctgtgcacttcctattctgtcatcagttctttttcgctagccatttgtctagaatgctcaaggcgattgtaattgtttgttttcaacgcaggtagcacagaaagcttctttgtttggttttgaaaatatgcattacacgttgttataattagaaaaacatacattatgacctttacaatattcataaaagctcaggacccgaataactagccatttctttccgcagatgtatggtcgctataccaaagatctaggagaatttgccaaggatgaagccagaaagctcaaaatactcgaaaagcgacgaaagcaggaagataagcaaaggaataaggtaaacttaaaatgaacgctgaactaataacttataatttacccgtgaaatacaatgttataaatgctcttgtgatttactaaaatgccaactaaatgagaaaacgaaatattcaaggtatgcgcacagctatttggctaagtagatttgaatgaattgtgtagagtcttcgagtagaccgtaatttcctttgatatccgaccgaacgtatcagtttataaagcagcagtgctgggaaatatttacaggaactgctgggcaaacattcgacccgggcgaagcgggtatcatcatggatctggaggcacacggtggcccgactgggcgaggattgggtattcctggccctactgggcatcattatggccctgctctcgttcatcatggacaagggcatatccatatgtacaaacggtaagtacggctattcgataatcgattttgcagctcgcctttagtatatatttttctttttccccatatgtatatctatttccccccagcgcgaatttggctgtatcgcgatctgacgtcacagccttttgttcagtacatcgcatgggtctcactgccggtctgtttgatattgttctcagccggctttgtccatctcatcgcaccgcaaagtataggtaagcgtccgcaatatcatacatctcacacatcatatcatattttctcatctaataacagtctcttccttagtataactaatgtgtagtagtgggatatttattgagtatgttttagaagtagcctgcttgagtgaatcatttaataatggccgtaaattgccgcactcttccattaaagctgccgtcggttttccaaaattgtagaaattgtatgaattttgtgcttacttactttacttctatggttgatgatgattagggccaggaaacgaatgaatctttgattattctttgtacaggatgaaataggcgctactcctacttcaaaacgtatctctcaatgaacttctaggcattttccgatcttacctttttttttattgcaccaataagtactcatagtaccactgcactctggcagctgcccacttccaaacactcttggcacctccaatctgagaacccattgtgtctatatgttatatactcgaaccacaaaaaaaaaaaaaaaaacactcccagaaattctgctatcagcacacctcagaaactaaccacttaactatagatcttattgttacgtataatctaacaactaactaacaaccactgcgagtatgatcaatgcaaatctacataaccaaactgtgtctaggttctggtatacccgaaatgaagaccatactgcgcggcgttcaattgaaagagtatctcacatttaagacactagtggccaaggtaattggtttaacggcaactctgggcagcggtatgccattaggaaaggaagtaagtataagaattgatctcacactgcatgcacagcgctgcggcgaagcaagtgcaatttggaaaatctatatgtatacgaatttcgttttcgtttccgtttccgctttcgtatctccgcacttacccagggtcctttcgtacatatagcaagtattgtagcacaattattaagtaaacttgtcacatcattccaaggcatatatgagaatgagtcgcgaaactctgaaatgttggcggcagcctgtgctgtcggtgtgggcgcctgttttgccgctccagtcggtggtaagtacatacgagagtataccttaccattctcgagtttcttgacctcggaccccactcctctcgcaggtgtgctcttcagcatagaggtcaccaccacgtacttcgctgtgcgtaactactggcgcggattctttgcggctgtgtgcggcgccactgtctttcggctcctggccgtttggttccaaaacgcggacaccgtccgcgccctgttcctcacgaacttcaccaccgagtttcccttcgatcctcaggagctgttcgtctttgctttgattgggtacgtgggtgatctgttcagttatatagtataactaatgtttcctttttagacttgtgtgcggcttgggtggcgcatcatatgtgtgggtccatcggcgatatgtcctcttcatgagatccaacaagcggatgaacaagttcctgcagaaaaagtaagtttccaagctctcaaaatgtatcaatactttaattcacatatgtatctatctttcagtcgctttttgtatccgggattcctggctctgctggtgtccagcatctcgtttccactgggcacgggtcagttcctggccggcgaactaagtacccacgagcaggtgacacagctttttagcaatttcacgtggtcacgagatgatcttactgtggagcaggcggctgtagtgacccactggatgaccagttacaccagcgtctttggcaaccttgtcatctacaccctctttacggtataggattgcagttgaattcctttgcagatgctgatcttcctttttgcagtttgtggtctccattatcgcatccacgataccagttccgtcgggcatgttcattccggttttcaagatcggtgctggctttggtcgtctggtgggcgagttcatggcggtgacatttccccacggcgtccggtatggcggtcgtctctcgcccatcatgcccggaggctatgccgtcgtcggagcggccgccttttctggctccgtgacccacacggtgtctgtggcggtgatcattttcgagatgactggtcagattacgcacgtggtacccgtcatgattgctgtgctggtggccaatgccgtggcggcgctgctccaaccgtcgatatacgacagtattatattgattaagaagctgccctacctgccggatctgctgccctccagttccgggatgtacagcatattcgtcgaggactttatggtgcgggatgtaaagtacatatggcacggcatctcgtatcagaagctcaaagaagtcctcaagctgaacaagacgctgagatccttgccactggtggacagcccggacaacatgatcctgctgggttccgtgcagcggtacgagctgatcaaaatgatcgagaagcacattggacgcgagaagcgaatggaggtggcccagaagtggcagaaggaggctcaggaaagagccctcgaggaggagaagaagaaacaggaagtggagctcaagatgcggcgaccatctcgattcgaggtccttccagctccggatattctcagtttacgccagattgccaacgacgaaatgctgccgcccaagaaaagggcggagacaatgcacggttcgctggcgcccaggaagtccattttgaagaagaccaactccttcaacctgaagacctacgcgcagcccatggggcacagtcccagcatcacgccctacaccacgatcaccggcaattccgagttccgcattcgctcagccttcgaggccatatttaagaagtccaccacgctccaggacgtacagccggatccggaaacgggttccctctccccggcggcaagcaaccacgaggtggaggtgccgcgaactcctagcactcccggtgtttccaaaaaggttcagctggtaggtgcatattttctatttaccgcataaaaattgggttttgggttatctaagttgctgagtaaaccggaagaggaaatctctcttttcaagcctgcacaaagtaattgggattttgtaacagatcaaattatgctggtaagttactcactaacaacattcatatcatatcatttcattcattttctcggaatatgtgtgtttaacttactttaatatctgcaagcaagtaaaccctatttcaacggaatcaaataaaatggtaagccttaaaacgaagtaaaattataaaataagggtagtatccacgcatgaagtagtactatgggcctttttgaagtagaagaaatacttaataatttcagtggaagattgaagtagagtattgccagtttaaaatatctatctatacataattttgtaatctcaagattaatgtttaaaaagcctgccgagaaagatttcacggataaagcattatcaaataatggagatagttcaaagcaatcaccgagcattaaattcaaagcaaataaagtggcagatgtaaatagatctcctcagacggccaagaggtgctcgaaaataaggtttgctaacgaagttggagtaaatggttcgcccactcgaacgaaatgtaaaataaaaccagaaaatgtattgggttactctatagaggatgtggatgaaacaacaaatccagaatcgctggctgaggtatgtaaaactgatgcaaacttttgattaatatctattgtcaacgagcttacaacgcattatgaatcattaactctcaaagttaacatacacattttctctcctatcttgtaaatcccaaataagagcattcaaaagccgaagtcggtgcgattggtacgtttagaatattttaattacataaccccttatttcaatcaagatataatatctaccgatttgattgatttacagcccagggaacgtgttattgacatgtcaccggaggatcagaagcaatgggagctcgaggaaatgttgaagcccatcgatttgcagaaggccaatgtccacatcgatccctcgccatttcagctggtggaacgcacctccatactcaaggttcactcgttgttttccatggtgggtattaaccacgcctatgtcaccaaaatcggaagacttgttggtgtcgtgggactcaaagaagtaagtcttgtttgatatccttgatgattataacaataacacatgttttattaaacagttgcgaaaagccatcgaggacattaatagcaatagtttcgtgccccccacacgggatgaggatgcggatgagaagccggcggtggagaaacctctgctgtcgacgaactctagtgataaggccgtggacatgaccgtcacctccatggactcggcactatccaattccgagaactgttcggacattgaaatggagcacataaagcacacggataagggcactgtatcgctcaccatgccgccacaggaatctaagcaaagtccatcggcggacaaaagtaacacagaaaacggaaatcatgcttgaaacaagatgatcggccatcataatagttaatacgatacgtatacgtaatatgtttgtaaagatcagctaaacacatctatcttaagttacgtcttacacgagttagtcatcaatgttattatgtatttatatctcgttagttcataatgtgaaaaatatcgtgatttatatttaagttgaaaagaaaatcaagtcaccaacgaaggctgcgtttgatttttatttatatactggggagtattaatgtagtatacaagtttcctatttttccaacagattaattatattataatttccccaaaattgtttaatgaatatttaaggctaagtggaaattaattttgccattttccaattgatcttttaagttcgcgccgattaatttgtagcgcagtccgaaactatcgatacattcaaagcgccaatcaaatatcgacacattcaatcagctgatgcagaaagtgttggataattcgtgaaaattattgtgtattgcatctatctttttctatgcgaacttaaaaataattattatagccccgaattctttgagatttgctggcagttagcggggatttcggctgcagccggctgcgaggtgtgtgcgcggatatatatatatagattggccagtccgattcccggcgaacgatcccactttgcgtggcggggtgtggttaaagaaaaaagagtgaagaccaagactcgtaaagcctgaaaaacgcctccgggcgctatagacaatacaataacaattcggcccctcgatctccgtggagctaatcatttatgccgagcgcagagacggagcctaattagcatatcaaattggatgacggcactggcgaatagaatccatctgccgctgtcccctgctacaagaacgcaacagaacaaaaacaaaaaaaaaatcaaaataaaacatcttcaactctttgttctcctagatttggctagtaaagagccgtaggatcctagacgactggccggctatgtggtg

SEQ ID NO: 15251 - DNA, 3659 bp, DROSOPHILA
aagaacgctcggtggctcggtcggtaaatcaaaaaaggaaaaatcaatagataatgaaaatcattaaaaagtgccaataatttgcaaaatatatgggcaaatactgaggtgttttgtgtgcattttccgatcgaatcgcagcgataaatcaaatttattcgaatacggcaaagccgtaaaccgaccacgacccagtgtagaaatgttaaaaataaatggcaatgcattttagaatacccgtgtttcctagacggggactcaagggcagtggcgtccacctctaattacgtctggcagtgggactcaattcaattcgaatcgaatcgagtcgagtcaaaaacttgcactgcatccgcgagataaccgaaaacctaaaaataattgccaaacaagatgcgacacaaatatttggccaacagccgcgggcatgtcaaaggccgccacccagatccgtgcgactgcagtgctcactgtgaattttgattaaaatttgattacgattctgagtgcgcgattccgattccgattccgattcctatttcgaatctgatcgtgattttgagtacgggacattgttcgtgtgcatcgcttgcttcatgtttaacaacagccactcgcaccaggatgagtacattcgcgaatacgccttcgagccggagctgctgatcaatcgcgaggactaccagcgcaaggaggagcgctcgcagaagtccacagccgcatcctccgcctccacgcctgtccgccagcgctgggatgaggtcattgccaagcagaaggagcagcaacgcaagcagagcatcgagatcgatccgcccggcgatgataagaaccagatcgagatcgagatcgaggcgttctactatatgtatggtcgctataccaaagatctaggagaatttgccaaggatgaagccagaaagctcaaaatactcgaaaagcgacgaaagcaggaagataagcaaaggaataaggaactgctgggcaaacattcgacccgggcgaagcgggtatcatcatggatctggaggcacacggtggcccgactgggcgaggattgggtattcctggccctactgggcatcattatggccctgctctcgttcatcatggacaagggcatatccatatgtacaaacgcgcgaatttggctgtatcgcgatctgacgtcacagccttttgttcagtacatcgcatgggtctcactgccggtctgtttgatattgttctcagccggctttgtccatctcatcgcaccgcaaagtataggttctggtatacccgaaatgaagaccatactgcgcggcgttcaattgaaagagtatctcacatttaagacactagtggccaaggtaattggtttaacggcaactctgggcagcggcatatatgagaatgagtcgcgaaactctgaaatgttggcggcagcctgtgctgtcggtgtgggcgcctgttttgccgctccagtcggtggtgtgctcttcagcatagaggtcaccaccacgtacttcgctgtgcgtaactactggcgcggattctttgcggctgtgtgcggcgccactgtctttcggctcctggccgtttggttccaaaacgcggacaccgtccgcgccctgttcctcacgaacttcaccaccgagtttcccttcgatcctcaggagctgttcgtctttgctttgattggacttgtgtgcggcttgggtggcgcatcatatgtgtgggtccatcggcgatatgtcctcttcatgagatccaacaagcggatgaacaagttcctgcagaaaaatcgctttttgtatccgggattcctggctctgctggtgtccagcatctcgtttccactgggcacgggtcagttcctggccggcgaactaagtacccacgagcaggtgacacagctttttagcaatttcacgtggtcacgagatgatcttactgtggagcaggcggctgtagtgacccactggatgaccagttacaccagcgtctttggcaaccttgtcatctacaccctctttacgtttgtggtctccattatcgcatccacgataccagttccgtcgggcatgttcattccggttttcaagatcggtgctggctttggtcgtctggtgggcgagttcatggcggtgacatttccccacggcgtccggtatggcggtcgtctctcgcccatcatgcccggaggctatgccgtcgtcggagcggccgccttttctggctccgtgacccacacggtgtctgtggcggtgatcattttcgagatgactggtcagattacgcacgtggtacccgtcatgattgctgtgctggtggccaatgccgtggcggcgctgctccaaccgtcgatatacgacagtattatattgattaagaagctgccctacctgccggatctgctgccctccagttccgggatgtacagcatattcgtcgaggactttatggtgcgggatgtaaagtacatatggcacggcatctcgtatcagaagctcaaagaagtcctcaagctgaacaagacgctgagatccttgccactggtggacagcccggacaacatgatcctgctgggttccgtgcagcggtacgagctgatcaaaatgatcgagaagcacattggacgcgagaagcgaatggaggtggcccagaagtggcagaaggaggctcaggaaagagccctcgaggaggagaagaagaaacaggaagtggagctcaagatgcggcgaccatctcgattcgaggtccttccagctccggatattctcagtttacgccagattgccaacgacgaaatgctgccgcccaagaaaagggcggagacaatgcacggttcgctggcgcccaggaagtccattttgaagaagaccaactccttcaacctgaagacctacgcgcagcccatggggcacagtcccagcatcacgccctacaccacgatcaccggcaattccgagttccgcattcgctcagccttcgaggccatatttaagaagtccaccacgctccaggacgtacagccggatccggaaacgggttccctctccccggcggcaagcaaccacgaggtggaggtgccgcgaactcctagcactcccggtgtttccaaaaaggttcagctgcccagggaacgtgttattgacatgtcaccggaggatcagaagcaatgggagctcgaggaaatgttgaagcccatcgatttgcagaaggccaatgtccacatcgatccctcgccatttcagctggtggaacgcacctccatactcaaggttcactcgttgttttccatggtgggtattaaccacgcctatgtcaccaaaatcggaagacttgttggtgtcgtgggactcaaagaattgcgaaaagccatcgaggacattaatagcaatagtttcgtgccccccacacgggatgaggatgcggatgagaagccggcggtggagaaacctctgctgtcgacgaactctagtgataaggccgtggacatgaccgtcacctccatggactcggcactatccaattccgagaactgttcggacattgaaatggagcacataaagcacacggataagggcactgtatcgctcaccatgccgccacaggaatctaagcaaagtccatcggcggacaaaagtaacacagaaaacggaaatcatgcttga

SEQ ID NO: 15252 - protein, 1020 aa, DROSOPHILA
MFNNSHSHQDEYIREYAFEPELLINREDYQRKEERSQKSTAASSASTPVRQRWDEVIAKQKEQQRKQSIEIDPPGDDKNQIEIEIEAFYYMYGRYTKDLGEFAKDEARKLKILEKRRKQEDKQRNKELLGKHSTRAKRVSSWIWRHTVARLGEDWVFLALLGIIMALLSFIMDKGISICTNARIWLYRDLTSQPFVQYIAWVSLPVCLILFSAGFVHLIAPQSIGSGIPEMKTILRGVQLKEYLTFKTLVAKVIGLTATLGSGIYENESRNSEMLAAACAVGVGACFAAPVGGVLFSIEVTTTYFAVRNYWRGFFAAVCGATVFRLLAVWFQNADTVRALFLTNFTTEFPFDPQELFVFALIGLVCGLGGASYVWVHRRYVLFMRSNKRMNKFLQKNRFLYPGFLALLVSSISFPLGTGQFLAGELSTHEQVTQLFSNFTWSRDDLTVEQAAVVTHWMTSYTSVFGNLVIYTLFTFVVSIIASTIPVPSGMFIPVFKIGAGFGRLVGEFMAVTFPHGVRYGGRLSPIMPGGYAVVGAAAFSGSVTHTVSVAVIIFEMTGQITHVVPVMIAVLVANAVAALLQPSIYDSIILIKKLPYLPDLLPSSSGMYSIFVEDFMVRDVKYIWHGISYQKLKEVLKLNKTLRSLPLVDSPDNMILLGSVQRYELIKMIEKHIGREKRMEVAQKWQKEAQERALEEEKKKQEVELKMRRPSRFEVLPAPDILSLRQIANDEMLPPKKRAETMHGSLAPRKSILKKTNSFNLKTYAQPMGHSPSITPYTTITGNSEFRIRSAFEAIFKKSTTLQDVQPDPETGSLSPAASNHEVEVPRTPSTPGVSKKVQLPRERVIDMSPEDQKQWELEEMLKPIDLQKANVHIDPSPFQLVERTSILKVHSLFSMVGINHAYVTKIGRLVGVVGLKELRKAIEDINSNSFVPPTRDEDADEKPAVEKPLLSTNSSDKAVDMTVTSMDSALSNSENCSDIEMEHIKHTDKGTVSLTMPPQESKQSPSADKSNTENGNHA

SEQ ID NO: 15253 - DNA, 6431 bp, DROSOPHILA
agataaatatatcaattatagcgtacctgcaaataaaaggtatggtattttcatcctcgaagagctttacaatatttcgagctgcctgcggttgtatgctctccgtttcggccaggagctcgtcgatgttccacacctttcgtcgctcccagaaggaactgcgtccagtggaagacttgttgtgtgaggagctggctacgatatcgtttggttgtgtcactgctgttgagggcacaacgtcccccttctcaggattagtctcattggctgccgttttcaagtcctccttatcctttctggcgcgttttctcttaggagccggagcttcggaattgtgttcagtgcctacggctccattccgttggtttgaagttgaaggtgtgtcctggactaccgattccggattgttctcattgggacaagcattctcgtccgccttttctttgtcgccccgctttttcttgggagctggtccctcagcagctgtttttttggatgttgggaaccgctggcgtttggtcctggaaggatatcgggtaaatatattattctttacaggataataagggtatgacttacacgacggtctgcgcatctgcagcgcgatctattatgcgactcttggtttcttccggcctgtaatcgtcgtctgccgtaagattcacttcctcatctgagtcggagatttcaattactatcttttttgtggatgccgcgcgtcgaggtcgtttcgacatgttgcaatctattcttaagattatgtttaataagcacaatattgcaattaatttacaatttattttatattcttaaaaaaggtaattaacaaatgaacttaacaatttctctttttgtgacctctttgatcacgaagtcgtaaatattcgattgcgagagacagctgttagcgccacttatcgataactataaaaaataaacagctgataaaagtggttaaatttggcagtttggttccatttttattcatttattaatgaaaatgctgaaatatgcatggcaaagcggtccaaaacaaagcaacaggtggctatggcatctttccaatcaaatctggaagcgtagctatagcagcaagatcaggaacataggcattctggcgcatatcgatgcaggtgagtaggagcactgcaaatttaaatactacttaacattactttgtcaatgaatctgtttcaggcaaaacaacgacaacggaacgcatgctgttctatgcgggcaagaccagagctttgggtgaagtgcatcgcggcaacacggtcactgattacctaacccaggagcgcgaacggggcataacgatctgcagctcggcagtaacattttcgtggaatgatcaccggtaggagtttcgtttgctacttcgcttacccgtaactcctgacaccatttaatccagcatcaacctattggacacacccggacacattgactttaccatggaggttgagcaatctctgtatgccgtggatggtgtggtcgttgttctggatggcacagctggcgtggaggcccaaacggtcaccgtgtggtcgcaggcggacaagcacaaattgccacgtctcatattcgtcaacaagatggatcgtcctgatgcggactttgaaaagtgcgttagcgatctgaaggataagctagaaacgcagcccgtttgcctacagtaccccgtgaaaaacgaagatggggttttaggtaagctctgtctacactcttttgaaagcttatctaagctccgccaattttagccatcaatgacgtgatcaccctggagcgactaagctggcagcaaaaggacttgggccgcagttacagaaatgtaaaactggagccctctgatgatttgcgcctgctgcaggaaaaacggaatgaactgattgatcaactgtcgggactagatgacgaattggccgatgtggttatcagcacagaaagctttgacaatgtggacaatgcattgatcgaaagagctcttcgacgggcaaccacccagcagaaggtagtgcccgtattgctgggctccgcctacaaaaatgtgggcatacagcgtttaatggacgctgtcaatgcttacctgcctgcccccgaggaacgaaaccaaatctacgactgctttgggtgagtacttattcgagaaaaagtaaatgtttcatattaagttgaagtggttaacagaacagaagtggctggcaaggtgttcaaaattgtacacgataagcaacgtggtccattaaccctagttaggattttgagaggcgaaataaaacgaggcatgcgtctgatatccgctcgcggacaggctgaagttgtgtctaagctgtatgagccattggccgacgaataccgagaggtgagcgctgtgcagtcgggcgatgtggtaatatgtgcaggtctgaaggtaagctgcacccaatatagataattaaacaagattaaataccattttttagtccacggtgacaggagatttgctgacctcaagtcagtctgcgctgaagaatgcacaaaagcgatataaacaaagcctgggcaatactgcggccaaagtcgaggaagatgacgaattggatgagtcagacgagctgtttgctattgacccgcaaataccagatgccgtgtacttctgttcgatcgagcctcccagtgtatcctcgcaaacggccatggagcaggcacttaaacagctgcaacgggaggatcctagtctgcgtgtgagctacgattcagttactggacagacagtactcggtggcatgggcgagttgcacatggacatcatcaagtcgcgcatcctgagcgagtacaaaatcgacgttgaccttggtcctctacaaattgcgtacaaggagacaattgaagcacctgcgttaaccacgctaagtgtggaaaaggaaatagccggcagcaagcagagcgtcagtataacactggaggttgtcaagaatcaagccgagttgttcaggtgatttggaatactatgaaatttctacgaaatcaaacttaaatgtgtttttccacaaaagtttagataagtcaccagataacctgccaaatctcaacacattgcgtccacgaattcttcaagttctgcggaagggctccatcagcgctctagagcgaggacctcgcgttggtgggcaggttgtggagactcagattcgtctgcataacgcaactattggacgcggcactgctgattcttttgtcatggccactgcagctcagtgtgtgcaaaaggtaactaagatcgtattatttcttgcaactcgtttacattttgtatataaactcacagctactgagcacgagtggcaccaggctgttggaacccattatggcccttcaaattgtggcgcctagcgaacgtatttccggaattatggcggatctttcacggcgacgagccctgattaacgatgtcttacccaaaggcgaaagaaataaggtaaccactggttaagtttataactttgaaagacattaaaaggtatttttttagatgattctggtgaatgctcctttggcagaactctccggctactcgagtgccctacgcacgataagttccggcacagccagcatgacgatgcaaccgtgtggcttctcttcaatgaattccgtggacgaatcgctggcggagcgcagagcacagggccttgaataattttagtcgactaagagaactgttaactaattgtagtctagtaggcagttaacaactggcccgactgacagacaaatatgtaaatttttacgtgcctagcaatagattattttgtgatccaatacatgtcggacccatacatattctgttgatcactttccgaaccgaccctcaaccctcatttttaaatagtgttgtaaattcgcatgatagattagttgtttttgtgttaagcactaggcgaattcatggcgttctccacacaaaaagagttctttcacgtacccttcaacaatgagacatacgaatttgagtgtgtcgatgcgtgtgttaaacttaagaggtatccatccacagttgacgacagatcatggtcagcaaacgaagatatgaagtcacagttcgtggctgacctggtggcctgcaactcaccgataaagaaggaccgtggtgccgagcctaccgctagatctgctccattgggtcctgaggatgagtacggcagtaatttagtggtgggcgacagtttaataaatgccgcggacgacacaattggtcgcatgcaggatctgatgatcaagaataatattctaaagaagaaactggccgattctgatgataaattgaggacagccaaccaggagaccgccgagatcaagcggattatggaccagcgctatgaccccgacaagagcaaggctctaaaaaagaaaatcaagcaactggccgatgacaacaagataactccgcaggacgagaaggaactgaacggtctgcaggcggccattgacgacatgaacaaggcacacgacatcctggaggctgaaaatgccaatctaaagcggctgctcgaaaaacaatcgaagcgctgcaagatggatagcattaaagtcgatccggaaaagagcaacgatataccctacctgcagaagaagatcgacgacttgggtaaggaggtggcgctactgcgtgagttcgaggacgaagtcatgaagcgttgcgccaaaaagtgcggtgctgaaggtggtggtggtggtggaggtggcaatgctggtcgtgccgctaggggtcctcctggaaagggcagtttctcgccggacaaggatgccgagaacatcaaaaagattctagccgatcgtgatgcgctgcgaaagaagtgtaaggaactggaggagctcggcgacaaagtcaatcaactggaggagaaggccaatgaggcggagtgtctgacatgcaacctggaggaaaatctacggaaacagtgccgatgcatggagcaaatgcagtgtgaaatgcgagatatgcagaactactacgaaaacgaggtagacaaggctaggggcaatgaggaaatccttaaggtacgttattcagcacctatatgctgagtaagtgttagtaatgtggactccttaccttctcccatcccagtgccgttgtaatcagatgaagcaggaactggtggcagccaaatgtgccgtccagcgggcccagtgtcaacaaatggagatcgatgtgctgcgaaacgagctgcgaaaacgggacactgccctcaacgcatacgattgccagttccagcagattatggtaattattgtcgcggagctgcgggaatattctatttaaatatttgacttccagatgaaggccaagatgttcaaggccgccggttaccgcttccttgacgacttgcctcccgactgcagcgaaagttgcgtggatggccctggtgaagaggaagagggaaattgaagcacccagaaggcatatctcatctattgttcagattttttcaaaattcaagcagctatctatcaaaatctatagttttataaaattaaaccattacttcaagcgtattttcaaattcgtttactaattttctattaaactattaatagtgttatctactaccccttgtttcaatataggaaagtaacgaactattctttttcaaaattcaaaacatatagctaatcggttttgggttgtttacctacccaaacttatcgaatgtgttatcggtgtaatcacgtttgccagctggtcgcgttagtgtgtttccgttgattcttccaaagtttgttattgcggagtttcctatttatataatagaaataaaatacaatggagaagctagcgtcggccaaaacgtgtcttaaactgctgcaggtgcatggacagataggtggcccaccgaagacagttcaattaacattgccttcattgtatatcccaggttatgcccggcgtgcagcaggcggcccttcttcctggtggtggcctgggcgtgctcgcttctcctcttcagaatctgatccagatgcagcaggtgcgccaccgacaaaccaagcactggaagcccgagttcaagcgccttcgtaagctcaagttcgtaaagatggatctgcccaatctgcgcgagaaacaggaggatatcaccaaggaggagatgcgcagccggatgaaggagcgaggtgtcttgccgccccgtccctggatggagcgccctttccacataagctgcacgggcggcatcttcgaggcttatgtccctcctgaaggcgacggcaagaagtcgatcatttcaacatcgggtgccaagcagaagttggagttcctggagaagaagtccaagagcctgatggccgtgcgcaagattcgttcctacgacgaaaacttcagctccgatgatttcggcgccgaggcccaggatatttacatccaggcgcacactcacatggctgccaag

SEQ ID NO: 15254 - DNA, 3282 bp, DROSOPHILA
atgctgaaatatgcatggcaaagcggtccaaaacaaagcaacaggtggctatggcatctttccaatcaaatctggaagcgtagctatagcagcaagatcaggaacataggcattctggcgcatatcgatgcaggcaaaacaacgacaacggaacgcatgctgttctatgcgggcaagaccagagctttgggtgaagtgcatcgcggcaacacggtcactgattacctaacccaggagcgcgaacggggcataacgatctgcagctcggcagtaacattttcgtggaatgatcaccgcatcaacctattggacacacccggacacattgactttaccatggaggttgagcaatctctgtatgccgtggatggtgtggtcgttgttctggatggcacagctggcgtggaggcccaaacggtcaccgtgtggtcgcaggcggacaagcacaaattgccacgtctcatattcgtcaacaagatggatcgtcctgatgcggactttgaaaagtgcgttagcgatctgaaggataagctagaaacgcagcccgtttgcctacagtaccccgtgaaaaacgaagatggggttttagccatcaatgacgtgatcaccctggagcgactaagctggcagcaaaaggacttgggccgcagttacagaaatgtaaaactggagccctctgatgatttgcgcctgctgcaggaaaaacggaatgaactgattgatcaactgtcgggactagatgacgaattggccgatgtggttatcagcacagaaagctttgacaatgtggacaatgcattgatcgaaagagctcttcgacgggcaaccacccagcagaaggtagtgcccgtattgctgggctccgcctacaaaaatgtgggcatacagcgtttaatggacgctgtcaatgcttacctgcctgcccccgaggaacgaaaccaaatctacgactgctttggaggcgaaataaaacgaggcatgcgtctgatatccgctcgcggacaggctgaagttgtgtctaagctgtatgagccattggccgacgaataccgagaggtgagcgctgtgcagtcgggcgatgtggtaatatgtgcaggtctgaagtccacggtgacaggagatttgctgacctcaatcgaggaagatgacgaattggatgagtcagacgagctgtttgctattgacccgcaaataccagatgccgtgtacttctgttcgatcgagcctcccagtgtatcctcgcaaacggccatggagcaggcacttaaacagctgcaacgggaggatcctagtctgcgtgtgagctacgattcagttactggacagacagtactcggtggcatgggcgagttgcacatggacatcatcaagtcgcgcatcctgagcgagtacaaaatcgacgttgaccttggtcctctacaaattgcgtacaaggagacaattgaagcacctgcgttaaccacgctaagtgtggaaaaggaaatagccggcagcaagcagagcgtcagtataacactggaggttgtcaagaatcaagccgagttgttcagtttagataagtcaccagataacctgccaaatctcaacacattgcgtccacgaattcttcaagttctgcggaagggctccatcagcgctctagagcgaggacctcgcgttggtgggcaggttgtggagactcagattcgtctgcataacgcaactattggacgcggcactgctgattcttttgtcatggccactgcagctcagtgtgtgcaaaagctactgagcacgagtggcaccaggctgttggaacccattatggcccttcaaattgtggcgcctagcgaacgtatttccggaattatggcggatctttcacggcgacgagccctgattaacgatgtcttacccaaaggcgaaagaaataagatgattctggtgaatgctcctttggcagaactctccggctactcgagtgccctacgcacgataagttccggcacagccagcatgacgatgcaaccgtttgacgacagatcatggtcagcaaacgaagatatgaagtcacagttcgtggctgacctggtggcctgcaactcaccgataaagaaggaccgtggtgccgagcctaccgctagatctgctccattgggtcctgaggatgagtacggcagtaatttagtggtgggcgacagtttaataaatgccgcggacgacacaattggtcgcatgcaggatctgatgatcaagaataatattctaaagaagaaactggccgattctgatgataaattgaggacagccaaccaggagaccgccgagatcaagcggattatggaccagcgctatgaccccgacaagagcaaggctctaaaaaagaaaatcaagcaactggccgatgacaacaagataactccgcaggacgagaaggaactgaacggtctgcaggcggccattgacgacatgaacaaggcacacgacatcctggaggctgaaaatgccaatctaaagcggctgctcgaaaaacaatcgaagcgctgcaagatggatagcattaaagtcgatccggaaaagagcaacgatataccctacctgcagaagaagatcgacgacttgggtaaggaggtggcgctactgcgtgagttcgaggacgaagtcatgaagcgttgcgccaaaaagtgcggtgctgaaggtggtggtggtggtggaggtggcaatgctggtcgtgccgctaggggtcctcctggaaagggcagtttctcgccggacaaggatgccgagaacatcaaaaagattctagccgatcgtgatgcgctgcgaaagaagtgtaaggaactggaggagctcggcgacaaagtcaatcaactggaggagaaggccaatgaggcggagtgtctgacatgcaacctggaggaaaatctacggaaacagtgccgatgcatggagcaaatgcagtgtgaaatgcgagatatgcagaactactacgaaaacgaggtagacaaggctaggggcaatgaggaaatccttaagtgccgttgtaatcagatgaagcaggaactggtggcagccaaatgtgccgtccagcgggcccagtgtcaacaaatggagatcgatgtgctgcgaaacgagctgcgaaaacgggacactgccctcaacgcatacgattgccagttccagcagattatgatgaaggccaagatgttcaaggccgccggttaccgcttccttgacgacttgcctcccgactgcagcgaaagttgcgtggatggccctggtgaagaggaagagggaaattga

SEQ ID NO: 15255 - protein, 1093 aa, DROSOPHILA
MLKYAWQSGPKQSNRWLWHLSNQIWKRSYSSKIRNIGILAHIDAGKTTTTERMLFYAGKTRALGEVHRGNTVTDYLTQERERGITICSSAVTFSWNDHRINLLDTPGHIDFTMEVEQSLYAVDGVVVVLDGTAGVEAQTVTVWSQADKHKLPRLIFVNKMDRPDADFEKCVSDLKDKLETQPVCLQYPVKNEDGVLAINDVITLERLSWQQKDLGRSYRNVKLEPSDDLRLLQEKRNELIDQLSGLDDELADVVISTESFDNVDNALIERALRRATTQQKVVPVLLGSAYKNVGIQRLMDAVNAYLPAPEERNQIYDCFGGEIKRGMRLISARGQAEVVSKLYEPLADEYREVSAVQSGDVVICAGLKSTVTGDLLTSIEEDDELDESDELFAIDPQIPDAVYFCSIEPPSVSSQTAMEQALKQLQREDPSLRVSYDSVTGQTVLGGMGELHMDIIKSRILSEYKIDVDLGPLQIAYKETIEAPALTTLSVEKEIAGSKQSVSITLEVVKNQAELFSLDKSPDNLPNLNTLRPRILQVLRKGSISALERGPRVGGQVVETQIRLHNATIGRGTADSFVMATAAQCVQKLLSTSGTRLLEPIMALQIVAPSERISGIMADLSRRRALINDVLPKGERNKMILVNAPLAELSGYSSALRTISSGTASMTMQPFDDRSWSANEDMKSQFVADLVACNSPIKKDRGAEPTARSAPLGPEDEYGSNLVVGDSLINAADDTIGRMQDLMIKNNILKKKLADSDDKLRTANQETAEIKRIMDQRYDPDKSKALKKKIKQLADDNKITPQDEKELNGLQAAIDDMNKAHDILEAENANLKRLLEKQSKRCKMDSIKVDPEKSNDIPYLQKKIDDLGKEVALLREFEDEVMKRCAKKCGAEGGGGGGGGNAGRAARGPPGKGSFSPDKDAENIKKILADRDALRKKCKELEELGDKVNQLEEKANEAECLTCNLEENLRKQCRCMEQMQCEMRDMQNYYENEVDKARGNEEILKCRCNQMKQELVAAKCAVQRAQCQQMEIDVLRNELRKRDTALNAYDCQFQQIMMKAKMFKAAGYRFLDDLPPDCSESCVDGPGEEEEGN

SEQ ID NO: 15256 - DNA, 6128 bp, DROSOPHILA
gtaaccaacagggaaaacaaccttgtgctggtgtggtagccttactgcaatctccatttattagcaatccaacaacatgttcatccgcaccatacattggatagtaggtagctagtgtcgctgtaacgtgtatattgtgttctgtgtttttaaactagtgttctccgcttaggcatcgtacacggacttcagggccaattcgggcttgtcgtagcccagttcctcgatggttgggatgcccagctcctgcagtgtgggggtgatcttctccagcaagtagggatagagggtggccttttggtcgccgcacttgtccttgcatccctccagccacctgatggccagtgcaatgtcgttgacgcgacggctggcacgcagaccggcctcgatgatcttggggctgggcaccagatccatgcccagcagatcgttcatgcccttgcggatctcccagccatcgatgccctcacggctgaagtacttctcgtagcgcttgtcgaactcctccgccgattcctcggttccgtgcagacagcgcacggcggccacgcgcgacgatgtgccgacgaggctgctgcggagggcgcttgccaggttacgggccgtgatgctcaacatgctgccgttaaaaacagtaaaatgcttgttaattgcaaaaatttggttaagtaacagctcgactcacttttcttgttcttgctacttttcacacgggtatgacagatctgagtgatggttggcaacactggcttttccagggatggacacgtttataactgtcgctgtcacggaacagtgagatatttaaaatgtttctgcttcagtatatttcaaattcgggtaagatcacagttagtttatcattttccttatatttaatttcttctatcttgcccaaaaaaagcaaaaaaaaaatcaaaatcaaaccttgtttctttttcaacggtccacattgatgctggctactgccaggcggtattttttgatgatttaattgcggtcacactgcatcttcaacttgacgcgtgctatttgattaatctctctgaaaaataagtcaaattaaccgataaagtttaaaaaaaggcgatattggaagttgaaacagagcagaatacggttagttctctgttccgccaccaggtgtgacatttagaagcgtttatattgtgtacgagacttgcaaaatgtcataagcaattaggggtgacaagaaatcaaaatggcgtacgcggtgcaaaaaagaatcgcaccaaacaagcgtcgctgctgagtggagaatcactagctcaaaaaatcgcattttcagccagtaaaaaacaattaaaactagttaaccagtgactaatcgttgtaacaccatttgcaggtagagatctggtgaaaaatgtccaacgcagacgtgcaatttaactacggccagcagggaaatggcgacaacttcaacgacgacagcaaccagcagcaggatgaggatgaccagtacaacgaagatggcggcggcaagatcgaaaacgtcggcgagagccccaaattcgttcggttgcgcggcctgccctggtccgcaacgcacaaggagatactcgactttctggaaaacgtgaatgtgactaatggctcggcgggcattcacctggtcaccagtcgggtcgacggcaagaacaccggcgaggcgtacgtggaggtggccagccaggaggacgtcgaagaggctcgcaagctgaacaaggccagcatgggtcaccgctacattgaaggtttgtttatttgccacttgagtgggggatgactgtacctgatgactatcttggcagttatagttagtttcttctcactttgtttatatgtttatccttttaacaagcttgaacttgttctgattccatacatggaatcgaagatgatttatttcttcattgttttgctacttatactggtagcgcttattttcttttcattcattgtggaattttacctaatattaaggaggttttacaaatatgtcactgtattgttactcttatccttgcttctatcgaggtaaactaaaatttagtaaagtaaatttcacaccaccatttataatctgtattcatgttaattcttatcttaataacaaacacaaaatggtgcagaaaacttgtttgttttttttccgttttaactgatgtaattggtttttatttctttagtttttaccgccacgcccaaggaggccaaggaagccatgcggaagatcagcggacacggcacggccttcgttgtgaagcttcgtggtctgccatatgccgtcactgagcagcaaatcgaggagttcttctctggtaagtttcctgacccaaatcctctttccatactaatatgtaccaggtaccaggaaaaaagacagtggttgaccgcatgtattatttgttcacatcgttgagatatggcctacggtcccctttcatctacacctttcatatatcaattacacatgcgtttcaacgtacatacatattgtcgggcaaagaaatgcaggcccttgcatttgtgtaatgggttcggcggttcacgcggctccttccaaagtcaacggctgagagttgacgcggtcacgtccgcttgtccgataaatcattccttcgttggtcacataacccagtttacttggttatatggtcgatcattactcacaaccttcaactgagctacacatgtctacgagttacaggatctgagttttgtaatacattgtggtccgggaaactcgattgcaacagtcgcatcttgcctggtgatcatagtttgactaaaaggcactgtttatttatgcaaacgttgctaataccgtgagaacctgcaaaagttctgcggtgttggaactaaacaataacatttatcaacctctgtatttctgtttttctatctaagcttaaccttgcataatgtatatatatatatgaaatctatatatttgtataaatctttgttggttatcgtcatgggcagggttggatatcaaaacggatcgggagggcatactttttgttatggacagaaggggtcgtgcaactggggaagcttttgttcagttcgaaagccaggacgacactgagcaagccttgggccgaaatcgggaaaaaattgggcacaggtgggtttctaattcatcatatcttctacaacaaaaacagcgaaattaaaacattaagtggtaatcgattgcgaacttgttgaaacacacaaggactatacaattattcacaaaatatttaataacttttatcacaaataatttctatttcagtaactgagaaatcatttagcaaaaaattttcccatagctacgggtctggtggggctctctaaatacatatatatgtttaagcgcgatcatgtgctttatctaacaaattaattaaactgtgaacagcatttttatttattttatttgatcatttcaatgaatttattttgatttcatttttttacgtgatatttaatagttgatcatggaaaaaagccaccgaccctagcaatttcaagtaccacttttaaaatacatatattttccacttttattcacataggtatattgagatattccgcagctcgattgctgaaatgaagagggccacaggcgccggtggcggtgtcggaggacgccctggcccttatgacatacgtgatcgtggtgccaaccgtggtggcaatgatttcggcggagggcgcaatggtatgttcagatctaattgttaaattttataaaacttcactgattgccattccgatgttaaacaaagattggggcaacaatggcaactttggcgttggtgccaacaacatgctgggcttcaacaatctgccaagcctgatgaactcgggcaactttggaaacaaccaaggtggaaataatggaaattttggaaataactctggacccagcaatttcggcaactttggtggcggcaacaacggtggaaattccggcaactttggaaacgacagtggtaacagcggaaactttggaaacttcggcaataatggaggcggaaacttcggcggcaacaacaacggcggcggtggtttcaacagtggcaacaacttcaattctccaggtggcgttaataatttcggcaacaatggcggctccaattttggcggcaatggtggaggaggtttcaataacggcggaaacttcgtatcctcgagtggtgttggcaactttggcccgatcggcggcggtcgcaacaataacaacggaaatttcggaaactctggattcggtaactttggaggaaacaacaatgtcggctcgaacttcggaggaggcaacaacggcggtggcggcggattcaacaatggctcgaacttcggcggcggcaactcaatgggcggtggtggcaatttcggtcccatcggcggcggtcggggcaacgacatcgagtattatacaatccacatgcgcggacttccctacacttcatttgaaaacgacgtttttaaggtgggtttaacaataacgaacttgttaagaaggaatattcaacttacttaaaatcacaataatttctttctatagttcttcgaaccaatccgaccagctaacgtgcggataaactacaacaagaagggtctgcacagtggcactgcggatgcctacttcgacacctacgaggattcccaggtggccatgaagcgccacagagagcagatgggttcgcgatacattgagctgttctacgacggaaagacgcgtggactcaatggtggggaacacggcggtggtaacggtggcggcggaatgggaaacaatggcggcggaaacttttcgcggcgcatctaaagctcttccatagtttgattacattgaaattaatgtagacgcaagtatttcgtaatattatgatcaagctgatactgctaaaccgctaaggaacccttacaaccatgtaaacgacttaactatcgaacagaattcagacagagacaattggttacacatagaaaccaccaacgtataatcaagaataaagagcacacttttatttaagtactttattctgtagaaatttcaattttaatatttaagtttcaattattaatttaggtttttctaaaataaacttttattttaaaatgaaaatgaaacgagtttttcttaaacttagaactcgtctgcccggaaatgattagaattaaaaattgtggatacagatgagatcatatgtggtcttctgtaagtgcacagctgtctaaaaacttttgatattcacatttaagtatacagaaactaattatacaaaataatagggtatgccatgaattgcacaaagcctatttgcatttctgggcagttgttgcccacattgatgaaaaaaagtgggaataaaagtaagtaatgaacacatctggctgggactagaaatatcaaaacatcatttggtaaatcggaaagagtggctttcctttaaaacttgatacctcctaaactctttaatgctcttcggtatttatttcgccttcggtttttttatttcacaatatcttagcaaaggttcagaatttgcgggccgaagacaaaagttttacttttcactttcctaaaggcacagttgacagctcagtatcatagttgcgatgtagatagcagacctgtcaataaatttgtatgtctattttgatccaatgatcattcctcataattataccaataaaccgaatgctgaaaatagataaggtataacgtagacccgatgtgtttgccaagcggcgagttatgagatctcgtaaaaagaaggaagacgtatttaaatatacttatactcgaaaaggcttttttcagcggacggcagcttcaaagttacttcagttttttttttttttgacaggcgctgcaggcacagcttttctttttgcgataagtgtttacttaattacggcttttcttattcgagatacaggaatgatatcatgctaatcacttgtatctatttgataggccttgatgcgcgtgtcgccagcaaaaactctgtcaattcgacaagcaaataaaacaatttgtctataattgggtaattttgcgaacaaaaatgagcccattttttgccggcttaaataattgctacagagggcctttaaaaatt

SEQ ID NO: 15257 - DNA, 2198 bp, DROSOPHILA
tcacactgcatcttcaacttgacgcgtgctatttgattaatctctctgaaaaataagtcaaattaaccgataaagtttaaaaaaaggcgatattggaagttgaaacagagcagaatacggtagagatctggtgaaaaatgtccaacgcagacgtgcaatttaactacggccagcagggaaatggcgacaacttcaacgacgacagcaaccagcagcaggatgaggatgaccagtacaacgaagatggcggcggcaagatcgaaaacgtcggcgagagccccaaattcgttcggttgcgcggcctgccctggtccgcaacgcacaaggagatactcgactttctggaaaacgtgaatgtgactaatggctcggcgggcattcacctggtcaccagtcgggtcgacggcaagaacaccggcgaggcgtacgtggaggtggccagccaggaggacgtcgaagaggctcgcaagctgaacaaggccagcatgggtcaccgctacattgaagtttttaccgccacgcccaaggaggccaaggaagccatgcggaagatcagcggacacggcacggccttcgttgtgaagcttcgtggtctgccatatgccgtcactgagcagcaaatcgaggagttcttctctgggttggatatcaaaacggatcgggagggcatactttttgttatggacagaaggggtcgtgcaactggggaagcttttgttcagttcgaaagccaggacgacactgagcaagccttgggccgaaatcgggaaaaaattgggcacaggtatattgagatattccgcagctcgattgctgaaatgaagagggccacaggcgccggtggcggtgtcggaggacgccctggcccttatgacatacgtgatcgtggtgccaaccgtggtggcaatgatttcggcggagggcgcaatgattggggcaacaatggcaactttggcgttggtgccaacaacatgctgggcttcaacaatctgccaagcctgatgaactcgggcaactttggaaacaaccaaggtggaaataatggaaattttggaaataactctggacccagcaatttcggcaactttggtggcggcaacaacggtggaaattccggcaactttggaaacgacagtggtaacagcggaaactttggaaacttcggcaataatggaggcggaaacttcggcggcaacaacaacggcggcggtggtttcaacagtggcaacaacttcaattctccaggtggcgttaataatttcggcaacaatggcggctccaattttggcggcaatggtggaggaggtttcaataacggcggaaacttcgtatcctcgagtggtgttggcaactttggcccgatcggcggcggtcgcaacaataacaacggaaatttcggaaactctggattcggtaactttggaggaaacaacaatgtcggctcgaacttcggaggaggcaacaacggcggtggcggcggattcaacaatggctcgaacttcggcggcggcaactcaatgggcggtggtggcaatttcggtcccatcggcggcggtcggggcaacgacatcgagtattatacaatccacatgcgcggacttccctacacttcatttgaaaacgacgtttttaagttcttcgaaccaatccgaccagctaacgtgcggataaactacaacaagaagggtctgcacagtggcactgcggatgcctacttcgacacctacgaggattcccaggtggccatgaagcgccacagagagcagatgggttcgcgatacattgagctgttctacgacggaaagacgcgtggactcaatggtggggaacacggcggtggtaacggtggcggcggaatgggaaacaatggcggcggaaacttttcgcggcgcatctaaagctcttccatagtttgattacattgaaattaatgtagacgcaagtatttcgtaatattatgatcaagctgatactgctaaaccgctaaggaacccttacaaccatgtaaacgacttaactatcgaacagaattcagacagagacaattggttacacatagaaaccaccaacgtataatcaagaataaagagcacacttttatttaagtactttattctgtagaaatttcaattttaatatttaagtttcaattattaatttaggtttttctaaaataaacttttattttaaaatgaaaa

SEQ ID NO: 15258 - protein, 586 aa, DROSOPHILA
MSNADVQFNYGQQGNGDNFNDDSNQQQDEDDQYNEDGGGKIENVGESPKFVRLRGLPWSATHKEILDFLENVNVTNGSAGIHLVTSRVDGKNTGEAYVEVASQEDVEEARKLNKASMGHRYIEVFTATPKEAKEAMRKISGHGTAFVVKLRGLPYAVTEQQIEEFFSGLDIKTDREGILFVMDRRGRATGEAFVQFESQDDTEQALGRNREKIGHRYIEIFRSSIAEMKRATGAGGGVGGRPGPYDIRDRGANRGGNDFGGGRNDWGNNGNFGVGANNMLGFNNLPSLMNSGNFGNNQGGNNGNFGNNSGPSNFGNFGGGNNGGNSGNFGNDSGNSGNFGNFGNNGGGNFGGNNNGGGGFNSGNNFNSPGGVNNFGNNGGSNFGGNGGGGFNNGGNFVSSSGVGNFGPIGGGRNNNNGNFGNSGFGNFGGNNNVGSNFGGGNNGGGGGFNNGSNFGGGNSMGGGGNFGPIGGGRGNDIEYYTIHMRGLPYTSFENDVFKFFEPIRPANVRINYNKKGLHSGTADAYFDTYEDSQVAMKRHREQMGSRYIELFYDGKTRGLNGGEHGGGNGGGGMGNNGGGNFSRRI

SEQ ID NO: 15259 - DNA, 3220 bp, DROSOPHILA
cgctaggggtcctcctggaaagggcagtttctcgccggacaaggatgccgagaacatcaaaaagattctagccgatcgtgatgcgctgcgaaagaagtgtaaggaactggaggagctcggcgacaaagtcaatcaactggaggagaaggccaatgaggcggagtgtctgacatgcaacctggaggaaaatctacggaaacagtgccgatgcatggagcaaatgcagtgtgaaatgcgagatatgcagaactactacgaaaacgaggtagacaaggctaggggcaatgaggaaatccttaaggtacgttattcagcacctatatgctgagtaagtgttagtaatgtggactccttaccttctcccatcccagtgccgttgtaatcagatgaagcaggaactggtggcagccaaatgtgccgtccagcgggcccagtgtcaacaaatggagatcgatgtgctgcgaaacgagctgcgaaaacgggacactgccctcaacgcatacgattgccagttccagcagattatggtaattattgtcgcggagctgcgggaatattctatttaaatatttgacttccagatgaaggccaagatgttcaaggccgccggttaccgcttccttgacgacttgcctcccgactgcagcgaaagttgcgtggatggccctggtgaagaggaagagggaaattgaagcacccagaaggcatatctcatctattgttcagattttttcaaaattcaagcagctatctatcaaaatctatagttttataaaattaaaccattacttcaagcgtattttcaaattcgtttactaattttctattaaactattaatagtgttatctactaccccttgtttcaatataggaaagtaacgaactattctttttcaaaattcaaaacatatagctaatcggttttgggttgtttacctacccaaacttatcgaatgtgttatcggtgtaatcacgtttgccagctggtcgcgttagtgtgtttccgttgattcttccaaagtttgttattgcggagtttcctatttatataatagaaataaaatacaatggagaagctagcgtcggccaaaacgtgtcttaaactgctgcaggtgcatggacagataggtggcccaccgaagacagttcaattaacattgccttcattgtatatcccaggttatgcccggcgtgcagcaggcggcccttcttcctggtggtggcctgggcgtgctcgcttctcctcttcagaatctgatccagatgcagcaggtgcgccaccgacaaaccaagcactggaagcccgagttcaagcgccttcgtaagctcaagttcgtaaagatggatctgcccaatctgcgcgagaaacaggaggatatcaccaaggaggagatgcgcagccggatgaaggagcgaggtgtcttgccgccccgtccctggatggagcgccctttccacataagctgcacgggcggcatcttcgaggcttatgtccctcctgaaggcgacggcaagaagtcgatcatttcaacatcgggtgccaagcagaagttggagttcctggagaagaagtccaagagcctgatggccgtgcgcaagattcgttcctacgacgaaaacttcagctccgatgatttcggcgccgaggcccaggatatttacatccaggcgcacactcacatggctgccaaggacaagtacaagatccgcgagttcgtcagcgaacgctgttatccggagatgatgcacaacgtcaaggacaagaccattcgctggaagtttctacagtcgctggaaccaccacgcgttgtccatgcccgcgtgacggaggtgatcaccaaggaaaaccagttcgctcaagtcaccgtgcgcttccacagccaacagatgttagccatctacgaccgcttcggccgcctgatgcacggcagcgagatcatcaccaaggacgtgctggaatatgtggtgtttgagaagcacatttcgaacgagtatggcaaatggcgactgcacgacaagatcatccccgactggttgccggccaagcagcccgctcccattacctatcgtctcatcgaggatgcagaggagccacccaaggaactgagtgccggggatgccgaggtgaaacaggtggactcagttggcgaacaatccaaggagcaactgccactggcaacaccggtggagagccataccaagccgtccctggccatttgattgtactttttgtgggccgcctggcggctcagaagaatgcgtgttaacattgcctaatgatttttgagtcgccatttggttaaattataatttttaaaactgttattgtttttctttattttatgaattctttgcctctttgaaccgaaaatgggaaaggatgaaatttgaaacttatggggttgtattttctatttatttaatttcatcgctaaattttgtttataatttttcttcttttttccaccctctaagatgaatggaaaatgtagactcaattttcttgtaaaccaccttaggtaggtaagccacctaggaacatatattattcaataatacgtatacttattacttttgatatatttattcaaaatgtagtaaagctaatgcttattgttgctagttattataaatacaggcgatcactcagtagataacatacaaaagctcgtcatggattgtttggacatttagagaatagggaataggatataaagtatcaataaatagtgcacatatatatacaagcaagatcagtaaagccatttcaagtacgtgggcgcacttatatcacacaaagctgctgctgggctcgtcgaggtatgcacaccgcgagcccgcctcctccagagactttcgtcccagatccagtggtattttgctcgcaaacgttccaggtttggaggcttctttgggtgatgttggcacctgtttgctgggggagtacttgttgcaatagttgcccgtcggctgagccacgccccaattggaaggcttgatgggcagcacctttggctttggcggcagcggtggcggcgcttttgcgaattccgtttgatcctgcgtcgcggcaggcaagtcagtctctggctcctgatccaccttcatgggcgacaccggctgttggctacgtgtgatggagagacgtggcgccggctgtggaatttcggtgggcgtggcgggtaccttgctcacgggactcaagctggcgcgcaccttg

SEQ ID NO: 15260 - DNA, 1153 bp, DROSOPHILA
tttccgttgattcttccaaagtttgttattgcggagtttcctatttatataatagaaataaaatacaatggagaagctagcgtcggccaaaacgtgtcttaaactgctgcaggttatgcccggcgtgcagcaggcggcccttcttcctggtggtggcctgggcgtgctcgcttctcctcttcagaatctgatccagatgcagcaggtgcgccaccgacaaaccaagcactggaagcccgagttcaagcgccttcgtaagctcaagttcgtaaagatggatctgcccaatctgcgcgagaaacaggaggatatcaccaaggaggagatgcgcagccggatgaaggagcgaggtgtcttgccgccccgtccctggatggagcgccctttccacataagctgcacgggcggcatcttcgaggcttatgtccctcctgaaggcgacggcaagaagtcgatcatttcaacatcgggtgccaagcagaagttggagttcctggagaagaagtccaagagcctgatggccgtgcgcaagattcgttcctacgacgaaaacttcagctccgatgatttcggcgccgaggcccaggatatttacatccaggcgcacactcacatggctgccaaggacaagtacaagatccgcgagttcgtcagcgaacgctgttatccggagatgatgcacaacgtcaaggacaagaccattcgctggaagtttctacagtcgctggaaccaccacgcgttgtccatgcccgcgtgacggaggtgatcaccaaggaaaaccagttcgctcaagtcaccgtgcgcttccacagccaacagatgttagccatctacgaccgcttcggccgcctgatgcacggcagcgagatcatcaccaaggacgtgctggaatatgtggtgtttgagaagcacatttcgaacgagtatggcaaatggcgactgcacgacaagatcatccccgactggttgccggccaagcagcccgctcccattacctatcgtctcatcgaggatgcagaggagccacccaaggaactgagtgccggggatgccgaggtgaaacaggtggactcagttggcgaacaatccaaggagcaactgccactggcaacaccggtggagagccataccaagccgtccctggccatttga

SEQ ID NO: 15261 - protein, 361 aa, DROSOPHILA
MEKLASAKTCLKLLQVMPGVQQAALLPGGGLGVLASPLQNLIQMQQVRHRQTKHWKPEFKRLRKLKFVKMDLPNLREKQEDITKEEMRSRMKERGVLPPRPWMERPFHISCTGGIFEAYVPPEGDGKKSIISTSGAKQKLEFLEKKSKSLMAVRKIRSYDENFSSDDFGAEAQDIYIQAHTHMAAKDKYKIREFVSERCYPEMMHNVKDKTIRWKFLQSLEPPRVVHARVTEVITKENQFAQVTVRFHSQQMLAIYDRFGRLMHGSEIITKDVLEYVVFEKHISNEYGKWRLHDKIIPDWLPAKQPAPITYRLIEDAEEPPKELSAGDAEVKQVDSVGEQSKEQLPLATPVESHTKPSLAI

SEQ ID NO: 15262 - DNA, 4059 bp, DROSOPHILA
tcgattgaatttgtgaagaattctttcttactttctattcctgtagaacactatttgtttgaaattgaattcgaaaccgggccaatatcctcagattagtttttgccattagcgtttcgcaaaacgtgtgccattcacaatggaagaggatgagatggaggaaacaataggatcacactgaagtcccaaccagaatcagaacatcagcctttgtttcgtagtacttaagccaattgttgcatttaacagcggatggaatgtggccacttaaattactgcaacaaaaccacattacacagacaagaacacaatttctttagatttagcggttttctatcttaactttaagtcagttatgggttctatgatttcaaagcaaagaaatcgtacgaaaggagaaggcaaagcgggcctgtatcaaccgatttgaccacacatatatagtgacatatatatatatagaaacagacacatatatatacatgcatatatcgtaacaaacactttagtgttatctgtgatttaagtttagtagctttactttgttgaaactctgcagaaagaacattttaaatcgaaattggtctaaaacaaacttcaattctttttatagcattacagataattctacactcaatgaaactgtttcgatgcttaatatgttattaatcaattaatttgtcaattatactagctgtacgataatttctcccttgattaactaccaataacaagcattttttataaataaacatttgaaaaatgaaatgaaatgcgttttaaatttatttgtgtgggtttcattggacttgcaaccatatcctaataatttgaatatattttttaaaaacttatttgcaacttattcgcggttatgttaaaatgataatttgaattcgatttattttcgatataagttggtagtcgattggaccgatttttcgtgcgtgatttgaatggtatccctggtcctagactatcgataacagtgcaaacagtgttttgggtcacctacaattttataaacaatccgcagcttaatttgtaagttacagcttaattgccgaattctaagatgtattcaaagtggttgtcaaattaaagaacccttttattttgagtatctggttaattgtcattttgtattcaaggtcaactagaaatgatcgtggaattaaagctcgtttgggtcgttatcaatctgtttaaaattgtgaaatctgtaattcgaacagaaagttgataatgatttttgtttcctgcagctaattttgggtgaatttcagatcaaacatatttatatgttgcggcattaactttagacgctcttgtttatttgcatatttcagtttgcatgtgtgcgtgagcgctttaaaacaaaatcgtgtcgcatatagatattccgctagtctaatcacaattcagtgccattatgcaacgtcaccgcgtagtgcaggcctccagcatttaactcaacaattgcatttaaaagtaaaccagtgatatagtttattgttacatttgagatcagacatcagacccgcagagacgacaggcaaagtgcgtgcttatcgcgcaataaacaatccagacacgcggtgataaggcgaaagggagcgatcattcactaaagtcacctttttacagatgctacgcagctgtcagttaaccctctccgccgctaagaggagccttcgcgagcagttccagttgcaagcccttcgtcaccagcagactgccattaaaatggagaaattcgatctgcccaagcgattgcagggtagcacgcccagcgtctggaacgagtacattgccctggccatgcaatataagcccctgaacttgggacagggatttcccgatgatgccgctcccgagtacgtgacccactcgttggccgacattgccaaggagcagaatcctcttctgcatcagtacactcgcggttacggtcacgttcgcctggtcaatgcgctatccaagctctatagcggtctcgtcggcaaggagctaaatcccctcagcgacatactgattacctcaggcgcctatgaggctctctactccaccatcatgggccatgtggacgtgggcgacgaggtgatcattattgaaccattctttgattgctacgagcctatggtcaagatggccggtggagtgccccgctttgttcccctaaaattggtaagaaccacaatagaaaaaaaaaatatatccctctttttaacatgtctaacttctagcgcaagacagagggaccaataagctctgccgattgggtgctagatgacgctgagttcgagagtctgttcaactctaaaacaaagatgattatcctaaacacgccccacaaccctattggaaaggtcttcaaccggaaagagctagagaggatagccgagctctgccgcaagtggaatgtgctgtgcgtctcggacgaggtgtatgagtggttggtgttcgacggagccgagcacatccgtatctgcacgctgccgggcatgtgggatcgcaccattactctgggatcagcgggcaagaccttctcagtaactggttggaaaataggctgggcctacggacccgctgaactgattcgaaacctgcagatggtgcatcagaactctgtgtacacctgtccaacgccgctccaggagggcgtcgcacgcagtttcgaggtagaactggcccgtttgggtcagccggagagctacttccttagcctgccgcgcgagctgaagcagaagcgtgacttcatggccaagttcctgtccgaatccggtatgcgtcccaccattcctgagggtggctactttatgctggcagactggtcaccactggcgggcaagattgatctaagctctgagccagacaagcatcgggattacaagtttaccaagtggatgaccaagaacatgggcttgcagggcataccgccaagtgccttctacagcgaacccaacaaacatctgggggaggactttgtgcgctactgcttcatcaagaagcaagagaacctggataaggcggccgaactgctgtccaaatggaaatagtcgccggacaataaacgaattgctatcagccgctttgtttatctctgcccgaatgcagttccctaacctgggtgttacgtaaccaacagggaaaacaaccttgtgctggtgtggtagccttactgcaatctccatttattagcaatccaacaacatgttcatccgcaccatacattggatagtaggtagctagtgtcgctgtaacgtgtatattgtgttctgtgtttttaaactagtgttctccgcttaggcatcgtacacggacttcagggccaattcgggcttgtcgtagcccagttcctcgatggttgggatgcccagctcctgcagtgtgggggtgatcttctccagcaagtagggatagagggtggccttttggtcgccgcacttgtccttgcatccctccagccacctgatggccagtgcaatgtcgttgacgcgacggctggcacgcagaccggcctcgatgatcttggggctgggcaccagatccatgcccagcagatcgttcatgcccttgcggatctcccagccatcgatgccctcacggctgaagtacttctcgtagcgcttgtcgaactcctccgccgattcctcggttccgtgcagacagcgcacggcggccacgcgcgacgatgtgccgacgaggctgctgcggagggcgcttgccaggttacgggccgtgatgctcaacatgctgccgttaaaaacagtaaaatgcttgttaattgcaaaaatttggttaagtaacagctcgactcacttttcttgttcttgctacttttcacacgggtatgacagatctgagtgatggttggcaacactggcttttccagggatggacacgtttataactgtcgctgtcacggaacagtgagatatttaaaatgtttctgcttcagtatatttcaaattcgggtaagatcacagttagtttatcattttccttatatttaatttcttctatcttgcccaaaaaaagcaaaaaaaaaatcaaaat

SEQ ID NO: 15263 - DNA, 1397 bp, DROSOPHILA
ttttgggtcacctacaattttataaacaatccgcagcttaatttatgctacgcagctgtcagttaaccctctccgccgctaagaggagccttcgcgagcagttccagttgcaagcccttcgtcaccagcagactgccattaaaatggagaaattcgatctgcccaagcgattgcagggtagcacgcccagcgtctggaacgagtacattgccctggccatgcaatataagcccctgaacttgggacagggatttcccgatgatgccgctcccgagtacgtgacccactcgttggccgacattgccaaggagcagaatcctcttctgcatcagtacactcgcggttacggtcacgttcgcctggtcaatgcgctatccaagctctatagcggtctcgtcggcaaggagctaaatcccctcagcgacatactgattacctcaggcgcctatgaggctctctactccaccatcatgggccatgtggacgtgggcgacgaggtgatcattattgaaccattctttgattgctacgagcctatggtcaagatggccggtggagtgccccgctttgttcccctaaaattgcgcaagacagagggaccaataagctctgccgattgggtgctagatgacgctgagttcgagagtctgttcaactctaaaacaaagatgattatcctaaacacgccccacaaccctattggaaaggtcttcaaccggaaagagctagagaggatagccgagctctgccgcaagtggaatgtgctgtgcgtctcggacgaggtgtatgagtggttggtgttcgacggagccgagcacatccgtatctgcacgctgccgggcatgtgggatcgcaccattactctgggatcagcgggcaagaccttctcagtaactggttggaaaataggctgggcctacggacccgctgaactgattcgaaacctgcagatggtgcatcagaactctgtgtacacctgtccaacgccgctccaggagggcgtcgcacgcagtttcgaggtagaactggcccgtttgggtcagccggagagctacttccttagcctgccgcgcgagctgaagcagaagcgtgacttcatggccaagttcctgtccgaatccggtatgcgtcccaccattcctgagggtggctactttatgctggcagactggtcaccactggcgggcaagattgatctaagctctgagccagacaagcatcgggattacaagtttaccaagtggatgaccaagaacatgggcttgcagggcataccgccaagtgccttctacagcgaacccaacaaacatctgggggaggactttgtgcgctactgcttcatcaagaagcaagagaacctggataaggcggccgaactgctgtccaaatggaaatag

SEQ ID NO: 15264 - protein, 417 aa, DROSOPHILA
MEKFDLPKRLQGSTPSVWNEYIALAMQYKPLNLGQGFPDDAAPEYVTHSLADIAKEQNPLLHQYTRGYGHVRLVNALSKLYSGLVGKELNPLSDILITSGAYEALYSTIMGHVDVGDEVIIIEPFFDCYEPMVKMAGGVPRFVPLKLRKTEGPISSADWVLDDAEFESLFNSKTKMIILNTPHNPIGKVFNRKELERIAELCRKWNVLCVSDEVYEWLVFDGAEHIRICTLPGMWDRTITLGSAGKTFSVTGWKIGWAYGPAELIRNLQMVHQNSVYTCPTPLQEGVARSFEVELARLGQPESYFLSLPRELKQKRDFMAKFLSESGMRPTIPEGGYFMLADWSPLAGKIDLSSEPDKHRDYKFTKWMTKNMGLQGIPPSAFYSEPNKHLGEDFVRYCFIKKQENLDKAAELLSKWK

SEQ ID NO: 15265 - DNA, 2603 bp, DROSOPHILA
ggactccagacgcaggatctgggtatccgcatcgggagcgggggcagccagaacgacggcgaagagagcggtgaagacgatggcaactgtgcacttcatgtttttctttttgttttggctaatttggctaaggattcgatgggaacttgcgaccgaacggctagtcaacgttacttgatttgtgatgtttatggccctgtcccggcgtttatatagtcggatcggaggccgacaatcgaagaaaatttagtcgaaaataaaaatgactaattacacgccgagcaccaaagccaacaaattggcttgaaaaacgcacaaaaacatcatgaaaaaatcacaacaaccacaccaagacgcaaataataatttaaaacaaaaacttctaaggcaaacaaatcgacgccgtttttaggaaatacctcatcatcatcatttgcatttttcatgaatcaatcaatccaatagcttccaagtcgaagacaacaagccaaacatttttgataatccatgggtatatgcatattttgtggtagagtggggcggctaggttgccctgcagcaaaagaagcagcatgtccagaaatggcaggtgattcgaattgaaagcccgtttcaggtttcagatttatagttgagagtaaagaatttaaaattatgcactttttcacttcctctgaaatctaaatagaataaactggatattttagaacatagaaaatatctgttgtgctacaccatttgtaacatttgttcatgataatatttaaaataatatactactaacagtgtaaatactgtaaaataagcatttatataaaaagaccaaagtttatttctattaaattaaaaccaaagcggaatatgtattttatgcaaagattttttatttatatttaaaaactttctttaatttatgaaaccctttaatcacaacttttacagaacagtgacctttacgataaaatagctaggtcccaaaatgaagtgtacacagtaagaatttaaatgaatgatgttactttaatattatgatgttcttcagacgaaacttagacatagttaacacatttgcgctgaattggaacttgattggcgaatgactttcaatcggattccctgggattcactgaacgggcctgggcagatgggcaccctcgggctggaagccgttctcatcggccaggtactgaatgctgtaggtctgaccatcgtcaccgacataggcataggatccgcggacaacaattgcttcgtgatcggtgcccacgtccttcagctggccttcctcctgatgcgactttccgtcgctcgtctccacgctaaagaaaaccagaaaccggttagcaaacgaccttgacacagttggaaacctggaaatctggccgaatctgttgaacgacaaccacttacgcaaacttgtagccctcgggcaggacatcgctgtcgaagcgcagcacctgagcatcctgctggatggctggaggagcggccagtgagcaggcaaggatacaggtgaaggcgatggcaatagtgaatttcattttgcagctggaatgtggctgatggggattgggtgactcaagtgatgggttcgaggagtgtgcagacaatgcgtgcaattctcttgccgagtggcgaatttatactccttcggccatgtaatgcaatgcgtgtaagtggcaattaagggagcaaaagaaaccgagacccaaaaaaaaagtgagagtgggagtgggagaaaccagtttgtcgttttgtttcctttgacccacactggttacctaaccagttgctggatgcttcggctcggctttgcctgttttgcgattgattgattgcccagcgacaagatacacagatttcatttgtcttcgacaaattaactacaatgtgcgccctgcccaggccatgagttgcgttagttggtcttagaaatagtcaataaactgtgaaattgggtcacatcgaaattgggctcaagtgcaggcgaaatgaaatgctcggcctaataaaaagcttttgccatttccaatttcaatgtccctcggacacagtttttcaaaagttttaaaaagtggcttgctttttatagtatttctctacgtttttacagaagaagtttgacattttttgtgctagatcacaaaaattaagacttatggagaacacatttttcgaacttgcaaaaaactagaattctgatagaattttacacaaatattcctgacatttgagctttttaaatgaaattttatagtcaacaagttttaaaaagaataaaaaaatctatatatgtaaataacatttggaactttatatatggctgaagtgttagaaatatgtggacaattatcgcctgaagcgaatttagagggttaaggcaacaccatttgaactttttggagcgtcttcgccgcaaatcgtttgctttcaatttcatttcgacttgatttgccagctttttggctaccgctcgagtcatttggaaattcgcatcttattacacactccgttaattagccggagtttgtattgggcttagtatggattgcagggggatatattgaacggcctttgcgcaatctgaattagtcgcataagcg

SEQ ID NO: 15266 - DNA, 512 bp, DROSOPHILA
cacactcctcgaacccatcacttgagtcacccaatccccatcagccacattccagctgcaaaatgaaattcactattgccatcgccttcacctgtatccttgcctgctcactggccgctcctccagccatccagcaggatgctcaggtgctgcgcttcgacagcgatgtcctgcccgagggctacaagtttgccgtggagacgagcgacggaaagtcgcatcaggaggaaggccagctgaaggacgtgggcaccgatcacgaagcaattgttgtccgcggatcctatgcctatgtcggtgacgatggtcagacctacagcattcagtacctggccgatgagaacggcttccagcccgagggtgcccatctgcccaggcccgttcagtgaatcccagggaatccgattgaaagtcattcgccaatcaagttccaattcagcgcaaatgtgttaactatgtctaagtttcgtctgaagaacatcataatattaaagtaacatcattcatttaaa

SEQ ID NO: 15267 - protein, 108 aa, DROSOPHILA
MKFTIAIAFTCILACSLAAPPAIQQDAQVLRFDSDVLPEGYKFAVETSDGKSHQEEGQLKDVGTDHEAIVVRGSYAYVGDDGQTYSIQYLADENGFQPEGAHLPRPVQ

SEQ ID NO: 15268 - DNA, 3868 bp, DROSOPHILA
atgcctacggaagtgacaaccagccagcaatatatatttttagccatggccatagggtttacgatccaccaaaacggctttctcccggtttagaccggttcttgagcttcctgcagacattttaccggacgagcaacaataagaacagcaacaacaacaacagcattaacagcaacaacacaaatgtacaacaattacaaaagcaacaaagaagaaaaacgaaagaaaatggaagtacacgtagcggctcagcgatccgtcgcattttttatgggtgggcgtggtcgcgttttacgccggccaaacaaatgcaacgcccacacagactattatacaaaaactgatgaatacaactaaattttaagtacatctacgtttatgtatgtaattgctaataatttgataattaaaaaataaagaaaccatgtttaataaaaattaaaaacaaactttgatttagcaatagagagaaagacataaaaaagtattaaatagttttaaagcgtatactgaaaccaataagctcctacgaatttcgtaatagtagggtacgcatttcactttcgacgcctggtggcccttttttcgtcactcgctttgcgtttctattcgtcgccatgagttatttttggaattttaatttttctgcgtctgtattagttgcctacatgctttttcaatgcgtgtgttcgctcataaactttatttttgagtgacttatcgattatttttgagtgcaggacgtttcaaaaccaacgtgctttcgcatttataaatataatttctcttcttcttccgaccatgattgtttcttttaaaaatgttaggtgtcaaccctgtcgatagagaagagagcaaaatccactcaaacgaaacgcactcaacgcgagagatgcggttaaagttcgttcaactggcaaatgcagtgaccgtttaacccgcgataacgataacaaaagtatctcaaggttgcttgcaattgcatttctgattattctctctctttttctctctcttattccaaccgcagccgcaaaaacaaactcaaactcgagctaatcgctgcataaatttgctgttcgaattgaacaattgaacagtctcagttagcagctgaaatcggaaataagcgacaaaagcagcagtgcgagcaaaaatcaagtaataataatcatcaataagcagctgtttgcattcgcgtgttttgaaggtgagtagccaagttaatacatatgtatattgcataaatgcaagtacaaatcgcattgccaagtgaaaacgaaagtgttttccatgggggcaacgccataaatggattaattgtcaataatggccaagtacttgcggcttatcagctgatttggacaataaacaagcgagtacacacacgaaaaacacaactgaatgagccgcattactcttgtatcttatcaacatctaatctaaatcctgggttcggctagttaacgataaggcctttgtttttccatatcggaactgtcattccttttcggcactcacagccggtaatgtgttttagattttcactgaaaagtaagattatcatattctgcacttatttcatatatttaataacgctttcagcttaacaatgagattggtcatcttggaaaccagcgactcggtgggcaagtgggcggccaaatatgtgatgaaacgcatcaatgactttcagccgagtgccgacaggtatgcacatacatataagctatatacatttggcacctggtaacaggcactattctttagatacttcgttttgggcctgcccacgggatctacgccattgggaatgtacaaagaactgatcgagtttcataagcagggcaaggtatcctttcagtatgtgaaaaccttcaatatggatgagtatgtgggtgagttatcatttcataacgtttactagatctgtttcatgtcaattgtgccccattctttttctaggactggccagagatcaccatgagagctatcactacttcatgtggaacaacttcttcaagcacatcgacattgagcccaagaatgtgcacattttggatggcaatgcagctgatctggtggccgagtgcaataagttcgaggatcagatccgcgaggctggaggagtggagctgttcatcggtggcatcggacccgatggccatattgccttcaatgagcccggctcctcattggtgtcccgaacgcgggtgaaaactctggcgcaggatacacttgaagcgaatgcccgtttctttgacaacgatatgagcaaggtgcccaaacaggctttaaccgtgggcgttggcactgtgatggactccaaggaggtgatgatcctcatcaccggagctcacaaggcatttgccctgtacaaggccatcgaggagggtgtgaatcacatgtggaccgtcagtgccttccagcagcatgcaaataccctgatgatctgcgacgaggatgccactttggagctgagagttaagaccgttaaatatttcaaggtatgcccgcccacgatgtcgtcgcttttgtagacgaactgggaatagaactggtatactggtgaattagggtctaccgaaggtgttggtctaataacccccctaacttgaaaatctaatctttagaagcagaagttggatacatgtgaactcttatatggttgttagttaagtctaagaattttgcatgcctatatgcttgtaatataaaagcttccacggttgtaggcatacggttaagtagaacgttaaaagagacagcattttgttaacgactggctgactggccattcccacaatttcacagggcattctcagagatctagacgaaggctccccactggagggctacaaaaactgataatgcgtaaagtatacagctttattttccaaagcaatttttaagtaaatgatattgattccaaggactatttctgtgattaagagagtcaacaagtaatgattatcggatggaagactgcctgctgctataaactagttcttataaggtcattagaataatccagctaaaaaaagaaatcaaaattaaatattacttttaaatgcctttttttccaagttttttcattttaagaaatataaagcaattgtcttgataaaatcttaggaccttgacatgaattaaaatataaatatacttgcagacacgttatattcttctaataaactctaaatattattataattaattaatatatataccaattttgcagagtctgatggacgtccattccaagctgatagagcaacaaaagacgacgtaaccccagatactaaagggaataatggagatctggattccatcgttaccagcattatagttttttcaatcaaaaggaatcgaatttttatacaataaatgaatttttatatgttatcgccttaaatttctttaaaatttatgcgaaagatgttgagtaatcttttatttaaaaactataaattttaggttgcccataaatattgaaagttcaagttcactgtataattttgtggtttccattttattatctaaatgttctataattacaaatatgtgtacactataaggggtataaaagtggtggctatgccattcaagaagggtccgtcagattctagacaggatcttgttgtccgtgtagacgaactcctcgtgatcctcgataaggcggaagagctccttggcatagtagatggatcgcaccgactcctccagaatgagctggtggttctggacggcccgtcgcacttgttcgtgtatgaacatggcctccagccgcttggcccgctgagtcaggcgacaggcctcgttgttccggagacgtgcttcgccggccgtcagacggcgctccacgacg

SEQ ID NO: 15269 - DNA, 1039 bp, DROSOPHILA
ctctttttctctctcttattccaaccgcagccgcaaaaacaaactcaaactcgagctaatcgctgcataaatttgctgttcgaattgaacaattgaacagtctcagttagcagctgaaatcggaaataagcgacaaaagcagcagtgcgagcaaaaatcaagtaataataatcatcaataagcagctgtttgcattcgcgtgttttgaagcttaacaatgagattggtcatcttggaaaccagcgactcggtgggcaagtgggcggccaaatatgtgatgaaacgcatcaatgactttcagccgagtgccgacagatacttcgttttgggcctgcccacgggatctacgccattgggaatgtacaaagaactgatcgagtttcataagcagggcaaggtatcctttcagtatgtgaaaaccttcaatatggatgagtatgtgggactggccagagatcaccatgagagctatcactacttcatgtggaacaacttcttcaagcacatcgacattgagcccaagaatgtgcacattttggatggcaatgcagctgatctggtggccgagtgcaataagttcgaggatcagatccgcgaggctggaggagtggagctgttcatcggtggcatcggacccgatggccatattgccttcaatgagcccggctcctcattggtgtcccgaacgcgggtgaaaactctggcgcaggatacacttgaagcgaatgcccgtttctttgacaacgatatgagcaaggtgcccaaacaggctttaaccgtgggcgttggcactgtgatggactccaaggaggtgatgatcctcatcaccggagctcacaaggcatttgccctgtacaaggccatcgaggagggtgtgaatcacatgtggaccgtcagtgccttccagcagcatgcaaataccctgatgatctgcgacgaggatgccactttggagctgagagttaagaccgttaaatatttcaagggcattctcagagatctagacgaaggctccccactggagggctacaaaaactga

SEQ ID NO: 15270 - protein, 273 aa, DROSOPHILA
MRLVILETSDSVGKWAAKYVMKRINDFQPSADRYFVLGLPTGSTPLGMYKELIEFHKQGKVSFQYVKTFNMDEYVGLARDHHESYHYFMWNNFFKHIDIEPKNVHILDGNAADLVAECNKFEDQIREAGGVELFIGGIGPDGHIAFNEPGSSLVSRTRVKTLAQDTLEANARFFDNDMSKVPKQALTVGVGTVMDSKEVMILITGAHKAFALYKAIEEGVNHMWTVSAFQQHANTLMICDEDATLELRVKTVKYFKGILRDLDEGSPLEGYKN

SEQ ID NO: 15271 - DNA, 9717 bp, DROSOPHILA
cattgcatgtccttcaaggaccacagctgatttgttcttgcttcacgacgctcgaaatacccgataattgattttacaacacccgctcagcctggcggaaggagaacaaaagcatcctaaggattttcgggaaccgcgacagcttaggcgagttgatgaaaggcaggtatggttaggtacgagtatatttgtatgtatgtaaatgcctgtctaaaattaaaccaaaagcgcgaagccgcccagtaaacagggatcaagtagattgatatttcctgaaaacaacatttggagggtaggtagccgtgcttcaaactctgtgagcgagagaacgagaacacagcgaccctcttaatgggaagtactttaaaatacagctgagggaagtttaataggagttgctttgggtaaattttgcaaatctattatggcatactaaacgtgagtcaatttaattagatgatcaattatgcttatctaatctaccataatcttttttcaagaaaatagttactcgtatcagttggccatcactaatgtgttagttagccaggttgaattgtatggtatggaatattgttatcacagtatgagcgttggtcgtaattaacattacattagtttacccaatgtttatgttagccaagcaaaactattgggatttttacggttcatatgtgggaagtcacatctgagtgctattttactgacctcaactgtatggtgagagatcgcgaggggtaaacaggaccagagagagcctgtcatccagagagcctgtgggctgtaattttgaattctgaatcacgatttggctgctctcagtttgagtttgaaccacgcgacgcgcacaacggaaaatcctggcataaaaacccaatcgattgaaaagtggaaaacctcgccatacggaggacatgcctgccagtgaaaactccgaaaaaaagatagatcttagtaaaaaaccaaaacaaaaagtagagtacaaactttgctgtgaccaatggagcgtcgcaaggctctcagttcgtatgccaagttcaaggatcagcaggaggcggcggcggcagttaccccgcagaaggacaatgagagcgatgactcgctgcccgccttgcggcgctctcattccgtccgttcctctctacggcggctaaaaaacaagctgcacagtcccgccctatcaatgcagtctccctttaagctgcgcacccagctgcacatgcgcaatcgcagctcgcgaggatcggccaccttggacaaaagcaaggcggccaaggcactacgcatgctgggcgatctggatgcagtggctgttctgaccacaaaagtgaagggcaagaacgaatttgtgccgctgaaaagagcaatgaactcagattcctgtgatcacgatgaacttggcatcgaaaggctcatgtcctccttgccagtgggtgcaaagctgcctcgaaaggcctgcaagttgctccagatccccgagagctactgccgacaagccgaagtcgcgccgaaagccacactcgactcggatctggagaagaccttcagtggcgaggaatccagtgccgtgctggcggatatcactcgacatgcccagcagggcatctatggaacgacacgcatgcgcacggcgacaattcggaagccgatgccctacctgaacagccgtaggtgtcctttaagaccttcaatttaaatcctttaaagatcgcagcagtgtgattgcatattttaaccggtgcaaaagtggtttatgaatctaaaagtgaatttcaaatcattttacttgagagcctcaaagtcagcttcatttggtacagccaattaaaaaaagtgacattttaagaacttgtgtagatgaaataccttcataacaaaaataaaatgtccttctactatgaaaacatttctggtcgagtgaatgaaatcttcttagaaaagaaatcaacagaacgcggattcaaaggaatgtttactttttatcgaagccaactttctacctgaatttttgtaggtgcccccccttaaattctatcaaaaacagaaatggtgacgaggaagttattaaatggaaaaacagagcggaaacaaagattgtttttcaactattcgtgaaaagctttataaagaagcttgtatgctactaaaagtgtatgcaccacttaaaaatgcattttatacgagcagaaaaaaacggtcgcattgcatttccttctagccaataaaactctcatttggtgatagctttataaaaacaaacgactaaaacagtgaatcagtggaagtttgtgcttatcccagttatgtttcgatggctttgtttgcgttttgccaaactcttttattgcccatcaatcacgtttgaatttgagatttttataccctgcaagtgggtcaatgacccataccaaatggtctgtgtcttatgaatcgaaaggcagctgtgggtctatttcaagggtagggtttcccaaggcagatattcccgtgctttatcattacatcacaaagcgattttcttcgtaactcgtttgcatacatatgtatgtatgtctttgccatgcattccatttgtttacaaccatcggcgaaacccgtaaaactggtgggagattcgagactaggaggatgaatattcatttcatgagtgtgcataaatacatacgtagatacacatgcatgtgtattgtacataaatcaggctgcacacatgcaaagacagtataaactggcctaatccatgaccaaatcgggtcgttaatgttgtgtgctcttgcagatgctaccacagcgatagcactaaacttcccaatatgccgcaaaagctcccgatgagcagctgtctgcgttctccggcggtcttcgttcgccagaaatcgtttcacacgctcaacgagctgaccaggttctgtcaattgaaagtgtccccacatcggtccaccgccacagccacctccacatcatcgtcaccatcatcgtcgccggcagcggcgcaacagcagcgtcgccacagtcactatgccatcgatggtaagagatcggtaattctctggctgcccttaacccgtatatatatgtacatatgtatatatacatatgcatatagagaagaaaaagacccccatcaggggtaattaaaaaaactgagccatttcatatcatcgtaaatgcttgctcacacaacaattcatggatctgctgggctatggcagcgaattaaagtcaattgaataaaaattggtgggtggttggctggttcgttgggttcatcgactgcccgggtgggtgggttcgttaattcgggtccaggtgggttggctgcttcacagagaacgcatataacacgctgcaacaacacacatgctctaaaacacacacacatggcttgcattcacaacggtttgtgcataattaatttaattggctttggtcataggcaacggcattcccaattgcatagaaaataatagcggctatgaatggaagtgaacgggattaatgtttaatatttaattaatcgcaagcagaaacgacaattactgtaattaaattacatttacactcacacaaaacaccgtggtgctcctggtcatttgccattgtaaatatatgcacacacacacacacatctgcgtttcatttccatatatcctttatttgatctttattattatttttgcatttaatttgatttcccttctttgtttgtattcaacacaaatcacgatactcgcgcacagacaacatattgccgcaagataaacgtgacggtgacatcgatagtgtcaggctgcgggagaaggtggttaatcccagtggcggcaataacaataaccaggacaactatcccacctattatccggcaccattgctgtccaccagtcgctggtcggagcagttgacacagcatgcggcagtagccaagatacggacagccatctcctgccactcccaggatctcagggaaatggaattcctactgccccattcgcgaaccgattcccaatcgaattcccaatcgcaactgtgcatttcgcggcactcgcagccgaaaaatgccaagctgcgggatgatcacgatgagacgggctcatcggaattggattcaccaccgctgggtgatgagaatgcctcggcgaatggccaactttcggtgcacaggcagccggtacagctgcggagtaagatcccgggaaacacacctcatccgcgggccagcaaaatgtccaagaaacagctgaagttggcccaggcccagctggacaaactgacgcagaacaatctgcatctgcatggtatgacccaataaacctatccacatacatggcacgcatcgccaccgtttctagttttctaaagcttattgttaagtttgcgaaaggggtttccgcagagtacttacttgatttttttttcattcacagctctcttctcggcagtggagcatggtcacctggagaaggcgcgcactattctagagtccaccgacgtagatgtaaacaggtgagcttagatccttataacttaaaaaggacataccgtaactgaaatacccaatccttcgcagcatcaataacgatggactatctgctctggacttggcggtgttaagcaataatcgctccatgaccaggatgctgcttcagcatggcgctgtggagggctctcagtgtaagtggctttcaatttgtctgccgactgttcttttcatcgatcaatctcaatccgtagtctctgtggacaccattggcaccaaactgaacggcttgctcaaggacgccgagtcaagaattcacgatctaagtggaccggagggcctctgtccgccggtgtttgcatcgcgtccctccatctcgagcatcataattggtgagtggtcgtcgagtcaattggagagtgcacttaatcagaatctaaactcgtcgttccctgcaggcaattccagtgcatcggtaactggctgcacgggcagcgaggtggaaaaacagataggcatctgggagcgccgagttaagggactgcgtcgcttgcagctcggttgggatcaggccaggccgccagatgcacccgcctccgtggtcgtcgacgtcactggcgacaattccatcagcgtacaaatcctagagcccttcgagggggccatcggcacgaaatttaaaggtaagccgcaggaacgtcaagtggcaaaggcagtggaatgggacttgtgattgtggttgggtcgccatgttgcggttagaatgtggttctggattcgattcgcggtgtctgtctgattttacccgcatagccattgtaccagaatggtatcaacaacttaaaacccttcacaaatattttaataacggaaaatacggcttaaaagtattaatatccaattatattataaatgtacagtacaatggtcgacccgcgcggatttcaacaacgttgtgggcgagagtgagctactggaatggatcagcttccatggcacgatgggtgcccagtgtcacatatcgggcctcacccagggtcgtcgctacttcctgcgagccgcgtgcggcaatgtgaagggatggggcacctatcgaacctctgtgccggctagtgtagtgccctcaagtgagttgaatccaatatttaaataggcactgtttttaattgaagtctcttgtgcagcttggcgggatttagacaatcgagaggaccgattcgtgggtcgtcaccgaatcctggacaatctatttaccgccgtgcgtttggcaagacccgccgacgtatccgagctgactttggatcctgcgagcgcccaacgacgtaatcccaaaaagaagactaccattaagcagttgttctcggtaaccaccaagtttcaaaagacactgagacggtacggtaataatgaaatatccgattaagaatatacttactatttatttacttctttaaacagcggcatttacttctcttgtattattcattgcgatgataaagtgctggtcaccagcgaagactttccaccggtcatcgaggtggatgaatcctatccgagtgctttgcacatggattactactggctcatgaaagttgcctgcacctgggaggatgttaagtctctacgttcggatatggagcgcaatcttacctccgctgttcacttccgcactaagcttctatcggcggtctgtcagatgcaatcggcactaggcattacggacttgggccaactttactataaaccattgcgggatgctcagggcactgtggtcctaacctgtgtgcagtcggtaaagagccaaaaggccgtctccatcttaaactcgagatgggttccagtcagcaagctgcaaaagaagctaggtgctctacacgaggactacaccattaacgagctgctcatctcctcgattggagatcaattgcactatcaacaggcggcgctgcagcgtttggagcccggtctttacctgggctacctaaagatgcaatgctccatagaccagatccaggtggttgtgcccgtgaaaacgccgaatgtcttgccccactgcaaggtgcgcgaaaacagtcacatcacggccgaagagtggcaggtgctccaccgttacagtagcgatcctctacgcctgccgttggactttagcgctcaaggaggagatggagcctccggagcaacagctactacggaggtgcaacgcctatttttatacgatctcaccaatgcaatgcacaaactgtttgccagtatgaacatcaaaatcgctgatgcaaccactcaccgcttgtacgacgtggaggtgattgagcatagtccggatattagtttcctcgtggtgtgtccatccgccgagtcctcatgcgctgtgcccggtcagtctgagttactgctacagcgagatgacttggccagcttgagtatccaggcctttgagatgattcacctgcgcacttatcagccggccatcattcagaagtacgcccgtttatcttgcatccttgaattggataccgcactggccacacattcgcttcgcgaggcattctccagcagtgaactgcaggcggccaaggaacgtttggccacgctgcaggagctcagtgcgagtcttacgattgtgtggaaaagtgtgcgatggctaatggatgtggtggcatatgcgcgaaacaaaaacgctcaaccctcgttggctatgcgagaaattctggactttgcacagcaaagacaggacgaagcggtagcgacatcggcaggaggttccgcgaacaaacagctgctgcagctgcccatccgcgagagcaagttctccaagacgggccagggaagaggcagttggccgggaccgggaactagtgaagatcaatcgcagaacaagccggagcactccaagtctgaacagaatctggaactgagtgctatcacgccagtggaacctgcatccaatcaagttcctacacagcagcagcagccgcagcagcaatcgcagcaacagcaactcttacaagtttccaacatcagcgaatacgcgggatcgatttgctcagaagtatcatttaggaagaatagtggcgattccatgagctccacctacacgtcccggagcttctactctgccgtggactcagcctcagatggaaatagcacaaacagtgtgtttgccattccgccctctcgttccgacgacactctggcggatgcactgcgccactcgcaagcggtagctgcgcaacgcaaacgaaccagctctaatatcgcatctcataccaatcccttgattacggtgcacagctctagttcggctccgtacctggctggatccagtgtttccttgagaagcggcaacggagccttcgcaacggatttggagcacaaaccgctgaagccagcgacaaaggctgcatctagtgcaaacctgcgcgaaggtggaccctatttgaaaagcacgttagctgaactacgagctgttggaggtgaggagccggtggccagtacttcaaaggcctcttcgatgaagagcttgtcgcggcagagcagcgaagaggattccgccagctgttccagtctcaacgcagagcagacatcggggatcattcaagtctataccgcctacagtacgggtctggccagtggaaccagcttaaagattcacgtaactccgaagacgactgcccgcgaagtgatcaacctggtggtgaagcaacttaacatggccgtggttctcaaagggaacaatggccccatctatggacccgagatgctagagaacttttgcctggttgcggtgattggagcaagggaacgctgcctgcgagatgacttcaaaccgctgcaactgcagaatccctggaagaagggccgtctgtacgtccgcaagaagcatgagctgctggcggccatcgaacactcgaatcggaaatcgcatttgatctgagcaatcggacacaaatctcactggaatcggagaagcatcgaaggagtgacgcacgctatattgttagtggtgacaagaagatctgtagagatttaagaacttaagatttaggtgcccgaaagtaggcaaataacttggttcatacaccattgattatgttattgaatcttttgcgatttttcggctagccggtattatcgtatcagccgttccgactcttgttagatttagttgtgcttttgtttttgggttcatccaatccaccattcccaaatccttccaccctgtccagggcaatgatcgttgaccaattccagaattagactgaattacttatgtatgctgcaatggcaaactgatgaaattgtaattgaaatggtattatattttcagtagttatacattcaacattacccaggcaaacaaacacacacacgaatcggattaaaacagaaaaagattgttgttagttgttctagagtattgaaggttacgcccgtacataagtagtatgtatgaatgttatataaatattatgcgtgcatcaatgtattttattgtatgtattgtagtttagtaaacaaatgttttgattgtatttttgtggcattttttaggggcacattttttgatctaaatgttaaatcggtaaatacggaacacaaaaccaaatcaaatcgatggcgaaactcaaagaacagatgtcaatacgcattttaagtgtcactcttgatgtctttcatgtgtgtgtgtgtgtgttcttaaaaattgcaattccatcggattaaacaaataatttagctgtaatcaattgtttgtaaacaaaaatcaccgcaacaaaaatgataacgaaacccgaagatattttttaaaaatatattggcacaactgaatgttgaaaaaaaaaattataggcaactgcaaattgaaactcaattgtttgtgtttattaattgtagcaatgcgatatttcccagcccgtaacccaatatactccactcagcaattgtcgcgccgagattcctatacttgataatcctataccccatttccacaaatctactcaactgttggccgacttagaaaccatactattaacgtggctatctcaatgtgcaaagccgtatgtgtctatgaataactactctactctgtactctcacaataggaaataccataagtaaattagattgaattcttcagatacacgtacatatactatctgttgtgaatcggtagacaaagcagcagttttaagtgtcaagctcataatgtcccaattaaagtttatttccattggacgaca

SEQ ID NO: 15272 - DNA, 5223 bp, DROSOPHILA
atggagcgtcgcaaggctctcagttcgtatgccaagttcaaggatcagcaggaggcggcggcggcagttaccccgcagaaggacaatgagagcgatgactcgctgcccgccttgcggcgctctcattccgtccgttcctctctacggcggctaaaaaacaagctgcacagtcccgccctatcaatgcagtctccctttaagctgcgcacccagctgcacatgcgcaatcgcagctcgcgaggatcggccaccttggacaaaagcaaggcggccaaggcactacgcatgctgggcgatctggatgcagtggctgttctgaccacaaaagtgaagggcaagaacgaatttgtgccgctgaaaagagcaatgaactcagattcctgtgatcacgatgaacttggcatcgaaaggctcatgtcctccttgccagtgggtgcaaagctgcctcgaaaggcctgcaagttgctccagatccccgagagctactgccgacaagccgaagtcgcgccgaaagccacactcgactcggatctggagaagaccttcagtggcgaggaatccagtgccgtgctggcggatatcactcgacatgcccagcagggcatctatggaacgacacgcatgcgcacggcgacaattcggaagccgatgccctacctgaacagccgtagatgctaccacagcgatagcactaaacttcccaatatgccgcaaaagctcccgatgagcagctgtctgcgttctccggcggtcttcgttcgccagaaatcgtttcacacgctcaacgagctgaccaggttctgtcaattgaaagtgtccccacatcggtccaccgccacagccacctccacatcatcgtcaccatcatcgtcgccggcagcggcgcaacagcagcgtcgccacagtcactatgccatcgatgacaacatattgccgcaagataaacgtgacggtgacatcgatagtgtcaggctgcgggagaaggtggttaatcccagtggcggcaataacaataaccaggacaactatcccacctattatccggcaccattgctgtccaccagtcgctggtcggagcagttgacacagcatgcggcagtagccaagatacggacagccatctcctgccactcccaggatctcagggaaatggaattcctactgccccattcgcgaaccgattcccaatcgaattcccaatcgcaactgtgcatttcgcggcactcgcagccgaaaaatgccaagctgcgggatgatcacgatgagacgggctcatcggaattggattcaccaccgctgggtgatgagaatgcctcggcgaatggccaactttcggtgcacaggcagccggtacagctgcggagtaagatcccgggaaacacacctcatccgcgggccagcaaaatgtccaagaaacagctgaagttggcccaggcccagctggacaaactgacgcagaacaatctgcatctgcatgctctcttctcggcagtggagcatggtcacctggagaaggcgcgcactattctagagtccaccgacgtagatgtaaacagcatcaataacgatggactatctgctctggacttggcggtgttaagcaataatcgctccatgaccaggatgctgcttcagcatggcgctgtggagggctctcagttctctgtggacaccattggcaccaaactgaacggcttgctcaaggacgccgagtcaagaattcacgatctaagtggaccggagggcctctgtccgccggtgtttgcatcgcgtccctccatctcgagcatcataattggcaattccagtgcatcggtaactggctgcacgggcagcgaggtggaaaaacagataggcatctgggagcgccgagttaagggactgcgtcgcttgcagctcggttgggatcaggccaggccgccagatgcacccgcctccgtggtcgtcgacgtcactggcgacaattccatcagcgtacaaatcctagagcccttcgagggggccatcggcacgaaatttaaagtacaatggtcgacccgcgcggatttcaacaacgttgtgggcgagagtgagctactggaatggatcagcttccatggcacgatgggtgcccagtgtcacatatcgggcctcacccagggtcgtcgctacttcctgcgagccgcgtgcggcaatgtgaagggatggggcacctatcgaacctctgtgccggctagtgtagtgccctcaacttggcgggatttagacaatcgagaggaccgattcgtgggtcgtcaccgaatcctggacaatctatttaccgccgtgcgtttggcaagacccgccgacgtatccgagctgactttggatcctgcgagcgcccaacgacgtaatcccaaaaagaagactaccattaagcagttgttctcggtaaccaccaagtttcaaaagacactgagacgcggcatttacttctcttgtattattcattgcgatgataaagtgctggtcaccagcgaagactttccaccggtcatcgaggtggatgaatcctatccgagtgctttgcacatggattactactggctcatgaaagttgcctgcacctgggaggatgttaagtctctacgttcggatatggagcgcaatcttacctccgctgttcacttccgcactaagcttctatcggcggtctgtcagatgcaatcggcactaggcattacggacttgggccaactttactataaaccattgcgggatgctcagggcactgtggtcctaacctgtgtgcagtcggtaaagagccaaaaggccgtctccatcttaaactcgagatgggttccagtcagcaagctgcaaaagaagctaggtgctctacacgaggactacaccattaacgagctgctcatctcctcgattggagatcaattgcactatcaacaggcggcgctgcagcgtttggagcccggtctttacctgggctacctaaagatgcaatgctccatagaccagatccaggtggttgtgcccgtgaaaacgccgaatgtcttgccccactgcaaggtgcgcgaaaacagtcacatcacggccgaagagtggcaggtgctccaccgttacagtagcgatcctctacgcctgccgttggactttagcgctcaaggaggagatggagcctccggagcaacagctactacggaggtgcaacgcctatttttatacgatctcaccaatgcaatgcacaaactgtttgccagtatgaacatcaaaatcgctgatgcaaccactcaccgcttgtacgacgtggaggtgattgagcatagtccggatattagtttcctcgtggtgtgtccatccgccgagtcctcatgcgctgtgcccggtcagtctgagttactgctacagcgagatgacttggccagcttgagtatccaggcctttgagatgattcacctgcgcacttatcagccggccatcattcagaagtacgcccgtttatcttgcatccttgaattggataccgcactggccacacattcgcttcgcgaggcattctccagcagtgaactgcaggcggccaaggaacgtttggccacgctgcaggagctcagtgcgagtcttacgattgtgtggaaaagtgtgcgatggctaatggatgtggtggcatatgcgcgaaacaaaaacgctcaaccctcgttggctatgcgagaaattctggactttgcacagcaaagacaggacgaagcggtagcgacatcggcaggaggttccgcgaacaaacagctgctgcagctgcccatccgcgagagcaagttctccaagacgggccagggaagaggcagttggccgggaccgggaactagtgaagatcaatcgcagaacaagccggagcactccaagtctgaacagaatctggaactgagtgctatcacgccagtggaacctgcatccaatcaagttcctacacagcagcagcagccgcagcagcaatcgcagcaacagcaactcttacaagtttccaacatcagcgaatacgcgggatcgatttgctcagaagtatcatttaggaagaatagtggcgattccatgagctccacctacacgtcccggagcttctactctgccgtggactcagcctcagatggaaatagcacaaacagtgtgtttgccattccgccctctcgttccgacgacactctggcggatgcactgcgccactcgcaagcggtagctgcgcaacgcaaacgaaccagctctaatatcgcatctcataccaatcccttgattacggtgcacagctctagttcggctccgtacctggctggatccagtgtttccttgagaagcggcaacggagccttcgcaacggatttggagcacaaaccgctgaagccagcgacaaaggctgcatctagtgcaaacctgcgcgaaggtggaccctatttgaaaagcacgttagctgaactacgagctgttggaggtgaggagccggtggccagtacttcaaaggcctcttcgatgaagagcttgtcgcggcagagcagcgaagaggattccgccagctgttccagtctcaacgcagagcagacatcggggatcattcaagtctataccgcctacagtacgggtctggccagtggaaccagcttaaagattcacgtaactccgaagacgactgcccgcgaagtgatcaacctggtggtgaagcaacttaacatggccgtggttctcaaagggaacaatggccccatctatggacccgagatgctagagaacttttgcctggttgcggtgattggagcaagggaacgctgcctgcgagatgacttcaaaccgctgcaactgcagaatccctggaagaagggccgtctgtacgtccgcaagaagcatgagctgctggcggccatcgaacactcgaatcggaaatcgcatttgatctgagcaatcggacacaaatctcactggaatcggagaagcatcgaaggagtgacgcacgctatattgttagtggtgacaagaagatctgtagagatttaagaacttaagatttaggtgcccgaaagtaggcaaataacttggttcatacaccattgattatgttattgaatcttttgcgatttttcggctagccggtattatcgtatcagccgttccgactcttgttagatttagttgtgcttttgtttttgggttcatccaatccaccattcccaaatccttccaccctgtccagggcaatgatcgttg

SEQ ID NO: 15273 - protein, 1638 aa, DROSOPHILA
MERRKALSSYAKFKDQQEAAAAVTPQKDNESDDSLPALRRSHSVRSSLRRLKNKLHSPALSMQSPFKLRTQLHMRNRSSRGSATLDKSKAAKALRMLGDLDAVAVLTTKVKGKNEFVPLKRAMNSDSCDHDELGIERLMSSLPVGAKLPRKACKLLQIPESYCRQAEVAPKATLDSDLEKTFSGEESSAVLADITRHAQQGIYGTTRMRTATIRKPMPYLNSRRCYHSDSTKLPNMPQKLPMSSCLRSPAVFVRQKSFHTLNELTRFCQLKVSPHRSTATATSTSSSPSSSPAAAQQQRRHSHYAIDDNILPQDKRDGDIDSVRLREKVVNPSGGNNNNQDNYPTYYPAPLLSTSRWSEQLTQHAAVAKIRTAISCHSQDLREMEFLLPHSRTDSQSNSQSQLCISRHSQPKNAKLRDDHDETGSSELDSPPLGDENASANGQLSVHRQPVQLRSKIPGNTPHPRASKMSKKQLKLAQAQLDKLTQNNLHLHALFSAVEHGHLEKARTILESTDVDVNSINNDGLSALDLAVLSNNRSMTRMLLQHGAVEGSQFSVDTIGTKLNGLLKDAESRIHDLSGPEGLCPPVFASRPSISSIIIGNSSASVTGCTGSEVEKQIGIWERRVKGLRRLQLGWDQARPPDAPASVVVDVTGDNSISVQILEPFEGAIGTKFKVQWSTRADFNNVVGESELLEWISFHGTMGAQCHISGLTQGRRYFLRAACGNVKGWGTYRTSVPASVVPSTWRDLDNREDRFVGRHRILDNLFTAVRLARPADVSELTLDPASAQRRNPKKKTTIKQLFSVTTKFQKTLRRGIYFSCIIHCDDKVLVTSEDFPPVIEVDESYPSALHMDYYWLMKVACTWEDVKSLRSDMERNLTSAVHFRTKLLSAVCQMQSALGITDLGQLYYKPLRDAQGTVVLTCVQSVKSQKAVSILNSRWVPVSKLQKKLGALHEDYTINELLISSIGDQLHYQQAALQRLEPGLYLGYLKMQCSIDQIQVVVPVKTPNVLPHCKVRENSHITAEEWQVLHRYSSDPLRLPLDFSAQGGDGASGATATTEVQRLFLYDLTNAMHKLFASMNIKIADATTHRLYDVEVIEHSPDISFLVVCPSAESSCAVPGQSELLLQRDDLASLSIQAFEMIHLRTYQPAIIQKYARLSCILELDTALATHSLREAFSSSELQAAKERLATLQELSASLTIVWKSVRWLMDVVAYARNKNAQPSLAMREILDFAQQRQDEAVATSAGGSANKQLLQLPIRESKFSKTGQGRGSWPGPGTSEDQSQNKPEHSKSEQNLELSAITPVEPASNQVPTQQQQPQQQSQQQQLLQVSNISEYAGSICSEVSFRKNSGDSMSSTYTSRSFYSAVDSASDGNSTNSVFAIPPSRSDDTLADALRHSQAVAAQRKRTSSNIASHTNPLITVHSSSSAPYLAGSSVSLRSGNGAFATDLEHKPLKPATKAASSANLREGGPYLKSTLAELRAVGGEEPVASTSKASSMKSLSRQSSEEDSASCSSLNAEQTSGIIQVYTAYSTGLASGTSLKIHVTPKTTAREVINLVVKQLNMAVVLKGNNGPIYGPEMLENFCLVAVIGARERCLRDDFKPLQLQNPWKKGRLYVRKKHELLAAIEHSNRKSHLI

SEQ ID NO: 15274 - DNA, 12519 bp, DROSOPHILA
gtgatacttatatcaataatacgaactgcgtagtaaattcttatattattgaagcaaatgtcaattcgaaattgatttatcaacttgattgtctaacaatgaattaacaataaaaaaaaggttcattgatgagcaaaggaaaacaaactacatagtatttgtatttaaatcatacccaaacaaaatgtaattaaaatatattttctattctgatttgagttgcattacaacattatactgtttttaaatactctaatttaaaatttactagattattacaaaactttgaaatccctgtattcttacaaaaaaaaaataactgttaaagtcaaattgaaacaataatgatatgtgctctaatcgcacatgatggttctttccctaaatcgcaattgaacgacgctggtcattggcaccacctcatggctgggtacttcagattgcattatattggtattagcttgcgttatccatgaggtacggaacactcatgatcaatcacatgactcatgggcagggtcagttacggtgatattcgcatgtaagccaatgtgcagctcatggttagataagcggcgatttgtgagatacacgattatatggctaatcatgacgtatgcaaaatgcatgtggtgcggtgagcagcatacggcatatcccctggaagccgaatttgtatttcgctgagagcgccgccatatggagacagtgtgacgataagggctgccaaaaagcattcaatattcattatcagacgagataacagttggcaatactcactccgccagccgaatcgttcgaggaccccgttgagcagagcccagacgtttgcgagactccgaaccgaacagaactacagaaaacttcgattaaaaacggctgtggcaacagaaccgaaatctttgggcaaatatttgccaattaagaaccgtcgacggcgcgtgtgtctgtgaagtggggtgaagtgaaattggccaggccaataaaaaaaaaagcagtcatgtccgaatttgtgcggcaacatgtaagtgcgaatgccaaaaccgtaagcgtttagatcgacttcctggttgtcgtggcagtttttcccatccattctctctggttatcagaaaattactatgataaccgaatcgttttatcacattcctttggcagagcctctgctttaggcacatcatgggtctcattttaattttaaacttccctcctcttatcaactacactcacctacacgtggggtgttaattggaatgtagtaatacctgtgattatgggcataaagtattaacgagcaggtagcctaacaaaagattgtgtccgtcacgagctcaaatatgtctcgggtttcatttgcagaatacaaccaaaaatagcactatataaattccttatacttcctctctgagcaaatgtcttatcaaaatcgaagccaattatcgattgagtttagtcgccacaggaacagagatacgaaaaagctctataaaactctttggctaaagtaaacccgaaactacttaaggtagaatacattgcctttgattatgttttcgttatcagtctgtttttgtttattctaatccttccaaaaaaattagtattatacacccattagctaacactaatggttaaaatatttttgattactcgcagaaatgactcattgtttaaggaggtgatctcatggtcgaacactttagtataagcaaccgattttcaatcagtatttatggcgaaagtatagttctaaaatacaaatagatcggttttttatggcaggtgctcatgtcttttttttttggaagtggtaatgggtgacatcaactgatttcggttcgattggactttaatcttatcgcgaagtagataagcaaggtcgtagaagattgatgccagaaaatcaaattgtctagattacgtagattaaaatcatttcaaaattgttgctcttcgtggtgatccttagcttttggcaatgattacttgttcggctcccatgtcatgtcttcttctgttcacagttttattccgaaataccgataaaacgtccttgtatatcggcattccgccgataagataacgcctggcaacaactacttgcaaatgttggctaccgtttgctttcattacccatatttcattcacctatttctaaggcaatttatataaagcagacaaagtaaagtcaccgaaattggtttgggtgtggcaaagctataaaatatatctatatttcattggataattaagagtggcacgggttaattatttaacaacgcatttgatacctttctgatttcttatcgcagtctaaaatcgactaatataggcgccatatactaaagcattgaatataaggtgtttcgttagttaaataatagttaaaaaataaagttgaaagttcgttgatctctgccttaataaatgtgtcatatctatataagcctctgttaagttctcaggctttatttttcactttatgaacagtcaggaatttaaatttataaacttccaatgttatatcatttccactcggcggtgtaataatatcttatcagtatttacatttgagatatgacccactaccagttgccaataaaatgtttttgatttgccactgggttaatattgggcttgtagaattttggtgataatttaaataattccctgactttaatctctgatattttgtgatttcattaatacagggcgagtatgtgtgggtgaagccgcaaaatactaccagcgaattcgcagtgccctttggggctcgaattgtgcgaacggagaaaacacagaccctagtttgcgatgaccggaacaagcagttctgggttccagctggggatgtcctgaaggcaatgcatatcacctcccaggaggatgttgaggatatgatcactttgggtgacttacaggagtacactatactgaggaacctgcagaacagatatgccaagcaattaatatatgtgagtttactagtatttacttaataagttgcctagctagctaaccatatgtaaatatttttagacctacacaggctccatgttggtggccatcaatccgtaccagattctgcctatctacacgaatcgcgagatacagctctacagaaataagtcccttgctgaactacctcctcacattttcgccattagtgacaatgcctttcagagactacaaagacttaaggagaaccagtgcgtggtgatcagcggggagtcgggtgccgggaagacggagagcaccaagctgatccttcagtatctggccgcaattagtggcaaacactcgtggatcgagcagcaaatcatagaggccaatcctattatggaggcctttggcaatgccaagactgtacggaatgacaactcttcaaggttcggaaagtacatcgagatcagattcacgccacagggcgctattcaaggagctagaatccagcagtatcttctggaaaaatcccgaattgttttccagagtcgcgatgagcgcaactatcacattttctactgcatgttggcgggactttcaactgcggagagagagcgcctaaagctacaggagcaatcgccaagtcagtatcattacttggcccaaggaggatgctttactttgccaggaagaggtgatgccaaggattttgccgatattcgagcggctatgaaagtgctttcatttaagccggaggaagtgtggagcatacttagtttactggcggctattttgcacttgggaaacctcagattcacagccaccgaggttgccaatttggctacggctgagatagacgatacaccaaatcttcagagggtggctcaattactgggaatacccatatctgctctgaatgctgctcttacgcaaagaaccatctttgtgcatggtgagcacgtgaccaccagtttgtccaaggaagcggctattgagggtcgagatgcttttgtaaaatcgttgtacgatggaatttttgtgcgcatcgtgcgaagaatcaatgagactataaacaagcaagtggatcagcccatgaatagcataggtgttctagatatcttcgggttcgagaacttcgacaataatagctttgaacaactgtgcatcaactatgccaacgaaaatctacagcaatttttcgtgggacatatcttcaaggtaagtgaacaaaataaaatatgtgatatcgttactaacaaaagcttccacacagatggaacaggatgagtaccagaacgagcatatcaactggcagcacattgagttccaggataatcagcaaatcctcgatctaattggcatgaaacccatgaacttgatgtccctcatcgacgaagagtccaagtttcccaagggcactgatcaaactctgctcgaaaagctacatgttcagcatggtaatcgatccatttacgtgaaaggtaaaaccacccaaacgtctctattcggaatccgtcattatgccggcgtcgtgatgtacaatccattgggctttcttgaaaagaacagggattcattcagcggagatcttaggactctggtgcagcgatcaacaaataaatatctggtggacatattcccccatgaaatgcccatggatacggccaagaagcagcccactttgtgcgtgaaattcagaaactctctggacatgctgatgcgcactttgtcgcaggcacatccctactttatccgttgcatcaagcccaatgaatacaaggaacctaaggtgagtgaaagattattcagttgaaataatttaattcaaggatgtaccttttcgaacctttttaagtactaatacaatatactgtttctactttttcttagaactttgacaaggagctgtgcgtgcggcagttgcgctactcaggaatgatggagacggctcgcattcgaagggctggctatccgatccgccacgcctaccgtgccttcgtggagagatatcgcctcttggtgccaccggtgggacctttggagcaatgtgactgccggaagttggcgcggcagatctgtgaagttgccctacctgccgattctgatcgtcagtacggaaaaacaaagctgttcctgcgggacgaggacgacgctagcctggaactgcagcggtcccagctgatgctcaagagtatcgtgacaattcagcgaggaatcagacgggtcttgttccgacgttacatgaagagataccgcgaggccattattacggttcagagatattggcgaggtcgcctgcagcgtcgtaagtaccaggttatgcggcagggattccatcgcctgggagcctgtatagctgcgcagcagttgaccaccaagttcacgatggtcaggtgtcgaaccataaaactgcaggccttgagtcgcgggtatctggtacgcaaggacttccagaaaaagttgttggagcggcgaaagcagaaccagctgaagaaggaggagttacttaagttggccaagatgaaggaagcagaggaactgctaagactgcagcaactgaaggagcagaaggagagagaacaaagagaacagcaggaaaaacgattgcaggaggagcagaggctcaaggccgaagcagcagccagaaatgcattggccatggctgcagtgcagcagaagaggcgaactaagcccgtcaagcaagaggctccaaaggctccaaccctgcaagcacgcaactccctgccaccaccacccaccacactgatagtagctgccccactacccactcgaccggccagtgccgttaccagaattaataccatacccgagagtcctggcaccattgatgtggagtcctccaagcaaatggtggatgacgtgttccgcttcctaaacgatgaacccgatgtgagtggtcctctggggccgaatgtcaaagagaagtctatgatgttcgagcaggcattgcgtctgcgtagagatgtgcccaccaagctcctttcccgcccggtcaactattacgaggcggcgcctaggaagattgtcaaccagacccgcctctagtagcgaatcaggctgggactggaaaagatccgaacaaactagacactcgtagctatggctaatattaaaacggctggaactggacagtattcactcttaatagtggtactgatcagtacgattggtaaaggacttagaaagcgctcttacccaacaattatccacgcaaaactgtaaataaatcttttttttctacaaacttcagtcaaaagaacatgtacatttgataaaaagcttatacaaatttgcttcttgaaaattgcgctttaattgggattccttatctgtataaaaatattttctttgctaatggcaacaagccatagctctactgaccaaacgaaattttccaaacaaatggtaccaacatactgatcagcgcacttccagagttttgtccagtccaacgacatagtttagcttggcttcaaatttattcgatcccgttgattttgggccacccattgggttcctttttaatgtacaaatcttatacataagtgcagtaaatgtcggcttgtatataaaaacatataacttggcttgtgattgcgttttgttacattttccttacttctaaatgtatcataattattaaactctgtaaataaaactctctaaggcaactatagacattaatgcgcattttgtttgtgtgttgtttactcgtctgcgttggttgtggttgtatggttatggggtaaagtcgaactccacaatccggcttttgtgctttgtgtccacgtccagtgagcgtcaccattaccattcaccattataatcgaaaaaaccatgagtgagcttgagtcatcagttcttacttatacaaatgtgacagtggacatgaatagtccaagtgtcttacaagggcatttaaacgctatcttgattagaataaattaattttttcaatagatagacgcaccacaggcgattttattgttattttattaaacctgccagatgattataacatgttttatataaagttctggagccttccacaatttctatttaaagaaagctaatgcagttatttagtaaaaattttttgaatgatttattgcattaatttaaatgcatgatttcaaagtgtatttaaaatgcttaagaggaccactaaagatctttatttcctttatgaagaatttttatagcaccataaaattagattatcaggaagcttatttatgagccaatttccttaccttttcgtttatatttcctctaaggaatttccctttacaaaaaatgtgctaatactttaccacgaataaattgtttgggccaaggctacaaaggtaatccgccaaaaatttaaataaaaccatccgcacccacccgcactaaattgtatttttatttaacaaaattttgaagaatattcccgtccaaccattttttagtacgcagatccatgtcgtgtcgtctttagtcagtaactaaatgggtgctaaacaaattttcgccgcgaggcctgagtttttcgaagcgtggccaaccccatacgctatcagttgtcggcagaagtttaaaacaaataccaaatgataaatgaaataaaacgggatcgtaaataatcgccgccgttcttatcgcgagggcatatcttcgggtgcagcataccagtactaccactggtcgcagtttatatttataaaagcttaccagtaaagcacctttcgataagtggcactcagattacaggtgtcgaaataattaatacggcagaattataaactctgtgctagtacctggtataagagatcgaaactagggagagtgaatctagcttgtataggtgtttgaaactttgtttaccctgtaaataaacatattatcatatactactttcaggcagccttgaggaaacttaacaacatctcttctggagatacaatacgtctacctaaatcggtgccaaataacatcgacacctccgatttcagttatttgaaatatgcggctacttacttcggcggtggcgccactgcacagcacgaaagaaagcctctgaagaaatctttgttaaaacatgaacatcccattgatgagatggcctctaaggtaagtccttgaaaagtgagtacatataaaagtataattaacatttaattgtaggccatttggttgactatactccgctttatgggcgacttgccggatgttgtttcctcgcctactcttcacgtattcgataatgaaaacttgatgagtgatttggcaagcctcttgaacacttctgattcctataagcctcgcttatttgtgcgccaatcccaaagacgtatcccaaagcctttggctagtggtgagaaggaagcccaggaattctatcaacactggctcaacgttcccacaagtcacctggagaaaattcacttcatcataggtcatggtataataaagaatagcttacggtatgttatgacaagaagacaggacatttctttgcatcaaaccaaacaattcattattgcagagacgaaatcttggcccagatctgcaagcagctatatcttaacccaagtcggagctcctactcccgcggatggttgctcctttcgctatgcctcagctgctttccacccagcaaggagtttgagccacacttgcgcagtttcatgaagcagggaactgcccaactgcaggccactccatccctgcagcgattggagcgaaccctggtcaatggaccacgctgtcagccaccttcgttatttgagctccacgcaatccgcggtcgccacccgcttaggttggacattcacctgatggatgggcagcagagaagattgcaggtggatgcggccagtacagctcgagaggcagtcaatcaactttgtcagggtatggggctaaccgacacctttggctttggattggtgatgtcattgaatgggaagctaatgccgctgggagcaggtcaggagcatgtcctggatgccatttcggagtgcgagcaacgtcagctggatgcaccttggaaactatacatccgaaaggaaatgtttgccacttggtatgatccctcgatggatcccaaggccactcaacttatatacaagcaaattctaaacgggttgaagtgcggagagtatcgatgtcgctccgagaaggacatagcaatggtgtgtgctctggcctgctttgtagaatatggacctggggagattcttcgattgaagccatcggagatcactgcatttgtcccaagtgatcttctagctcccggcgagcgagccattgagaactggagtcgcctaatagctgccacctacgagaagagctcttatgtcaaagaagaacagaatgacctgctattggaggcgcagaagagagccaaggaggatatatgtctgtttgcacatctctcctggcctatgaggcactcccgactgtttgaagtggttcgcaaagagggaccaaaactccaaagcgatgaacttatgctgggcattaattccgcgggccttttccttatcgacgaaaccgaacaggtgctggcatcctgttgttttagcgaggtgctgaaagtgcacgtggaatcagatgataaactgcatgttatgaccttccaacacgtcaattttgtgctgcagtgcagctctgctcaggatgccaacgaggtgataaactatatgctggataatctccgacagcgttcaagctatggcgtagctcttgatccggtcgtagagggggatctagaggattgtctagtgctaaaccccggtgacctaatcgaattcgaggcaggtgtaacaggtgcccagttaatggctggtaatgcacaagactgctacaggggatgtgtcaatggccagtggggtcagtttttagctggaaatgttcgcgttttggccacgctcaccaagccgagtgaaaaacttcaagatatcctccgagaaggccgatttcaagaacccccgaaaccaactccaagagccaattactctcgtcgtcgtcaacacaatatctctcagctggctgagagccactttagggagccattggagtaagtaaaccaagttaatatggcatttaattcaaacattatttttttagctccgataaggcaccactatcaaagttttcacctgagcctctgaaagccccgctgctcaaagctgttgttaaggtaccgccacttttccagcaggcattggttatgcatcatcatattcttaaggtaggatatgggatgaatagaagatacatcttatagttcttacaaccaatacgttctgaacatatagtacatgggtgacatagcaaggagcaatctaccggtcaacacggacctcattttccagccagcactgcagcatccgctgttgtgtgacgaactctactgccagctgatgaagcaactgagcgataatccctccagtgaaagcgagaagcggggctgggacctgctttacttggccacgggcttggtggctcccagtgtcttggtcatgagggagctgatcatactactgcgcatgcgtgcagacgccctggccgatgcttgcctgaagcgactgaagcgatccttggcacagggccagcgaaaaaaggcaccacatctcatagaggtcgagggaattcaacagcgatgcctgcatatctaccacaagatatatttccccgacgatacggttgaggctttcgagattgaatcacacacccggggagcagagctcatagcggacatagcccagagattggagctcaaatcacctgtgggttatagtattttcttgaagacaggcgacagggtctatgctatgccggaagaggagttcgtttttgatttcatcacccaactcatctactggctaagacagcagaggaccatacgctccatatccgatggccaataccaactgcacttcatgagaaagttatggttaaacaaccatccaggcgaagacctcaatggagatatgatctttagctatccccaagagctgcacaaatacttgaagggctactatcccatcgattgcgagcaggcctcgcgtttggcaattcttgtgtacagtgcagatcatgacgttagcttgcagcggctgcccgaagtgctgacacgtttaattcctgaagacctaataccgcttcaaacggtggccgaatggaggcagcagatcctgcccaaggtccaccgcgatcatttaacggaagatcacgccaagattttgttccttcaagagctgtcccatttcgcttgcttcggttccacattctttgtggtgaagcaacaaaatgacgatgcccttcccgaaactcttttaatcgcaattaacagcacaggtttccatatgctggatccgacaactaaggagatccttcgcagctatgaatactcccagttgggtatttggagctcgggtaagaaccacttccacattcgttttggtaacatgatcggagcatcgaagctgctgtgcagcaccacccaaggatacaaaatggacgatttgctggcctcttatgttaagtattttaatgaacacgaataaatcataaattcgggataaataaatcgtgctcttacaagtagcccaactccttggtcttttcaattaaagccagcattccaaccattagctcctcgcagttgggaatgatctgcactggtggcaggataaagccgtagcgacccttatcacggtactcgattgtgtaaccgatcttcttgcccagctcgttgaacacccagtccacggaggttccagtggccacatctgttttaaaatgtcataaatatttagtaggcataatttagcatgctagttattttagttttattaaggcaatacttacaaagcacatcagctgtagagccatactggtagacggttccgtacggcagtgcttcaatggcatcggcaaaagctttgccaatagtcaggatatcattgtaattttctgggaactcctcattggtatgaccgtagggcgaaagcaaatactgtccatatgagtggaaggatatgtacacactaatttggtcctggattttggtcaagtactcgaccaaggccttggcttcaggctcagattcagggttatccccagcaaaagtctcactgcagggattgtcagaggctccattgttctggagccaataggagtcgaagttcctattggcgtcagctccaatgcatgcattcgtggcatgtggctgacgtgttttgcgccacatacgatcctgttattgcataatgatttaaatatataaatagatgtcaaaatcagtgaaagcattcactcaccttcttgtgtgagtactcaaaaccatctacattgaacacgggaattatatgccaatcatagttatcggccaaacttcgcacatcggcatcctctgaggtcaaaagctgattgatgaaccatgtagcactggccgaagttatccattctctggcatgaatgttggactcgatgaaaatgccaggattgccagccttgtgggagatcttaatgcctctaatggttctcccctcgtaggacttgcca

SEQ ID NO: 15275 - DNA, 6390 bp, DROSOPHILA
atgtccgaatttgtgcggcaacatgtgatttcattaatacagggcgagtatgtgtgggtgaagccgcaaaatactaccagcgaattcgcagtgccctttggggctcgaattgtgcgaacggagaaaacacagaccctagtttgcgatgaccggaacaagcagttctgggttccagctggggatgtcctgaaggcaatgcatatcacctcccaggaggatgttgaggatatgatcactttgggtgacttacaggagtacactatactgaggaacctgcagaacagatatgccaagcaattaatatatacctacacaggctccatgttggtggccatcaatccgtaccagattctgcctatctacacgaatcgcgagatacagctctacagaaataagtcccttgctgaactacctcctcacattttcgccattagtgacaatgcctttcagagactacaaagacttaaggagaaccagtgcgtggtgatcagcggggagtcgggtgccgggaagacggagagcaccaagctgatccttcagtatctggccgcaattagtggcaaacactcgtggatcgagcagcaaatcatagaggccaatcctattatggaggcctttggcaatgccaagactgtacggaatgacaactcttcaaggttcggaaagtacatcgagatcagattcacgccacagggcgctattcaaggagctagaatccagcagtatcttctggaaaaatcccgaattgttttccagagtcgcgatgagcgcaactatcacattttctactgcatgttggcgggactttcaactgcggagagagagcgcctaaagctacaggagcaatcgccaagtcagtatcattacttggcccaaggaggatgctttactttgccaggaagaggtgatgccaaggattttgccgatattcgagcggctatgaaagtgctttcatttaagccggaggaagtgtggagcatacttagtttactggcggctattttgcacttgggaaacctcagattcacagccaccgaggttgccaatttggctacggctgagatagacgatacaccaaatcttcagagggtggctcaattactgggaatacccatatctgctctgaatgctgctcttacgcaaagaaccatctttgtgcatggtgagcacgtgaccaccagtttgtccaaggaagcggctattgagggtcgagatgcttttgtaaaatcgttgtacgatggaatttttgtgcgcatcgtgcgaagaatcaatgagactataaacaagcaagtggatcagcccatgaatagcataggtgttctagatatcttcgggttcgagaacttcgacaataatagctttgaacaactgtgcatcaactatgccaacgaaaatctacagcaatttttcgtgggacatatcttcaagatggaacaggatgagtaccagaacgagcatatcaactggcagcacattgagttccaggataatcagcaaatcctcgatctaattggcatgaaacccatgaacttgatgtccctcatcgacgaagagtccaagtttcccaagggcactgatcaaactctgctcgaaaagctacatgttcagcatggtaatcgatccatttacgtgaaaggtaaaaccacccaaacgtctctattcggaatccgtcattatgccggcgtcgtgatgtacaatccattgggctttcttgaaaagaacagggattcattcagcggagatcttaggactctggtgcagcgatcaacaaataaatatctggtggacatattcccccatgaaatgcccatggatacggccaagaagcagcccactttgtgcgtgaaattcagaaactctctggacatgctgatgcgcactttgtcgcaggcacatccctactttatccgttgcatcaagcccaatgaatacaaggaacctaagaactttgacaaggagctgtgcgtgcggcagttgcgctactcaggaatgatggagacggctcgcattcgaagggctggctatccgatccgccacgcctaccgtgccttcgtggagagatatcgcctcttggtgccaccggtgggacctttggagcaatgtgactgccggaagttggcgcggcagatctgtgaagttgccctacctgccgattctgatcgtcagtacggaaaaacaaagctgttcctgcgggacgaggacgacgctagcctggaactgcagcggtcccagctgatgctcaagagtatcgtgacaattcagcgaggaatcagacgggtcttgttccgacgttacatgaagagataccgcgaggccattattacggttcagagatattggcgaggtcgcctgcagcgtcgtaagtaccaggttatgcggcagggattccatcgcctgggagcctgtatagctgcgcagcagttgaccaccaagttcacgatggtcaggtgtcgaaccataaaactgcaggccttgagtcgcgggtatctggtacgcaaggacttccagaaaaagttgttggagcggcgaaagcagaaccagctgaagaaggaggagttacttaagttggccaagatgaaggaagcagaggaactgctaagactgcagcaactgaaggagcagaaggagagagaacaaagagaacagcaggaaaaacgattgcaggaggagcagaggctcaaggccgaagcagcagccagaaatgcattggccatggctgcagtgcagcagaagaggcgaactaagcccgtcaagcaagaggctccaaaggctccaaccctgcaagcacgcaactccctgccaccaccacccaccacactgatagtagctgccccactacccactcgaccggccagtgccgttaccagaattaataccatacccgagagtcctggcaccattgatgtggagtcctccaagcaaatggtggatgacgtgttccgcttcctaaacgatgaacccgatgtgagtggtcctctggggccgaatgtcaaagagaagtctatgatgttcgagcaggcattgcgtctgcgtagagatgtgcccaccaagctcctttcccgcccggcagccttgaggaaacttaacaacatctcttctggagatacaatacgtctacctaaatcggtgccaaataacatcgacacctccgatttcagttatttgaaatatgcggctacttacttcggcggtggcgccactgcacagcacgaaagaaagcctctgaagaaatctttgttaaaacatgaacatcccattgatgagatggcctctaaggccatttggttgactatactccgctttatgggcgacttgccggatgttgtttcctcgcctactcttcacgtattcgataatgaaaacttgatgagtgatttggcaagcctcttgaacacttctgattcctataagcctcgcttatttgtgcgccaatcccaaagacgtatcccaaagcctttggctagtggtgagaaggaagcccaggaattctatcaacactggctcaacgttcccacaagtcacctggagaaaattcacttcatcataggtcatggtataataaagaatagcttacgctgctttccacccagcaaggagtttgagccacacttgcgcagtttcatgaagcagggaactgcccaactgcaggccactccatccctgcagcgattggagcgaaccctggtcaatggaccacgctgtcagccaccttcgttatttgagctccacgcaatccgcggtcgccacccgcttaggttggacattcacctgatggatgggcagcagagaagattgcaggtggatgcggccagtacagctcgagaggcagtcaatcaactttgtcagggtatggggctaaccgacacctttggctttggattggtgatgtcattgaatgggaagctaatgccgctgggagcaggtcaggagcatgtcctggatgccatttcggagtgcgagcaacgtcagctggatgcaccttggaaactatacatccgaaaggaaatgtttgccacttggtatgatccctcgatggatcccaaggccactcaacttatatacaagcaaattctaaacgggttgaagtgcggagagtatcgatgtcgctccgagaaggacatagcaatggtgtgtgctctggcctgctttgtagaatatggacctggggagattcttcgattgaagccatcggagatcactgcatttgtcccaagtgatcttctagctcccggcgagcgagccattgagaactggagtcgcctaatagctgccacctacgagaagagctcttatgtcaaagaagaacagaatgacctgctattggaggcgcagaagagagccaaggaggatatatgtctgtttgcacatctctcctggcctatgaggcactcccgactgtttgaagtggttcgcaaagagggaccaaaactccaaagcgatgaacttatgctgggcattaattccgcgggccttttccttatcgacgaaaccgaacaggtgctggcatcctgttgttttagcgaggtgctgaaagtgcacgtggaatcagatgataaactgcatgttatgaccttccaacacgtcaattttgtgctgcagtgcagctctgctcaggatgccaacgaggtgataaactatatgctggataatctccgacagcgttcaagctatggcgtagctcttgatccggtcgtagagggggatctagaggattgtctagtgctaaaccccggtgacctaatcgaattcgaggcaggtgtaacaggtgcccagttaatggctggtaatgcacaagactgctacaggggatgtgtcaatggccagtggggtcagtttttagctggaaatgttcgcgttttggccacgctcaccaagccgagtgaaaaacttcaagatatcctccgagaaggccgatttcaagaacccccgaaaccaactccaagagccaattactctcgtcgtcgtcaacacaatatctctcagctggctgagagccactttagggagccattggactccgataaggcaccactatcaaagttttcacctgagcctctgaaagccccgctgctcaaagctgttgttaaggtaccgccacttttccagcaggcattggttatgcatcatcatattcttaagtacatgggtgacatagcaaggagcaatctaccggtcaacacggacctcattttccagccagcactgcagcatccgctgttgtgtgacgaactctactgccagctgatgaagcaactgagcgataatccctccagtgaaagcgagaagcggggctgggacctgctttacttggccacgggcttggtggctcccagtgtcttggtcatgagggagctgatcatactactgcgcatgcgtgcagacgccctggccgatgcttgcctgaagcgactgaagcgatccttggcacagggccagcgaaaaaaggcaccacatctcatagaggtcgagggaattcaacagcgatgcctgcatatctaccacaagatatatttccccgacgatacggttgaggctttcgagattgaatcacacacccggggagcagagctcatagcggacatagcccagagattggagctcaaatcacctgtgggttatagtattttcttgaagacaggcgacagggtctatgctatgccggaagaggagttcgtttttgatttcatcacccaactcatctactggctaagacagcagaggaccatacgctccatatccgatggccaataccaactgcacttcatgagaaagttatggttaaacaaccatccaggcgaagacctcaatggagatatgatctttagctatccccaagagctgcacaaatacttgaagggctactatcccatcgattgcgagcaggcctcgcgtttggcaattcttgtgtacagtgcagatcatgacgttagcttgcagcggctgcccgaagtgctgacacgtttaattcctgaagacctaataccgcttcaaacggtggccgaatggaggcagcagatcctgcccaaggtccaccgcgatcatttaacggaagatcacgccaagattttgttccttcaagagctgtcccatttcgcttgcttcggttccacattctttgtggtgaagcaacaaaatgacgatgcccttcccgaaactcttttaatcgcaattaacagcacaggtttccatatgctggatccgacaactaaggagatccttcgcagctatgaatactcccagttgggtatttggagctcgggtaagaaccacttccacattcgttttggtaacatgatcggagcatcgaagctgctgtgcagcaccacccaaggatacaaaatggacgatttgctggcctcttatgttaagtattttaatgaacacgaataa

SEQ ID NO: 15276 - protein, 2129 aa, DROSOPHILA
MSEFVRQHVISLIQGEYVWVKPQNTTSEFAVPFGARIVRTEKTQTLVCDDRNKQFWVPAGDVLKAMHITSQEDVEDMITLGDLQEYTILRNLQNRYAKQLIYTYTGSMLVAINPYQILPIYTNREIQLYRNKSLAELPPHIFAISDNAFQRLQRLKENQCVVISGESGAGKTESTKLILQYLAAISGKHSWIEQQIIEANPIMEAFGNAKTVRNDNSSRFGKYIEIRFTPQGAIQGARIQQYLLEKSRIVFQSRDERNYHIFYCMLAGLSTAERERLKLQEQSPSQYHYLAQGGCFTLPGRGDAKDFADIRAAMKVLSFKPEEVWSILSLLAAILHLGNLRFTATEVANLATAEIDDTPNLQRVAQLLGIPISALNAALTQRTIFVHGEHVTTSLSKEAAIEGRDAFVKSLYDGIFVRIVRRINETINKQVDQPMNSIGVLDIFGFENFDNNSFEQLCINYANENLQQFFVGHIFKMEQDEYQNEHINWQHIEFQDNQQILDLIGMKPMNLMSLIDEESKFPKGTDQTLLEKLHVQHGNRSIYVKGKTTQTSLFGIRHYAGVVMYNPLGFLEKNRDSFSGDLRTLVQRSTNKYLVDIFPHEMPMDTAKKQPTLCVKFRNSLDMLMRTLSQAHPYFIRCIKPNEYKEPKNFDKELCVRQLRYSGMMETARIRRAGYPIRHAYRAFVERYRLLVPPVGPLEQCDCRKLARQICEVALPADSDRQYGKTKLFLRDEDDASLELQRSQLMLKSIVTIQRGIRRVLFRRYMKRYREAIITVQRYWRGRLQRRKYQVMRQGFHRLGACIAAQQLTTKFTMVRCRTIKLQALSRGYLVRKDFQKKLLERRKQNQLKKEELLKLAKMKEAEELLRLQQLKEQKEREQREQQEKRLQEEQRLKAEAAARNALAMAAVQQKRRTKPVKQEAPKAPTLQARNSLPPPPTTLIVAAPLPTRPASAVTRINTIPESPGTIDVESSKQMVDDVFRFLNDEPDVSGPLGPNVKEKSMMFEQALRLRRDVPTKLLSRPAALRKLNNISSGDTIRLPKSVPNNIDTSDFSYLKYAATYFGGGATAQHERKPLKKSLLKHEHPIDEMASKAIWLTILRFMGDLPDVVSSPTLHVFDNENLMSDLASLLNTSDSYKPRLFVRQSQRRIPKPLASGEKEAQEFYQHWLNVPTSHLEKIHFIIGHGIIKNSLRCFPPSKEFEPHLRSFMKQGTAQLQATPSLQRLERTLVNGPRCQPPSLFELHAIRGRHPLRLDIHLMDGQQRRLQVDAASTAREAVNQLCQGMGLTDTFGFGLVMSLNGKLMPLGAGQEHVLDAISECEQRQLDAPWKLYIRKEMFATWYDPSMDPKATQLIYKQILNGLKCGEYRCRSEKDIAMVCALACFVEYGPGEILRLKPSEITAFVPSDLLAPGERAIENWSRLIAATYEKSSYVKEEQNDLLLEAQKRAKEDICLFAHLSWPMRHSRLFEVVRKEGPKLQSDELMLGINSAGLFLIDETEQVLASCCFSEVLKVHVESDDKLHVMTFQHVNFVLQCSSAQDANEVINYMLDNLRQRSSYGVALDPVVEGDLEDCLVLNPGDLIEFEAGVTGAQLMAGNAQDCYRGCVNGQWGQFLAGNVRVLATLTKPSEKLQDILREGRFQEPPKPTPRANYSRRRQHNISQLAESHFREPLDSDKAPLSKFSPEPLKAPLLKAVVKVPPLFQQALVMHHHILKYMGDIARSNLPVNTDLIFQPALQHPLLCDELYCQLMKQLSDNPSSESEKRGWDLLYLATGLVAPSVLVMRELIILLRMRADALADACLKRLKRSLAQGQRKKAPHLIEVEGIQQRCLHIYHKIYFPDDTVEAFEIESHTRGAELIADIAQRLELKSPVGYSIFLKTGDRVYAMPEEEFVFDFITQLIYWLRQQRTIRSISDGQYQLHFMRKLWLNNHPGEDLNGDMIFSYPQELHKYLKGYYPIDCEQASRLAILVYSADHDVSLQRLPEVLTRLIPEDLIPLQTVAEWRQQILPKVHRDHLTEDHAKILFLQELSHFACFGSTFFVVKQQNDDALPETLLIAINSTGFHMLDPTTKEILRSYEYSQLGIWSSGKNHFHIRFGNMIGASKLLCSTTQGYKMDDLLASYVKYFNEHE

SEQ ID NO: 15277 - DNA, 3241 bp, DROSOPHILA
acctgcccaaacacatacacacacagctgcatttaagttgctttgttcggtccgggcattgtctttactcacacatacccaaacccacccacccacactaccaccaccaccaacacaaacacttcagagacaccatcaccatcaccatcatcatcaccatcatcatcatcaccatcaggatcattatgttgattgtaagcggctttgtaaatgctttattttgcgtgtgtttgttcattgtttatttacatttagtagcgcttaattttcactctctgcatggactctctaccatacttctatctttctttctctccccaaactgctaagctaatgatctactttcatatttatatccagcttagttccattaaaatgatggcgcttttatatattaaattttacattaccacatttcatatttaatttccgaattaagctgttgattccattttttagtaagaaatttgttcgttcggtacatgcagtgagtaaattgtattcttcataagttatgtatatctttatcgaaggtcaaaatgcactcagatagtggcaaatgtttatatattttacaatctttttgccaattacttaaagatcaaaagggtataatttatttgaagcatagagtatatatattcttgatcaggatatagccgagtaggtctgatcgtgtgaacatcgtggtcgtcgaaaagtggaggactaagctgcagattctttattcttcaatggtcagaatgttaaaacgcccactataacatccgctcataatttgtcacgccaacacatttaaaaaatgtttgattttaaattttcctgccaaactgtattcgttctgtcgttattttctggtacttttttaagtgtggcttttactatttagtcagagtggctggataaaatatcgaacagcaaattttgtccaaggcagtaaagtcacaaaatgccttaaatgtcaaaatcgtagtacagttctcaaagaaaattaataaagataagtctcacagggctccaaaaatacttcagagaagacattgaggcgagaatctgaaagccataacaatggcaaaacaagaagcaacaaatgggaaagttcgtaatgcatctcttcatctggagaagctgttgatcgggggaaaatatcggctggtaaagcccattgggtccgggtccttcggcgatatatatctcggactaagcatcacggatggatccgaggtggccattaaggtggagaagaacgatgccaagtacccgcagctgatatacgaggcgaaagtgtacgaacagctggcccgctgtccgggcttcccgactctacttcattatggatgcgagaagaactataatgccatggttatggacctattaggtccttccctagaagaactttttaacctctgcaaacgccgattctcgctgaagaccgtactcatgttgacagaccagctgctaatgcgaattgagtgtgtccacgaacgtgggttcattcatcgtgacattaaaccagataacttcctaatgggtctggatcgccactgcaacaagctgtacctcatcgattttggcctgtccaagagatacaaggacatagagtcagagattcatataccataccgcacggatcggaatctaactggtactgttcgctatgcctctataaatgcacagataggcgttgagcaatcccgtcgggatgacatggagtccatgtcctattgtttgatgtacttcaatctgggaaagttaccctggcagggtattacggccgccaacaagaagcaaaagtacgagaagatattggagaaaaagacaagcgtcacgatcgctcagctctgcaaaggatttccctccgaattttgcctgcttatgacctatgtcaggaatcttggtttcaaggagccgccggatcacacttatcttcgccagatattccgcatacttttccgctcactgaatcatcattacgactatatatatgactggactgccttgcagcagcaaaaggatcaaatctgccgcagcagggaacagattctggaatcggaacgagaagaggtccgcaaacgggatggggaacggggttgtgagcctcagcgggacaaggagcggcacaaggatttggagctggatcgactgcacaaaacttccacccaacaggcaaagtgctctaatggacatctaacaaaccgatatgatcgcattggcgatggaggcattagcaagcgaaagtaacatataacaaaattatttccattttaaagtttactacttcatgttggagtggttttatttcgcaaataaatcttttaaaaaccccacttgtagtggttttattttggtttatttccaaaattgaacctttccccatttcaggtattttttcaataaattacaattaagtattgaatggtctcagcactttatacttgtcatgaccaaacttttttatttcgctacatcttttggcttttcccagatataaaaatagccgtgcaggtaaaaaccaatcaagaaacacaaagttttacaatcgcgcaatttgcgacactccacttatggattttacccttgaacgtaattatgtggcaatcaacgctttatgaaataccccttagacactcgagtcaattgaatagttcatggcttacttcggtgtcctgggagagctccactccattctaagttttccattaggatggaaaaccctacccttttccgctgacaagactctggaaacttaataaactgtcaaattgtcatgtaaacgggacaaagctgccaaccgaaagttttttacctctcgagaaaagctggccaaaaaggaggtgggtttatttacgctacttatttattgagtggcggacagaaaagtggggaaaacatgctcgagttatgcgaaaacaaaataaattttatagtagtggaaaccgcaaagaaaaaaaagcattttattagtttcctctcttgtccgtttttgtggcagcaaaaataagtggaaaagtttcgttttattttctatatattcttgctacgatggctttgcttaaagacggggtcgcgacttggcacctggtgcaaattaaattctcagctgcagaactgagacagagatggagatagaggagacgaaagagaaggcagctggaaatgaagagggacggaaatataactacatggctatgacagactggcaacttcaataatttatgatgcagcagcaaaaggagaaaac

SEQ ID NO: 15278 - DNA, 1241 bp, DROSOPHILA
ataagtctcacagggctccaaaaatacttcagagaagacattgaggcgagaatctgaaagccataacaatggcaaaacaagaagcaacaaatgggaaagttcgtaatgcatctcttcatctggagaagctgttgatcgggggaaaatatcggctggtaaagcccattgggtccgggtccttcggcgatatatatctcggactaagcatcacggatggatccgaggtggccattaaggtggagaagaacgatgccaagtacccgcagctgatatacgaggcgaaagtgtacgaacagctggcccgctgtccgggcttcccgactctacttcattatggatgcgagaagaactataatgccatggttatggacctattaggtccttccctagaagaactttttaacctctgcaaacgccgattctcgctgaagaccgtactcatgttgacagaccagctgctaatgcgaattgagtgtgtccacgaacgtgggttcattcatcgtgacattaaaccagataacttcctaatgggtctggatcgccactgcaacaagctgtacctcatcgattttggcctgtccaagagatacaaggacatagagtcagagattcatataccataccgcacggatcggaatctaactggtactgttcgctatgcctctataaatgcacagataggcgttgagcaatcccgtcgggatgacatggagtccatgtcctattgtttgatgtacttcaatctgggaaagttaccctggcagggtattacggccgccaacaagaagcaaaagtacgagaagatattggagaaaaagacaagcgtcacgatcgctcagctctgcaaaggatttccctccgaattttgcctgcttatgacctatgtcaggaatcttggtttcaaggagccgccggatcacacttatcttcgccagatattccgcatacttttccgctcactgaatcatcattacgactatatatatgactggactgccttgcagcagcaaaaggatcaaatctgccgcagcagggaacagattctggaatcggaacgagaagaggtccgcaaacgggatggggaacggggttgtgagcctcagcgggacaaggagcggcacaaggatttggagctggatcgactgcacaaaacttccacccaacaggcaaagtgctctaatggacatctaacaaaccgatatgatcgcattggcgatggaggcattagcaagcgaaagtaa

SEQ ID NO: 15279 - protein, 390 aa, DROSOPHILA
MAKQEATNGKVRNASLHLEKLLIGGKYRLVKPIGSGSFGDIYLGLSITDGSEVAIKVEKNDAKYPQLIYEAKVYEQLARCPGFPTLLHYGCEKNYNAMVMDLLGPSLEELFNLCKRRFSLKTVLMLTDQLLMRIECVHERGFIHRDIKPDNFLMGLDRHCNKLYLIDFGLSKRYKDIESEIHIPYRTDRNLTGTVRYASINAQIGVEQSRRDDMESMSYCLMYFNLGKLPWQGITAANKKQKYEKILEKKTSVTIAQLCKGFPSEFCLLMTYVRNLGFKEPPDHTYLRQIFRILFRSLNHHYDYIYDWTALQQQKDQICRSREQILESEREEVRKRDGERGCEPQRDKERHKDLELDRLHKTSTQQAKCSNGHLTNRYDRIGDGGISKRK

SEQ ID NO: 15280 - DNA, 6199 bp, DROSOPHILA
gcatcattaacgctgggcatttgtccggcactgtaattggaagctgccgaaacgaggtgagcttcggtgatgaggcggcgtcgctccacattggctaggtcaatggtgggcacatcttcgagcggttcgcactccggctcctgctcgccctcgctgctcgacgaggagcggtcatcatcgcgtcgacgccgcttgcgttgcagattgtagatgcgccgcattttgcgctccagctgcttgggcgttatatgctcgtttccatttgataggcaggcaaaaagctcccgggctgcttttctggcagcccgctcaccaggcgtcatagccaggcagcgacgcacttcgtccgtattctctgccgtaataccgctgccatcgttgtagcactggcgtagcagcttgactgcatcctcgtgtccattgtgtgctgcactcaccagccagttgacggccttctggctctgattgcctttggcaagattgggctctactgcggacatagcaatcttcattatcttgtaattctcgagcaaatccttacactcacctatggaattatcgagtaactctttggccagatcgtattgcatctgggggcatccctcctcggcgatgtgatgcttaagtttgttcaaggaggcacgatctgtaagggaaaacatcttcactttatgaacgtgtatcaatcaaagctcagagatttaccttccagattccaacgcctgcgcttggtgacacctgtcggctcattttgcgtccaggtggccatctatgtcgagtttttcgctttgtttacgaaaatctatgaaataattctagtcttgacttagcgatggcatcgtgtagaacttgtcttagagatggactcacaaatattagttaatataattattaatttaaaaatttgtttaccaaagtttaattattcatcgtatatagtatataaaatacatttatgtagtataaataatttcctatatttaaatttgtgttctttgtgtataatgtcgtgacttctaatcgataaataactcaaatgtactcagctgtgatttcgatattgcgacatcaaaaatcgattcacacacatgccggctagattgtttgctgttgcaaaagtagttgtttatttttgatttataggcatttcccaaataagagccagcacaaaaatggagagaaatctgcagaagcaattatacggcatatcgcgcgaatcttcaccaggtgcacgaaggtacagcatgccagcagcctcggcagacagcacgcgtaaatcaatttttggcggcagcgccagttgcgcccagatgtcggggagcctcaaaaggactgccctgaccaacaggtatgtgctaacttattctcctggaatttcccactcatcaaacaatccttttcagccggctcagcttgtcggtgcgttccactcagtccattgccggcatccgatccgattacaattcggtagagagcttcggttgtccactgccggtggtggtcaatgaggcactaaccttcgcaggtccaggagcgggcacagtaacagccaaagtgacgcaaaacggttgggcttgggtaatatatcagcaactctcattgtatctggttcagcaatcagtacgattaccttttcaggttgtccaaggcagacgcctcttgatttggcagtataaggacacggccaagtcgggctcgccacctcgtgtgggcaaactggcaagacgtggtggtggtctggcccagtgccgtgaattgactttaccttacagtgacctgggtcacaagagtgatttaatcagtgttttccagacggagggtcagcaaatggcctcctgcatagcggtatcagccacgggagaagttcggtactggtcatcgattgcgcacgatgggaactccgtggatctttccatcttaactggccaagagtttgtccagctgctcagtctaccaacgcagcagggctacctagccgttacaaccacctgcaatctggtattcctgcgagtcggactgaccaacggacgttacacacttcaccataagactatcaagcctgccactagcttccttggtggttttggcaaaaagtttgcctccattttgattggaatgaacacgggtgcagacaaggatcaagtaagtatcttcgtccagcatgggacaaaaatctcatgaagtgttttttagactttggtcggcatgtgctgcgagagcaatttagaaagtggagaaaccattgtggccgtgctctctgatcgtgcaatccagcgctggagtctgtccaacaatggcaacaccgaaaaccttctgtacgaggatgcggatatgttgcgcaggatacgcgaagagtttataacgaacttttggaagttccgactcccagcggatagtttggagatcgatctccatctgttggactttcacgtggttaagaacaaagcttatatactggctggagctgtgaatgctgctcacgctccacaaatgtgctacgctctgggtaagaagtatgtgacagcaaatcttgatatggtatataatgttaagtattttagtgactggcactgctcaagctgaaagaatgcttctggaatcgttcacgccgctcaatatgaacaaattctttagtgccaagactgaggaggattgcctcagcgtgcgttttgtagtaggcagcagccacatctatttgtatacttctaaagttgtgtatcctctgcacttgaccaactcggtgccgacagcagagctagaggcggaaaagatcgagttccatcagcacgatgatcgcattttgagtgccgtcatctgcagccaattgccattgttctttagtcgcacacatggcctagtttctattacaccgggcgattttgatggtactgaaatgatgaacatgagctcctgcaacacgccagatttatatgctcccaattcgtgtaatgctagtttcgcagttgccgatcattctgctttgactaacagtactaataatcttcaccttttcgaactggatccggatgaaatgtacaacgaactaagcgatgaagttggtcaactaaaggcagcgttcctatatcacatgaaacgcaacagcaatatggtcaagacgatcgtcgatgagctgcttcgtaatgtcactgcagccgatccaagtggtgcacccatggatgcttacaagttggatcgaattgttattaccatcgccgaagacttggcggaggatataccaatagccgatccccgatgggaggaggcacttgcagatcaggaaatgaataggcatgccatcggcagctctcgttcaatgcagattatcaaccaactaagggacaagatcattgctttccagcacttcataacgtttctgcattccagtttagtttgggacaaggtataaggacaaaatatttatttgtttatttatttgattttgttaacaaaatcaatacttttcgttccagttaaatgtcataccttgcggaagccattcgctgaaacccaccggctgtattctagccgatatcagcgagaagatagtggctgctatggctctgcgatccattcagaccaaactgcccaagctgattgaagaggctatcgatgccaccgtagcgttatggcatgaggagcctcagggcagcctaacttaccaggatatattttacgtaaagctgtctaggtttcaaaacgtgttcgaggccctggcggatattgctgacgatcgaatcgctgctcagaatcagaccaccatatcagtggcccactttgtcaacgagataaactccattgtcctagacgttttgggacaagtgttcaagtatcgaaagcagcacgcaagcagctttagactgagccacgaaaaactaccttcctacgagaatctaccttggactgcgatggctggcagtgcgggagttcgtgacacgctgactcgcctcattgacattagcgttcgctatggcagccactgcgttagcgagactgagctaaagcagcaattgtaccaacagatattcgaactaattgatttggttttggacggacggaagacttacttaaaaagcgtgcgcgacacggaaaagttcaatgttctgcagcagcagtttgaggctcagcgaagggaactcatctccgtgctaagtaagttgtgtattctattcataatttaaaattcttaaatatttcttatgtctttttttttattttgtagtcaaagatcgccaatacgagtacgccgcaaagatcgccgagaagtacctcgattttcagagcctggtgcttatctgcgatgagacgcaggacaaggagcgactggaagattacacccgcaagtacgaggaatatgacttctcacagtttgccatcaattggcatctgcgccagaaccggcacggcgaggtattcgaacgcttcaagggcaaccagacggctttggctcagttcatgcgtgaccatccgtcccttgggtggatccagctaatattcaacggcgacttcgagcgggcggccaaggtgctgtacgagttggcccaatgcgaaacggagtttgtggcgcgcaagaagtctatgctgtcgctggccaaattggccgccttcgcggcagccgaatccgatttaactgcccaagttgaaaagatcaacgcagatcttacgctggtcgaatatcaatcgcaactgggccatgacgtactggaaagctttggcttcgatccagcagaacagaaggtgctcaaggcagaggagattatcagcgtaagatttcacaaattaatatacttaattcacttataaatattaccgtcttattatcattagctttacatcgccgaggaaaatgaaactgccagcgaaacggaattccgtaaagctttggaacttctgagctacgtggaacagccgtacgacatgcggcacaagatctggtgtgcagctataaaacgcgataactggacggactacgatcccaacaatgcggtgcattacatgcagaagttgctcttttacaagatcatcgaaatctcgcagctgatgggcaacgattccgagaacgttttgccacccatggaagactttctggagagcgtggagctcggcgatttgccgcagcagaaaccgtttcagtatctgttgaaactgacctatgagtatgtggccgacatgttcaaacagccagacgacatggaactctaatcaagcacctcacatgtctttctattaaagtttacgttaagaatttaaaatgatggctggtgttcttggacggtggacagttgcctgccttgttgttgcgtcgctcaaacgcaggcattataaaatattataaactaagttgctttgtcacagccggtctctgccggcgaaagtatctgaagtgtggcgaacggagagtcggaagcccaccaagtgtgttcggggcaactctagagtcggcctgactggcagctgtgctgtttgcatttgtcgccggtgcgcatcagtttaactttgattatgacggacgaaacaacgccgcttaccgatgccgttcccagtggctccggatatgttgtcctgccgccgtatcagggaccggagcgtgtctttccgggtggtgtttctccgcgtgcgcgacgcaacaagatgcgacagttccagtgctgcatgggcatcacctttatgtgagtgtgaaacgaagagttggaactgcggcaaaagaacacctatccttagaaactattgctataggctctaaattgtagaattgattttgtgaaggttccccaaaatcccagccttaaacaactatgttcaccaggatacttttgcacccttaaaagaaacttaaacagtgaaaagcaaatttgccatccccctccattgggatatttaatacacaattaacccattgtgaacgtttagtcgcgattaaccgcagcatgctaaccacaaagtaatttcactttcccaaccgcagagcgattgtatttaccgccctgtgcctggcactggtgttcagtgattccctgggcggagcggatggaggtcccagcttttttttcgtcgtcaatggatcggatagcgaattggccccaaataggccactgccagacgaaccggctgcggaatgggcgctgcagcaggcggcactgggtcatcatgatggtgctcaggcagtcagtgctgggattaaggcactgggagatcgggaaat

SEQ ID NO: 15281 - DNA, 3775 bp, DROSOPHILA
tataatgtcgtgacttctaatcgataaataactcaaatgtactcagctgtgatttcgatattgcgacatcaaaaatcgattcacacacatgccggctagattgtttgctgttgcaaaagtagttgtttatttttgatttataggcatttcccaaataagagccagcacaaaaatggagagaaatctgcagaagcaattatacggcatatcgcgcgaatcttcaccaggtgcacgaaggtacagcatgccagcagcctcggcagacagcacgcgtaaatcaatttttggcggcagcgccagttgcgcccagatgtcggggagcctcaaaaggactgccctgaccaacagccggctcagcttgtcggtgcgttccactcagtccattgccggcatccgatccgattacaattcggtagagagcttcggttgtccactgccggtggtggtcaatgaggcactaaccttcgcaggtccaggagcgggcacagtaacagccaaagtgacgcaaaacggttgggcttgggttgtccaaggcagacgcctcttgatttggcagtataaggacacggccaagtcgggctcgccacctcgtgtgggcaaactggcaagacgtggtggtggtctggcccagtgccgtgaattgactttaccttacagtgacctgggtcacaagagtgatttaatcagtgttttccagacggagggtcagcaaatggcctcctgcatagcggtatcagccacgggagaagttcggtactggtcatcgattgcgcacgatgggaactccgtggatctttccatcttaactggccaagagtttgtccagctgctcagtctaccaacgcagcagggctacctagccgttacaaccacctgcaatctggtattcctgcgagtcggactgaccaacggacgttacacacttcaccataagactatcaagcctgccactagcttccttggtggttttggcaaaaagtttgcctccattttgattggaatgaacacgggtgcagacaaggatcaaactttggtcggcatgtgctgcgagagcaatttagaaagtggagaaaccattgtggccgtgctctctgatcgtgcaatccagcgctggagtctgtccaacaatggcaacaccgaaaaccttctgtacgaggatgcggatatgttgcgcaggatacgcgaagagtttataacgaacttttggaagttccgactcccagcggatagtttggagatcgatctccatctgttggactttcacgtggttaagaacaaagcttatatactggctggagctgtgaatgctgctcacgctccacaaatgtgctacgctctggtgactggcactgctcaagctgaaagaatgcttctggaatcgttcacgccgctcaatatgaacaaattctttagtgccaagactgaggaggattgcctcagcgtgcgttttgtagtaggcagcagccacatctatttgtatacttctaaagttgtgtatcctctgcacttgaccaactcggtgccgacagcagagctagaggcggaaaagatcgagttccatcagcacgatgatcgcattttgagtgccgtcatctgcagccaattgccattgttctttagtcgcacacatggcctagtttctattacaccgggcgattttgatggtactgaaatgatgaacatgagctcctgcaacacgccagatttatatgctcccaattcgtgtaatgctagtttcgcagttgccgatcattctgctttgactaacagtactaataatcttcaccttttcgaactggatccggatgaaatgtacaacgaactaagcgatgaagttggtcaactaaaggcagcgttcctatatcacatgaaacgcaacagcaatatggtcaagacgatcgtcgatgagctgcttcgtaatgtcactgcagccgatccaagtggtgcacccatggatgcttacaagttggatcgaattgttattaccatcgccgaagacttggcggaggatataccaatagccgatccccgatgggaggaggcacttgcagatcaggaaatgaataggcatgccatcggcagctctcgttcaatgcagattatcaaccaactaagggacaagatcattgctttccagcacttcataacgtttctgcattccagtttagtttgggacaagttaaatgtcataccttgcggaagccattcgctgaaacccaccggctgtattctagccgatatcagcgagaagatagtggctgctatggctctgcgatccattcagaccaaactgcccaagctgattgaagaggctatcgatgccaccgtagcgttatggcatgaggagcctcagggcagcctaacttaccaggatatattttacgtaaagctgtctaggtttcaaaacgtgttcgaggccctggcggatattgctgacgatcgaatcgctgctcagaatcagaccaccatatcagtggcccactttgtcaacgagataaactccattgtcctagacgttttgggacaagtgttcaagtatcgaaagcagcacgcaagcagctttagactgagccacgaaaaactaccttcctacgagaatctaccttggactgcgatggctggcagtgcgggagttcgtgacacgctgactcgcctcattgacattagcgttcgctatggcagccactgcgttagcgagactgagctaaagcagcaattgtaccaacagatattcgaactaattgatttggttttggacggacggaagacttacttaaaaagcgtgcgcgacacggaaaagttcaatgttctgcagcagcagtttgaggctcagcgaagggaactcatctccgtgctaatcaaagatcgccaatacgagtacgccgcaaagatcgccgagaagtacctcgattttcagagcctggtgcttatctgcgatgagacgcaggacaaggagcgactggaagattacacccgcaagtacgaggaatatgacttctcacagtttgccatcaattggcatctgcgccagaaccggcacggcgaggtattcgaacgcttcaagggcaaccagacggctttggctcagttcatgcgtgaccatccgtcccttgggtggatccagctaatattcaacggcgacttcgagcgggcggccaaggtgctgtacgagttggcccaatgcgaaacggagtttgtggcgcgcaagaagtctatgctgtcgctggccaaattggccgccttcgcggcagccgaatccgatttaactgcccaagttgaaaagatcaacgcagatcttacgctggtcgaatatcaatcgcaactgggccatgacgtactggaaagctttggcttcgatccagcagaacagaaggtgctcaaggcagaggagattatcagcctttacatcgccgaggaaaatgaaactgccagcgaaacggaattccgtaaagctttggaacttctgagctacgtggaacagccgtacgacatgcggcacaagatctggtgtgcagctataaaacgcgataactggacggactacgatcccaacaatgcggtgcattacatgcagaagttgctcttttacaagatcatcgaaatctcgcagctgatgggcaacgattccgagaacgttttgccacccatggaagactttctggagagcgtggagctcggcgatttgccgcagcagaaaccgtttcagtatctgttgaaactgacctatgagtatgtggccgacatgttcaaacagccagacgacatggaactctaa

SEQ ID NO: 15282 - protein, 1154 aa, DROSOPHILA
MSGSLKRTALTNSRLSLSVRSTQSIAGIRSDYNSVESFGCPLPVVVNEALTFAGPGAGTVTAKVTQNGWAWVVQGRRLLIWQYKDTAKSGSPPRVGKLARRGGGLAQCRELTLPYSDLGHKSDLISVFQTEGQQMASCIAVSATGEVRYWSSIAHDGNSVDLSILTGQEFVQLLSLPTQQGYLAVTTTCNLVFLRVGLTNGRYTLHHKTIKPATSFLGGFGKKFASILIGMNTGADKDQTLVGMCCESNLESGETIVAVLSDRAIQRWSLSNNGNTENLLYEDADMLRRIREEFITNFWKFRLPADSLEIDLHLLDFHVVKNKAYILAGAVNAAHAPQMCYALVTGTAQAERMLLESFTPLNMNKFFSAKTEEDCLSVRFVVGSSHIYLYTSKVVYPLHLTNSVPTAELEAEKIEFHQHDDRILSAVICSQLPLFFSRTHGLVSITPGDFDGTEMMNMSSCNTPDLYAPNSCNASFAVADHSALTNSTNNLHLFELDPDEMYNELSDEVGQLKAAFLYHMKRNSNMVKTIVDELLRNVTAADPSGAPMDAYKLDRIVITIAEDLAEDIPIADPRWEEALADQEMNRHAIGSSRSMQIINQLRDKIIAFQHFITFLHSSLVWDKLNVIPCGSHSLKPTGCILADISEKIVAAMALRSIQTKLPKLIEEAIDATVALWHEEPQGSLTYQDIFYVKLSRFQNVFEALADIADDRIAAQNQTTISVAHFVNEINSIVLDVLGQVFKYRKQHASSFRLSHEKLPSYENLPWTAMAGSAGVRDTLTRLIDISVRYGSHCVSETELKQQLYQQIFELIDLVLDGRKTYLKSVRDTEKFNVLQQQFEAQRRELISVLIKDRQYEYAAKIAEKYLDFQSLVLICDETQDKERLEDYTRKYEEYDFSQFAINWHLRQNRHGEVFERFKGNQTALAQFMRDHPSLGWIQLIFNGDFERAAKVLYELAQCETEFVARKKSMLSLAKLAAFAAAESDLTAQVEKINADLTLVEYQSQLGHDVLESFGFDPAEQKVLKAEEIISLYIAEENETASETEFRKALELLSYVEQPYDMRHKIWCAAIKRDNWTDYDPNNAVHYMQKLLFYKIIEISQLMGNDSENVLPPMEDFLESVELGDLPQQKPFQYLLKLTYEYVADMFKQPDDMEL

SEQ ID NO: 15283 - DNA, 2560 bp, DROSOPHILA
agcttgctaacatattaactaaggccaagatcatgtccacgatttccataaagtcataagaggctagtccggcgctttcgtcctttagtttaaatcataatttttttggagttgatttagagtgagtgcactgtgtaccataaccggtgtacacaaattagatacaattgctttttgatataaaaacaagggagaatgttagagtggagttccccgactatcggatacccgttacgcacctagagtgaatgcgaacgcgaaatttcttcgtttttctgggatatcgatagatattggggaataaattgagaaaaaacttaatattgttcaaaaatgtgggcgtggcagctttgcgcgattttaaggcgttagagttgccgtgataaaaagttctatatcatttgctgcgaaaatgagcgcatcattattttagcattgtttccagtcaaactggacctgatagcttcatactattgtcgcccaaccgtctgcattcaatggctgcgtttggccgaagatgaaagggatgaaagcggtccaccggtcgctgatctttgagcaatcaagagctattatttttcaatctaccttatattattcaaattccgcagaagagttttcttattgctaataatgaaaacggttttaggtagtattgggacactgtggatttgtttactatttgactccatcttagttagcatatgttatctgttatgacttgcatatttatgtagtttatgggttccaggcaatggccaatgaattagggtctctacattggaactcttaatattgtgccaataaagatgagaacgtgtaagtgttactaaatgcaatcaatatttctatgaatcatgggttttcctttctttagggtttaggaaagacttttgttcataatattcttagacaaagtaactgacatttgcgttaattaaatttcaagcaaatcattaaattttatagatagactttgaaaaaaataaaaggtattgagttcgatttttttgccgcgtttatttaataatcaactagaaaccattatacatagaacagctctcggttagcgtatccgtatccgcttagttgccgatgggcacattgggcagatgggcaccctcgggctggaatccgttctcgtcagcgatgtagttgaccgtgtaggtctggccatcatcggccacgaaggagtaggatccgcggaccacgatggcctcctgttcggtgccgacgttcttgagctgaccctgctcctcgtgcttcttgccgtcgctggtctccaaactgtgggagaatgggtatttaatccttggataatcgtcgcaccgagctgaccggagtttgatacacttacgcaaagttgtagccctccggctggacgtcggactccagacgcaggatctgggtatccgcatcgggagcgggggcagccagaacgacggcgaagagagcggtgaagacgatggcaactgtgcacttcatgtttttctttttgttttggctaatttggctaaggattcgatgggaacttgcgaccgaacggctagtcaacgttacttgatttgtgatgtttatggccctgtcccggcgtttatatagtcggatcggaggccgacaatcgaagaaaatttagtcgaaaataaaaatgactaattacacgccgagcaccaaagccaacaaattggcttgaaaaacgcacaaaaacatcatgaaaaaatcacaacaaccacaccaagacgcaaataataatttaaaacaaaaacttctaaggcaaacaaatcgacgccgtttttaggaaatacctcatcatcatcatttgcatttttcatgaatcaatcaatccaatagcttccaagtcgaagacaacaagccaaacatttttgataatccatgggtatatgcatattttgtggtagagtggggcggctaggttgccctgcagcaaaagaagcagcatgtccagaaatggcaggtgattcgaattgaaagcccgtttcaggtttcagatttatagttgagagtaaagaatttaaaattatgcactttttcacttcctctgaaatctaaatagaataaactggatattttagaacatagaaaatatctgttgtgctacaccatttgtaacatttgttcatgataatatttaaaataatatactactaacagtgtaaatactgtaaaataagcatttatataaaaagaccaaagtttatttctattaaattaaaaccaaagcggaatatgtattttatgcaaagattttttatttatatttaaaaactttctttaatttatgaaaccctttaatcacaacttttacagaacagtgacctttacgataaaatagctaggtcccaaaatgaagtgtacacagtaagaatttaaatgaatgatgttactttaatattatgatgttcttcagacgaaacttagacatagttaacacatttgcgctgaattggaacttgattggcgaatgactttcaatcggattccctgggattcactgaacgggcctgggcagatgggcaccctcgggctggaagccgttctc

SEQ ID NO: 15284 - DNA, 490 bp, DROSOPHILA
gtaacgttgactagccgttcggtcgcaagttcccatcgaatccttagccaaattagccaaaacaaaaagaaaaacatgaagtgcacagttgccatcgtcttcaccgctctcttcgccgtcgttctggctgcccccgctcccgatgcggatacccagatcctgcgtctggagtccgacgtccagccggagggctacaactttgctttggagaccagcgacggcaagaagcacgaggagcagggtcagctcaagaacgtcggcaccgaacaggaggccatcgtggtccgcggatcctactccttcgtggccgatgatggccagacctacacggtcaactacatcgctgacgagaacggattccagcccgagggtgcccatctgcccaatgtgcccatcggcaactaagcggatacggatacgctaaccgagagctgttctatgtataatggtttctagttgattattaaataaacgcggcaaaaaaatcgaa

SEQ ID NO: 15285 - protein, 109 aa, DROSOPHILA
MKCTVAIVFTALFAVVLAAPAPDADTQILRLESDVQPEGYNFALETSDGKKHEEQGQLKNVGTEQEAIVVRGSYSFVADDGQTYTVNYIADENGFQPEGAHLPNVPIGN

SEQ ID NO: 15286 - DNA, 3278 bp, DROSOPHILA
agcaaaaatttttgtctaaacggcactaattggtctcacaaaattgttctatacccatttttacagtgtttggtttcatgaactctattgtttttcagcaaattttcctttcttctgtatttatcattgacgaaaacgaatatttaaagcaatttatcgacgtctctgtttccgatggagcaatttggcttttaatgaggtttttaaaggaccaatttgattttaagtatctgctaaatttatactgctggttgggcaaaacaaacacatttgatctcctgtcttagctaagtattttcgctccagacttaaattttttactcgccacccactgcgtttttcataaactcactcataaacactcacacacacactcactcgcttccactaagcaaatagcaataaaagccgaaaaataatcaggtttacggctgctcctccagtttctgctcctgttgcggttggatgactgccacagtccgccggagtgcccttcaggcgtttgttgtgccaccgacgccgaaaagtttgccagaaaacagaaattacccatacgccgcgtgggccgacgattgaagtgggccgcggaggacgggagaagatagcctcaccgcttaggtgtggcacaatgttccggctttcataagcacataaatctgcaacttgtggagcataaataagctgtctgctcggtggaaaaggggtggctagtcaggtatctgtacaaatttggaaatccctgaggcatgtgctccactagaaaatgcattatcagacaataaaccactttgctatagcacacatccatagaatatctgcgctcaagcaaataatttcttagctcaaatatccaaaattcggacaccaaaatttaatagaccagtcttcaaatattctaaaacaaccgaattcaaatccttaataaataatctgtatctgctttgcattaattacaggcttcaacaaccataaaatcatgcaacccaccgaactgagaaaaatgatcctggtcgtggccatcgctgccattatcctagcgatcggcgcaggcggcgtcctgggcgaaaattcctccagctgcggaccgaactttccggcggcgtgcagttgcggccaggaaatgtacgaaagtgagatgcagtacgtggtgaactgcacgaacgcaggattggtgaacaccagcgtgctggaatttatgcccgaacaggtggaggtgctgatcttcacgggcaaccggatcactgagctgccgtggaatgtctttggcagcatcaacaactacaagcagctgcgcatcgtggacatgagcagcaatcacatccgcgagattcgcggcaagagctatcaccatgtgccgcgcgtggagcgcttgattctcaaccacaacaatctgagcatctcgaggtacgaggacgaggtgaatcaccatcacccacgcgtcttctcgaacttcattaatctgcagagtctgcatctcaccgatgcctttgaggacaatagctcgccgcagctgagcgaggatctgcacgacatctttgtgaacagccagttggtaaagttgcagaagctgcatctggagcagaacgagatcacgcacttcaaggatcgcaatgtcttctgcgacctgccctcgctgcgtgacctccatttgggcgacaacgatctgcgggacctcaacttcgaggtgcgctgcctgaacaatcttcgcttcctcgacctggagcgcaataagttcagcttcgtgaagccaaccgatcttcgggtgctcaatgaactggaggagcgccccaaccgcacggccaacttgatcgtagactttaacctcaatcccttcggctgcgactgccgcaccgctccgttccgcgcgtggataaccaccacccgggtgacggtgcgcaacaaggacagcttgatgtgcttccattcgacgggacatgtggacgccgagcccgctcacctcctgcagatggatatgggtcagtgtgcggacgccatcgccgccgctgccacaatactaaacaccgcagaggatgagccgcactacggcgacccggaggcgtctcatctccaacctcaggcccatatcagcggtcacacggccactctgatcttcctgctgatcgtactcaccatgatcctgctgggacttctggtggcacttgtctacgtcagtagagacaagttgaaatacatgataacgccggttttcgacaatgtggccaagaaggtgcagtacacatcgatcaaggacgaagactgcccggaggtgcacgtttaggagcttcacttcaccaacagaatcaacacaaaaagagagaaggagaggaataaagctcggttttcacttttcatttcaaacagaaagccattcgattccctgaaattgtatcaaggccaaaaaagttcctgcaatttccaaaggatataacataaaagattcttcgattgaatttgtgaagaattctttcttactttctattcctgtagaacactatttgtttgaaattgaattcgaaaccgggccaatatcctcagattagtttttgccattagcgtttcgcaaaacgtgtgccattcacaatggaagaggatgagatggaggaaacaataggatcacactgaagtcccaaccagaatcagaacatcagcctttgtttcgtagtacttaagccaattgttgcatttaacagcggatggaatgtggccacttaaattactgcaacaaaaccacattacacagacaagaacacaatttctttagatttagcggttttctatcttaactttaagtcagttatgggttctatgatttcaaagcaaagaaatcgtacgaaaggagaaggcaaagcgggcctgtatcaaccgatttgaccacacatatatagtgacatatatatatatagaaacagacacatatatatacatgcatatatcgtaacaaacactttagtgttatctgtgatttaagtttagtagctttactttgttgaaactctgcagaaagaacattttaaatcgaaattggtctaaaacaaacttcaattctttttatagcattacagataattctacactcaatgaaactgtttcgatgcttaatatgttattaatcaattaatttgtcaattatactagctgtacgataatttctcccttgattaactaccaataacaagcattttttataaataaacatttgaaaaatgaaatgaaatgcgttttaaatttatttgtgtgggtttcattggacttgcaaccatatcctaataatttgaata

SEQ ID NO: 15287 - DNA, 1278 bp, DROSOPHILA
atgatcctggtcgtggccatcgctgccattatcctagcgatcggcgcaggcggcgtcctgggcgaaaattcctccagctgcggaccgaactttccggcggcgtgcagttgcggccaggaaatgtacgaaagtgagatgcagtacgtggtgaactgcacgaacgcaggattggtgaacaccagcgtgctggaatttatgcccgaacaggtggaggtgctgatcttcacgggcaaccggatcactgagctgccgtggaatgtctttggcagcatcaacaactacaagcagctgcgcatcgtggacatgagcagcaatcacatccgcgagattcgcggcaagagctatcaccatgtgccgcgcgtggagcgcttgattctcaaccacaacaatctgagcatctcgaggtacgaggacgaggtgaatcaccatcacccacgcgtcttctcgaacttcattaatctgcagagtctgcatctcaccgatgcctttgaggacaatagctcgccgcagctgagcgaggatctgcacgacatctttgtgaacagccagttggtaaagttgcagaagctgcatctggagcagaacgagatcacgcacttcaaggatcgcaatgtcttctgcgacctgccctcgctgcgtgacctccatttgggcgacaacgatctgcgggacctcaacttcgaggtgcgctgcctgaacaatcttcgcttcctcgacctggagcgcaataagttcagcttcgtgaagccaaccgatcttcgggtgctcaatgaactggaggagcgccccaaccgcacggccaacttgatcgtagactttaacctcaatcccttcggctgcgactgccgcaccgctccgttccgcgcgtggataaccaccacccgggtgacggtgcgcaacaaggacagcttgatgtgcttccattcgacgggacatgtggacgccgagcccgctcacctcctgcagatggatatgggtcagtgtgcggacgccatcgccgccgctgccacaatactaaacaccgcagaggatgagccgcactacggcgacccggaggcgtctcatctccaacctcaggcccatatcagcggtcacacggccactctgatcttcctgctgatcgtactcaccatgatcctgctgggacttctggtggcacttgtctacgtcagtagagacaagttgaaatacatgataacgccggttttcgacaatgtggccaagaaggtgcagtacacatcgatcaaggacgaagactgcccggaggtgcacgtttag

SEQ ID NO: 15288 - protein, 425 aa, DROSOPHILA
MILVVAIAAIILAIGAGGVLGENSSSCGPNFPAACSCGQEMYESEMQYVVNCTNAGLVNTSVLEFMPEQVEVLIFTGNRITELPWNVFGSINNYKQLRIVDMSSNHIREIRGKSYHHVPRVERLILNHNNLSISRYEDEVNHHHPRVFSNFINLQSLHLTDAFEDNSSPQLSEDLHDIFVNSQLVKLQKLHLEQNEITHFKDRNVFCDLPSLRDLHLGDNDLRDLNFEVRCLNNLRFLDLERNKFSFVKPTDLRVLNELEERPNRTANLIVDFNLNPFGCDCRTAPFRAWITTTRVTVRNKDSLMCFHSTGHVDAEPAHLLQMDMGQCADAIAAAATILNTAEDEPHYGDPEASHLQPQAHISGHTATLIFLLIVLTMILLGLLVALVYVSRDKLKYMITPVFDNVAKKVQYTSIKDEDCPEVHV

SEQ ID NO: 15289 - DNA, 4901 bp, DROSOPHILA
cactagcccggaatgaagacgtcctcctggatcggttttgggatcttaaatatataccaaatgtagttgttaaacgcaaacagtttgcgaagagcgctaacaccgcttctatacataataatacgaataatatatattttaatacgaaccaaatgaaacaaaacaaaggttttatgtcgagcaaactttaattaatcgaactaaacttggcatttctatcttacacatttctctcatcttcaattgcttaaaatacaaaaaagcaagcaaaaaacgcaactgaacactttaacaaagttgttgattaacaaagactgaacgaatttaaaaaatagcgataaaaaaaaaacacttgaatatccaacgcgacaagagcaaaactatttttaaacattttttcaatacctaacgcagcaactccattgtatttgtattttgtaatcgttttactaattatatagacacagcttaaatatatataaatatatatgataaatacggattcgaatcaccgatttggttgaatataaaaaaaaacttgattaaaatgtcgaatttgacttaacattcatatgaacacatccgtttgaattccattggtcaatttcttacacaaagcttcaatcaaatgtttttctttttcaatttgcaggacgccaaatggaatatcttggatattcttcttcataacgtaatattaagctgattattgttatcagaaacttacattaaaacaaaacataaactttaagttaacagatgtgggtggcatagcttagaatattttggtgctgcctgagcatcgaatacatttgatttggtttcattacatctcttctagaggatcattttatggacacactaatgccttgaactttaacattaaacttttgggagtctgtaattttccacttagtctacagcttatacataagtcttacaatttctgcagtttcagttacaaaacgcaggcacagattttaagatacgtttccatgttttatatcgacaatttcgacattgatatcttaaaagaattagcgagctggtcgttctcattggtcgggtgcgctttgattttgtgaatggctgcatcagtatgctgttgcatcctggcatacgaaggaataagcttatcgtcttcgtcctccggctcactgctcgactcctcgttcgattcatctgctttaatcagtatatgtggtctctgcccggagtccctcttcttgagcagatatgtaccatgttttttgcactcattgattacaaacttgaagtccgaatggtgacgaagggtgaccggattgccaaccaggatcagaagtgctttagctctggacagaagaacgtttacacgacgaggattgcacataaatcccatgtttgtgaaggatttaaccaaactagcaatgattatggtcttttcgcgaccctggtatgtctccacgctgcctacctctacatttgggtatcccttactttggagtagcttggtaactagtttaccctgagccgtatacggcgcaacaatgccaacgtcctcctgtccgaccacgcgatcgtttatcaggcgttttacataccaacatataacttctgcctccaaattattgtaagagctagtggagttctgctcccggttggttactccatgagtggcctgaaatattatcgggaactgtggattcgttagaacgctccagttggctgctagattcacatccatagcaggagcctgagcttttagctctccgttatagtagagctcattaaacaggcgtacaatctgcggatgggatcgatagttacgacatagacgcatctgccggttgcgatcgtagtttccgttttcatcagatttgtagcaatcggattggaggagcctctccattagagaccggcttaatcccaaagaagcggcccgattactttttatcacggcgccgagctgcttatgatccccggacaaaatcacatggcaatctgctgtctgcttaatacccataataccgattaaagcctcgggttcagtcgaagcgcccgcctcgtcgatgaaaatgtgggtgaagaagttgtacctaccaagggtatcagtaaccaagcgtgccactgtgcagagcgtggccacgataatgccgtactttacaatacgtgaagctttaatatgatcgtagatactcttcgagcaattggaatttttcagcagcagtgacggcacggacgcaaagcccttctcataaatggagcgcgagtacacgcgaatcaactggtgatcaggttcgggcagcttctgttgggcaaagtgctcctggagacggatgttgctttcaatatactcgcaaagcttcagggcgattgtgtcacatgctgagttcgaaccggcggttacgagtatacggctttgtggttgttgaaggcgcagctgtagaatggcctccacaatggtagtggtcttaccagtgcctgtaaaacgtagtagtagttatatatagtaacaaaaaaattgtaaaaaaatacatttaaagtggaatttaaaaaactggaaaatatttcactttgaaaaagatcatctccacctcagcacaaatttaattgcccttgtaagcgaaagtatacttttctccaaagaatatattttaatcgtttttcgatatccgtttataataaaatataagctatcaggctcgcaaatcatcattaatacctggtggtccgaatagaatgtatggtccctgggtacttggtcccgcaacaatgcgttgtacggcctctaactgctcagcgttggaatagatggtcgaattaagaagagagagcgaggttggagtagctggctcttgtggccttccttgcatccaattaggcagatggccgtcgcaacataccttaatctgagaattgtccacaagctgcgtcagccagctgggaaacggaaataggtagcggcgcaccaaggggctctcctggagcagattgagtgcgcgatacatgtatcggattgtaaggcgtctggagcggataatggcatagaagcgctgtcctgacaagaccgctttatgtttgcggctgaagcgcacgtgaacagtggtgctgctgaccttgtccacactagccacatggcgaagcattggatcgcccggctccaaatcttcatgaggatgcggaagcaaggccagcaccaattgtttaggtagtggagatgccagaaggctagccttgggcaccagcaccacttggtctagattgggagcaacaaagtcctctgcattcacgggcgtgctcttgaaagttattttatatgtcagcttggagacgcgctgcacaggcacatcagattggatcagttgggcgtatagctccatattggacagatcgtcgatggttaacagcgtttgcatcacggagcacacattgtaaaactccaagcgtttggtcttcataaaatcgccgaacacactattatttgcgctcaaatcctggtttgtgttcgcctctatcatctcgttacttggcggataatatggcaattcccgcatcatggataaaagtctggaggggattttcattggtttggtgatgtatgtgtgtacatacatgcaaactaaatactcactgctgttgtttttcctctgggttgcattgtttgactttgtcgtcgtcgttgaccattccatgtgtgcataaaacaaacgtagttttattcttttcctgccatttatatcttttacgagctattttcgatagctgccgatctatctgaaatcttcagtaatatagtctcctatttactagcttttcactttaaatacttactaatttcaaatcctctgtttggtgcattttttggttccttaaggtaaggtaagtgtaaatgggaaaaaaatcgaggaaaacggcgcggcttttcagataataacaaatttgcagaatttccagttccgttagttttttaaggcgcacaaatctcattaaagctcgcgcactttcatattgatcttcattcatcgatatatgccggcgatagttattctgctgggcagcattgttcaagcgaaaactgggtgagtaccatcgctaatccagagatttgtttacaaaataaaattggcggaaatggccgattcagattcgaatgaggtcctaattgaggaaatagacagcaacgatgtgccggaaaacgaattggagcagttccaggagacagagccgctgcgcgtggtagacatcatcgactgcgatacagacggcgaacggcgctgcatcgctgatgacgaggaggagggtgcgctgattaagcgctacgtgcagggtgttcagtgcctagagttcccggacttctgcaccaagctggaggccagcgacgaggatgaggagggcaatgatgaggagcccagtgaggcggccggcagcatcgagaagccgaacacttcggcgcaagcgaaaacgtcacaggaacagtcgacgggaagtggtcgttctggaggaggtggctttcggaaaagccaactaagcaccgccctgcaaggactgatgggcgaggccaatctgagctttgtgtacggccgctatgaaacagccgagcgcatctgcatggagatcatccgacagaatccactggccagtgaaccgttttacacgctggccgagatttatgagaaccgtgatgaggtcaagttcctgaacttctccacattggcggcccacttgaatccccaggaccgagacatgtggatacgtgtctccgatctgctggtgcagcagggcaacttggcccgtgcgcgtctcatctacacgaaggccatcaaaatgctgcccaaagtgtaccagcttcggctgcgtaaggcgcagctgttgcaaaaaatgggcgaaaccaatgcctccatgtttacgtacttgaaaat

SEQ ID NO: 15290 - DNA, 2539 bp, DROSOPHILA
ccgcgccgttttcctcgatttttttcccatttacacttaccttaccttaaggaaccaaaaaatgcaccaaacagaggatttgaaattaatagatcggcagctatcgaaaatagctcgtaaaagatataaatggcaggaaaagaataaaactacgtttgttttatgcacacatggaatggtcaacgacgacgacaaagtcaaacaatgcaacccagaggaaaaacaacagcaacttttatccatgatgcgggaattgccatattatccgccaagtaacgagatgatagaggcgaacacaaaccaggatttgagcgcaaataatagtgtgttcggcgattttatgaagaccaaacgcttggagttttacaatgtgtgctccgtgatgcaaacgctgttaaccatcgacgatctgtccaatatggagctatacgcccaactgatccaatctgatgtgcctgtgcagcgcgtctccaagctgacatataaaataactttcaagagcacgcccgtgaatgcagaggactttgttgctcccaatctagaccaagtggtgctggtgcccaaggctagccttctggcatctccactacctaaacaattggtgctggccttgcttccgcatcctcatgaagatttggagccgggcgatccaatgcttcgccatgtggctagtgtggacaaggtcagcagcaccactgttcacgtgcgcttcagccgcaaacataaagcggtcttgtcaggacagcgcttctatgccattatccgctccagacgccttacaatccgatacatgtatcgcgcactcaatctgctccaggagagccccttggtgcgccgctacctatttccgtttcccagctggctgacgcagcttgtggacaattctcagattaaggtatgttgcgacggccatctgcctaattggatgcaaggaaggccacaagagccagctactccaacctcgctctctcttcttaattcgaccatctattccaacgctgagcagttagaggccgtacaacgcattgttgcgggaccaagtacccagggaccatacattctattcggaccaccaggcactggtaagaccactaccattgtggaggccattctacagctgcgccttcaacaaccacaaagccgtatactcgtaaccgccggttcgaactcagcatgtgacacaatcgccctgaagctttgcgagtatattgaaagcaacatccgtctccaggagcactttgcccaacagaagctgcccgaacctgatcaccagttgattcgcgtgtactcgcgctccatttatgagaagggctttgcgtccgtgccgtcactgctgctgaaaaattccaattgctcgaagagtatctacgatcatattaaagcttcacgtattgtaaagtacggcattatcgtggccacgctctgcacagtggcacgcttggttactgatacccttggtaggtacaacttcttcacccacattttcatcgacgaggcgggcgcttcgactgaacccgaggctttaatcggtattatgggtattaagcagacagcagattgccatgtgattttgtccggggatcataagcagctcggcgccgtgataaaaagtaatcgggccgcttctttgggattaagccggtctctaatggagaggctcctccaatccgattgctacaaatctgatgaaaacggaaactacgatcgcaaccggcagatgcgtctatgtcgtaactatcgatcccatccgcagattgtacgcctgtttaatgagctctactataacggagagctaaaagctcaggctcctgctatggatgtgaatctagcagccaactggagcgttctaacgaatccacagttcccgataatatttcaggccactcatggagtaaccaaccgggagcagaactccactagctcttacaataatttggaggcagaagttatatgttggtatgtaaaacgcctgataaacgatcgcgtggtcggacaggaggacgttggcattgttgcgccgtatacggctcagggtaaactagttaccaagctactccaaagtaagggatacccaaatgtagaggtaggcagcgtggagacataccagggtcgcgaaaagaccataatcattgctagtttggttaaatccttcacaaacatgggatttatgtgcaatcctcgtcgtgtaaacgttcttctgtccagagctaaagcacttctgatcctggttggcaatccggtcacccttcgtcaccattcggacttcaagtttgtaatcaatgagtgcaaaaaacatggtacatatctgctcaagaagagggactccgggcagagaccacatatactgattaaagcagatgaatcgaacgaggagtcgagcagtgagccggaggacgaagacgataagcttattccttcgtatgccaggatgcaacagcatactgatgcagccattcacaaaatcaaagcgcacccgaccaatgagaacgaccagctcgctaattcttttaagatatcaatgtcgaaattgtcgatataa

SEQ ID NO: 15291 - protein, 765 aa, DROSOPHILA
MMRELPYYPPSNEMIEANTNQDLSANNSVFGDFMKTKRLEFYNVCSVMQTLLTIDDLSNMELYAQLIQSDVPVQRVSKLTYKITFKSTPVNAEDFVAPNLDQVVLVPKASLLASPLPKQLVLALLPHPHEDLEPGDPMLRHVASVDKVSSTTVHVRFSRKHKAVLSGQRFYAIIRSRRLTIRYMYRALNLLQESPLVRRYLFPFPSWLTQLVDNSQIKVCCDGHLPNWMQGRPQEPATPTSLSLLNSTIYSNAEQLEAVQRIVAGPSTQGPYILFGPPGTGKTTTIVEAILQLRLQQPQSRILVTAGSNSACDTIALKLCEYIESNIRLQEHFAQQKLPEPDHQLIRVYSRSIYEKGFASVPSLLLKNSNCSKSIYDHIKASRIVKYGIIVATLCTVARLVTDTLGRYNFFTHIFIDEAGASTEPEALIGIMGIKQTADCHVILSGDHKQLGAVIKSNRAASLGLSRSLMERLLQSDCYKSDENGNYDRNRQMRLCRNYRSHPQIVRLFNELYYNGELKAQAPAMDVNLAANWSVLTNPQFPIIFQATHGVTNREQNSTSSYNNLEAEVICWYVKRLINDRVVGQEDVGIVAPYTAQGKLVTKLLQSKGYPNVEVGSVETYQGREKTIIIASLVKSFTNMGFMCNPRRVNVLLSRAKALLILVGNPVTLRHHSDFKFVINECKKHGTYLLKKRDSGQRPHILIKADESNEESSSEPEDEDDKLIPSYARMQQHTDAAIHKIKAHPTNENDQLANSFKISMSKLSI
